United States Patent Application Publication US 2014/0128277 A1 - sequence listing, part 4

SEQ ID NO: 3069 - DNA, 5225 bp, Homo Sapiens
  NM_006777
gcctttggcttcagcgcttcgcccccgcgctgtgccctctgtcggcggcgtggggcagctgtagcagcgttggcggcaggaggcggcggccgcgtcgacgtcgacccagactggagcgacgtttaaagaaggggcagaatcgctggggagtgcggcttcttcttgttgggggactcccagccttccgcgcgtccggaggaggagaagcggcggcgccgggaagcaggcatggagagtagaaaactgatttctgctacagacattcagtactctggcagtctgctgaactccttgaatgagcaacgtggccatggactcttctgtgatgttaccgttattgtggaagaccgaaaattccgggctcacaagaatattctttcagcttctagtacctacttccatcagctcttctctgttgctgggcaagttgttgaactgagctttataagagcagagatctttgcagaaattctcaattatatctatagttctaaaattgttcgtgttagatcagatttgcttgatgagttaattaaatcagggcagttattaggagtgaaatttatagcagagcttggtgtcccattgtcacaggttaaaagcatctcaggtacagcgcaggatggtaatactgagcctttacctcctgattctggtgacaagaaccttgtaatacagaaatcaaaagatgaagcccaagataatggggctactataatgcctattataacagagtctttttcattatctgccgaagattatgaaatgaaaaagatcattgttaccgattctgatgatgatgatgatgatgtcattttttgctccgagattctgcccacaaaggagactttgccgagtaataacacagtggcacaggtccaatctaacccaggccctgttgctatttcagatgttgcacctagtgctagcaataactcgccccctttaacaaatatcacacctactcagaaacttcctactcctgtgaatcaggcaactttgagccaaacacaaggaagtgaaaaattgttggtatcttcagctccaacacatctgactcccaatattattttgttaaatcagacaccactttctacaccaccaaatgtcagttcttcacttccaaatcatatgccctcttcaatcaatttacttgtgcagaatcagcagacaccaaacagtgctattttaacaggaaacaaggccaatgaagaggaggaggaggaaataatagatgatgatgatgacactattagctccagtcctgactcggccgtcagtaatacatctttggtcccacaggctgatacctcccaaaataccagttttgatggatcattaatacagaagatgcagattcctacacttcttcaagaaccactttccaattccttaaaaatttcagatataattactagaaatactaatgatccaggcgtaggatcaaaacatctaatggagggtcagaagatcattactttagatacagctactgaaattgaaggcttatcgactggttgcaaggtttatgcaaatatcggtgaagatacttatgatatagtgatccctgtcaaagatgaccctgatgaaggggaggccagacttgagaatgaaataccaaaaacgtctggcagcgagatggcaaacaaacgtatgaaagtaaaacatgatgatcactatgagttaatagtagatggaagggtctattatatctgtattgtatgcaaaaggtcatatgtctgtctgacaagcttgcggagacattttaacattcattcttgggagaagaagtatccgtgccgttactgtgagaaggtatttcctcttgcagaatatcgcacaaagcatgaaattcatcacacaggggagcgaaggtatcagtgtttggcctgtggcaaatctttcatcaactatcagtttatgtcttcacatataaagtcagttcatagtcaagatccttctggggactcaaagctttatcgtttacatccatgcaggtctttacaaatcagacaatatgcatatctttccgatagatcaagcactattcctgcaatgaaggatgatggtattgggtataaggttgacactggaaaagaacctccagtagggaccactacatctactcagaacaagccaatgacctgggaagatatttttattcagcaggaaaatgattcaatttttaaacaaaatgtaacagatggcagtactgagtttgaatttataataccagagtcttactaaactcctttgaaatactagaaagttttgttttggatgatggggcaggggtttcagaagatctgtaaaacaaattaaggtgcgaacaagttaatttgatctgccacattatctgaaggaagtgtagtgggatttttgttgataatttttagaagcaaattttcctgaaagttttgagtagaggtgagaccccctccccaagtatctgtttatatagttagttttcagctcatttaaaagaggcaaaaattaaaagcttggagagatagtttcctgaatagaatttgaagcagtctgaatgttctttgaaaataactggagttattagcataccctagtacatcttacagctttccccttccatgttagcactttactgctgaattctcaattttcttaacattgagacaataaatgtgtgttttgtcttgtatatggcataaagagtaaataagttttagagttgttctggaaaatgtcagaataagtcagtacttgggttgtgtaatctgctagtccaagcgaacagcaacctcctgctaccctccctctatgaaaatagccatgcagacaagtctctcatctgaagaacaaattagatttagctaattagaattaatcctggctttcattgccatagtctgtaaaagactttggtggctagaccactttataccttcgcagtgtggtctctgggggcaaaaaactaatgaaaacaatctctgtaatggcagataggaggagatgaaaagttctgttgcatggatttttaattctctggctaccacatagtagagaatggaatgaagatttccttttggcttcttaaggttaaaaatattcccatgaacatgaaaattttcaaattttgaatctgaaagccaccaaatgtatctttatgtataaatccttgtaaatgatagattccatgggtgagactttacatattttgggtgggaggctactggcatatatttttaaatgttcatattgcgtagaatctccactaggaagtctttatttgaaatagttgaatcagtgatctagtattttcctttcggcaagatttgttaggtttttaccccttctaaaataagttttattccatctgcaaattgctgcaatattatagtaatcagaaactacataaggaatgttatataggcttgtcagttcccatttttcttgacaacaataaataccacttttaaaaatgacacatatttaaacacttagaaaataaagttaacacttactgaagtgctagtactaaactgtgctagtactaaaagaaaacaggttggaacatacatatagcctagcatttataacagaattgttgaacgtctgtaaatgattttttttttttttgcaaaggaaaaaattgatactggaaaagattgttgtgcatagttattagtcatttgtaaccttgcttaagtatttcttagtccaacatagatattttctttctcctgaccatgtattttaaaatatagtctatttcttgactttgaacttaaagctttaatcataatttctcatgtatacatcgttcttctgatggtaagctggatttgaaggtagtggtttcagtgtttcttaagttggtagctgagggtatcaggcatcagttcatgcaataatacaagaaaaaaaatcctttgcttgccaagaggtagagtgatgtgcatttatctgttttctgttctgtaagtctagaccttcaaaccatttgtaaactaacccctgggaaatttgaaattacctgataacttaagactctgtgatctctggaatcaccatatgtttcttttttgtgtagatattaataacattactctttgactatagtgtgcactctgaaatgtactcagtgaaaatttgttttgagtttcattaatgctatttcaccagttagacataattacttctaccgatgtgaatgatacggatgccggcagagcttccagatctttcagactcaactgctaggtcaattagtttgtcataataaaacttggcagattctacaagtctattatgacaaaccaggaactaattctataatggaaaactatccattctgaataataggtatgtaattatttgctgctgctgctgtgctctgtaaattctgaatatgacatttaaactctgtgcctactaaaggtatcttctggagtttttgggaggagagaaactggaaaattaaattgtatttttgccagaagactcttacttgcatgtgtctcagggtcttcagtttttctataagtttccatatccaaagttcagaattcatgtgaaatacttctttggggcaaaagtccttcattcctggtatttattggattggaaatctgtagcaagatgctgtttaaaattaccatattgtttttttatcttatacttagctctctggctattgaacttccttttcttgtttgaagttagcttcaaatttgctcctatgctaaattacctgtaaatattctggataggaactacttgaaatagtaatttgttaaaagatatgacaaaatgaaaatgcttaaactacagaaatttaaaaatgccataacaatcttgcgagactaactttaaaatatactttaaatgattattatgattttggtggtaacgatcccccacacacaaccactatgaagaaataatgccgcatttttcccccattgtaccaaaaagataaaaaaatggtaaacactgatcaaggtattttgtattgtcaaggcatgcatattctaaagaattaaatgctaacttaacagcactggctttctggctggtcaactatatgaaaccttgttcattcctccgagtactgtaatgttcacacttgtacaatcttccctgtcatgactttaagttctacttttcattaaccatggcctgatattagttcttagagcttcttgtggcaaaaataaaatgatttaattctaaaaaaaaaaaaaaaa

SEQ ID NO: 3070 - DNA, 2110 bp, Homo Sapiens
  NM_006783
cttttccctcaagtagactttatgccatacagctattttcttgccccagttctagcagaatctaaccagtgttctagaagaaaatgtcctgcccccatgcagtctccttagaattgcagggtgctgctcagaactgctcctgtggagagctttgtctgttgtttggatccagcagcgtctttgggggtgttgcttgaagcttgccaaggaggagaggggggttctgaagagagaacaccagggctctagcctgtcacataactgggggtgtggagagcgcctcattgccactgcagtgactaaagctgggaagacgctggtcagttcacctgccccactggttgttttttaaacaaattctgatacaggcgacatcctcactgaccgagcaaagattgacattcgtatcatcactgtgcaccattggcttctaggcactccagtggggtaggagaaggaggtctgaaaccctcgcagagggatcttgccctcattctttgggtctgaaacactggcagtcgttggaaacaggactcagggataaaccagcgcaatggattgggggacgctgcacactttcatcgggggtgtcaacaaacactccaccagcatcgggaaggtgtggatcacagtcatctttattttccgagtcatgatcctcgtggtggctgcccaggaagtgtggggtgacgagcaagaggacttcgtctgcaacacactgcaaccgggatgcaaaaatgtgtgctatgaccactttttcccggtgtcccacatccggctgtgggccctccagctgatcttcgtctccaccccagcgctgctggtggccatgcatgtggcctactacaggcacgaaaccactcgcaagttcaggcgaggagagaagaggaatgatttcaaagacatagaggacattaaaaagcagaaggttcggatagaggggtcgctgtggtggacgtacaccagcagcatctttttccgaatcatctttgaagcagcctttatgtatgtgttttacttcctttacaatgggtaccacctgccctgggtgttgaaatgtgggattgacccctgccccaaccttgttgactgctttatttctaggccaacagagaagaccgtgtttaccatttttatgatttctgcgtctgtgatttgcatgctgcttaacgtggcagagttgtgctacctgctgctgaaagtgtgttttaggagatcaaagagagcacagacgcaaaaaaatcaccccaatcatgccctaaaggagagtaagcagaatgaaatgaatgagctgatttcagatagtggtcaaaatgcaatcacaggtttcccaagctaaacatttcaaggtaaaatgtagctgcgtcataaggagacttctgtcttctccagaaggcaataccaacctgaaagttccttctgtagcctgaagagtttgtaaatgactttcataataaatagacacttgagttaactttttgtaggatacttgctccattcatacacaacgtaatcaaatatgtggtccatctctgaaaacaagagactgcttgacaaaggagcattgcagtcactttgacaggttccttttaagtggactctctgacaaagtgggtactttctgaaaatttatataactgttgttgataaggaacatttatccaggaattgatacgtttattaggaaaagatatttttataggcttggatgtttttagttctgactttgaatttatataaagtatttttataatgactggtcttccttacctggaaaaacatgcgatgttagttttagaattacaccacaagtatctaaatttggaacttacaaagggtctatcttgtaaatattgttttgcattgtctgttggcaaatttgtgaactgtcatgatacgcttaaggtggaaagtgttcattgcacaatatatttttactgctttctgaatgtagacggaacagtgtggaagcagaaggcttttttaactcatccgtttgccaatcattgcaaacaactgaaatgtggatgtgattgcctcaataaagctcgtccccattgcttaagccttcaaaaaaaaaaaaaaaaaaaaaaaaaaaaaaaaaaaaaaa

SEQ ID NO: 3071 - DNA, 5029 bp, Homo Sapiens
  NM_006785
cgaggctccgtgccccgccccccgggtgccccgcccctttgcgcggctggcgcggccagccggccaggctcccctcggcaaacctgtctaattggggcggggagcggagcttcctcctctgagggccgtgccgcgctgccagatttgttcttccgcccctgcctccgcggctcggaggcgagcggaaggtgccccggggccgaggcccgtgacggggcgggcgggagccccggcagtccggggtcgccggcgagggccatgtcgctgttgggggacccgctacaggccctgccgccctcggccgcccccacggggccgctgctcgcccctccggccggcgcgaccctcaaccgcctgcgggagccgctgctgcggaggctcagcgagctcctggatcaggcgcccgagggccggggctggaggagactggcggagctggcggggagtcgcgggcgcctccgcctcagttgcctagacctggagcagtgttctcttaaggtactggagcctgaaggaagccccagcctgtgtctgctgaagttaatgggtgaaaaaggttgcacagtcacagaattgagtgatttcctgcaggctatggaacacactgaagttcttcagcttctcagccccccaggaataaagattactgtaaacccagagtcaaaggcagtcttggctggacagtttgtgaaactgtgttgccgggcaactggacatccttttgttcaatatcagtggttcaaaatgaataaagagattccaaatggaaatacatcagagcttatttttaatgcagtgcatgtaaaagatgcaggcttttatgtctgtcgagttaataacaatttcacctttgaattcagccagtggtcacagctggatgtttgcgacatcccagagagcttccagagaagtgttgatggcgtctctgaatccaagttgcaaatctgtgttgaaccaacttcccaaaagctgatgccaggcagcacattggttttacagtgtgttgctgttggaagccctattcctcactaccagtggttcaaaaatgaattaccattaacacatgagaccaaaaagctatacatggtgccttatgtggatttggaacaccaaggaacctactggtgtcatgtatataatgatcgagacagtcaagatagcaagaaggtagaaatcatcataggaagaacagatgaggcagtggagtgcactgaagatgaattaaataatcttggtcatcctgataataaagagcaaacaactgaccagcctttggcgaaggacaaggttgcccttttgataggaaatatgaattaccgggagcaccccaagctcaaagctcctttggtggatgtgtacgaattgactaacttactgagacagctggacttcaaagtggtttcactgttggatcttactgaatatgagatgcgtaatgctgtggatgagtttttactccttttagacaagggagtatatgggttattatattatgcaggacatggttatgaaaattttgggaacagcttcatggtccccgttgatgctccaaatccatataggtctgaaaattgtctgtgtgtacaaaatatactgaaattgatgcaagaaaaagaaactggacttaatgtgttcttattggatatgtgtaggaaaagaaatgactacgatgataccattccaatcttggatgcactaaaagtcaccgccaatattgtgtttggatatgccacgtgtcaaggagcagaagcttttgaaatccagcattctggattggcaaatggaatctttatgaaatttttaaaagacagattattagaagataagaaaatcactgtgttactggatgaagttgcagaagatatgggtaagtgtcaccttaccaaaggcaaacaggctctagagattcgaagtagtttatctgagaagagagcacttactgatccaatacagggaacagaatattctgctgaatctcttgtgcggaatctacagtgggccaaggctcatgaacttccagaaagtatgtgtcttaagtttgactgtggtgttcagattcaattaggatttgcagctgagttttccaatgtcatgatcatctatacaagtatagtttacaaaccaccggagataataatgtgtgatgcctacgttactgattttccacttgatctagatattgatccaaaagatgcaaataaaggcacacctgaagaaactggcagctacttggtatcaaaggatcttcccaagcattgcctctataccagactcagttcactgcaaaaattaaaggaacatctagtcttcacagtatgtttatcatatcagtactcaggattggaagatactgtagaggacaagcaggaagtgaatgttgggaaacctctcattgctaaattagacatgcatcgaggtttgggaaggaagacttgctttcaaacttgtcttatgtctaatggtccttaccagagttctgcagccacctcaggaggagcagggcattatcactcattgcaagacccattccatggtgtttaccattcacatcctggtaatccaagtaatgttacaccagcagatagctgtcattgcagccggactccagatgcatttatttcaagtttcgctcaccatgcttcatgtcattttagtagaagtaatgtgccagtagagacaactgatgaaataccatttagtttctctgacaggctcagaatttctgaaaaatgacctccttgtttttgaaagttagcataattttagatgcctgtgaaatagtactgcacttacataaagtgagacattgtgaaaaggcaaatttgtatatgtagagaaagaatagtagtaactgtttcatagcaaacttcaggactttgagatgttgaaattacattatttaattacagacttcctctttctaagattttgtgaattggttgaatagttctatacaaatgaagtatggaggtgtgtatgtttatatgtatataacaaaatattttcattgtgaccactctgaagtaagagcaatgggaatggcattattgtagaataagtcattgtatttttaacaccagaaagaaccttgccgatcaccaggcataacctaattttatccatggaagaaacacagaaaggcatctaagttagagctggcaccagaactgagacctccagaaatctattccagtattttttccactacacaactgccttcctgacaggttctgagataagtgttatgtttgtagatagagtgaaatatatttatatatatataaatatatacagatacatatctgtgtattatctcaaggaatgtacaaactttagtttttgattataaggacttcactgcaagttttagttaagaggtttgtatataaatctgttatagaacaggctgaaatttcttgttcataagattatgaaaccacatgagaagtgataaaatgtttgttaaagctagatagaggttaagaatcaagatataatggataattttcatagctgcctatcagaatttcccaaatatttagcatcttccttgataatatgtattttcttcttgaatttcactggcctaatgagataatactcttatctttggctctacctaaaagttggttaaaaatgcaattggcattaacaaggaaaaatactgaattagtaattttaaaagtctcacaaagaaaatcccaggcctagatggctgcattgttgaattctgccaaacattaaaattagcactaattttttgcacactgtttctaaaagtaggagaggaaagaacacttcccaacttactctaggtcagtattaccctgatactagactagacatcacaagaaaactataagccaatattccttattaatacaaacacaaaaatcattaacaaaaatattagcaaactgaatccagcaacctataaaaaggattctatatcatgaccaagtggaatttatcccaggaattcaaggttggttcaacatctaaaaatcaaataagctaatatacagtcagttctcattattcacagtaattatgttctacagaatattctcccataaacactgaattaaatatggaacaactgcttttaggagaaagtgtatttgtgtatatgtgtgtatacatatgtttatctcacacacattatgagcttgaattcttaattcatcctagcaaattctaccttattttacagaagtgaaagtgaggtatcagaagtgttaagtgacatgcctgaggcacccccctaacaggtgtcagagctgaaattcaaaccccatccagctggccccggagccagagcttcttgtactacacagaattgcccctgccatttccaccctccagtcatttctctatgagactgaagcaggaaggcagagcatcatcttgttcagcctcagctgggaacatgtgtactgggtgactcaaatttttcacccatttacacatatccacaaatgactgcaaaagtgccacggatatcaatttgagggttataaattttagcaagttggtaaattcacaaatacataaccttgaataatgaggatcaactgtaccatatttaataaagcacaaaacccacacagattgtcttattacagcatttgataaaatccaaaactctttcataaaaacactcaacaaacttaggaataaaaggaatcttcctagatatgataaatataacatctatgaaaagcccacacctaacattatacttcatggtgatagactgaaggctgaatgttttccccttaagattgggaagaaggacaaggatgttcactcggcactacttctattcagcattgtacttgaagttctagccacagcagttaggttaggaattcaaggtttgttcaacatctaaaaatcaaataagctaataaagaaaagaggtttatactgcaaaagaagtgaaactatatgtattcacagttgatacatagttgtatatagaaaatgctaaagaatccataaaaagtaataaatgagttcaacaggt

SEQ ID NO: 3072 - DNA, 1643 bp, Homo Sapiens
  NM_006789
acgaagcctggcctgctgggtccttttcccgtcatccccagccagatttagctgctgacagctgcttgggactctgccgccagggcctggcccagacctgcctgcctctctcctctccctcagtgactcctgagccacagcccctccatggcccagaaggaagaggctgctgtggccactgaggctgcctcccagaatggggaggatctggagaacctggacgaccctgagaagctgaaagagctgattgagctgccgccctttgagattgtcacaggagaacggctgcctgccaacttctttaaattccagttccggaatgtggagtacagttccgggaggaacaagaccttcctctgctatgtggttgaagcacagggcaaggggggccaagtgcaggcatctcggggatacctagaggatgagcatgcggctgcccatgcagaggaagctttcttcaacaccatcctgccagccttcgacccagccctgcggtacaatgtcacctggtatgtgtcctccagcccctgtgcagcgtgtgctgaccgcattatcaaaacccttagcaagaccaagaacctgcgtctgctcattctggtgggtcgactcttcatgtgggaggagccggagatccaggctgctctgaagaagctgaaggaggctggctgtaaactgcgcatcatgaagccccaggacttcgaatatgtctggcagaattttgtggagcaagaagagggtgaatccaaggcctttcagccctgggaggacattcaggagaacttcctatactacgaggagaagttggcagacatcctgaagtagggcaactgggctttgcctcacgtattcctgctgccaccaagagacagcaatgacatgtacagccatctgggacatgcctgtcttcctaataccatttggagctggacaacatttgacaccaaccaatcatactggacaaggcccttagaggacttgaaatatacttctcatgctgtagtttatttaggctgtgactctctctctaatgctgctctcgggaaggacgaaagtgacctgcaaggagagaaatgcaaccatacatgggctccagtcaactatgggactgaaggtcctaattgctcacccaagggggctgcttaacacaaacagcctcagacccgaggtttagatttctgaaatatgcattttatgttaagttgggtatttttttaaaaaaagaaaaacagcaacattaataaaagaagtggtgtgtttttcccgtggccagatttttaagaaacttgaacatctggaagttgccacagacaagcgagctagtccagacacagggacactccaggctatgaaccaagccatggttaaaccaagacttgcctagacaatgcagaataactctcccatacagacttcttacgacaatcaagtgagggcctttcccttctctgaaggcaagtaatagggcagaaggtggaacaaaaagcatgagaaatctaaggtagccacatcccaaatgccagttaataagcaactagcttctttattagagaggagcgggtgaaaagtagtagtttaatgttcagatatacaatcatttaaaagtattcaatacatggtgtttgatggtaatggcaaaaaaaaaa

SEQ ID NO: 3073 - DNA, 3482 bp, Homo Sapiens
  NM_006795
ccctaccgcccccaattccgccctgcccccgccgcggcggcgctagccgccactgagggaccgaccctataaaggccgctccgcgaggggtgcgcagcattcggcagagggcgcttcgacgggctgggctgtgcgcctgcgcagtgtgggtcgctcccgattccctgccccggccggccccgcctcggctccgcaccctcgccccgctctcagccgccgctctgccccgcagcagccagccccgtgtccggcagtatgttcagctgggtcagcaaggatgcccgccgcaagaaggagccggagctcttccagacggtggctgaggggctgcggcagctgtacgcgcagaagctgctacccctggaggagcactaccgcttccacgagttccactcgcccgcgctggaggacgctgacttcgacaacaagcctatggtgctcctcgtggggcagtacagcacgggcaagaccaccttcatccgacacctgatcgagcaggacttcccggggatgcgcatcgggcccgagcccaccaccgactccttcatcgccgtcatgcacggccccactgagggcgtggtgccgggcaacgcgctcgtggtggacccgcggcgccccttccgcaagctcaacgcgtttggcaacgctttcctcaacaggttcatgtgtgcccagctgcccaaccccgtcctggacagcatcagcatcatcgacacccccgggatcctgtctggagagaagcagcggatcagcagaggctatgactttgcagccgtcctggagtggttcgcggagcgtgtggaccgcatcatcctgctcttcgacgcccacaagctggacatctccgatgagttctcggaagtgatcaaggctctgaagaaccatgaggacaagatccgcgtggtgctgaacaaggcagaccagatcgagacgcagcagctgatgcgggtgtacggggccctcatgtggtccctgggcaagatcatcaacacccccgaggtggtcagggtctacatcggctccttctggtcccacccgctcctcatccccgacaaccgcaagctctttgaggccgaggagcaggacctcttcaaggacatccagtcactgccccgaaacgccgccctcaggaagctcaatgacctgatcaagcgggcacggctggccaaggttcacgcctacatcatcagctccctcaagaaagagatgcccaatgtctttggtaaagagagcaaaaagaaagagctggtgaacaacctgggagagatctaccagaagattgagcgcgagcaccagatctcccctggggacttcccgagcctccgcaagatgcaggaactcctgcagacccaggacttcagcaagttccaggcgctgaagcccaagctgctggacacggtggatgacatgctggccaacgacatcgcgcggctgatggtgatggtgcggcaggaggagtccctgatgccttcccaggtggtcaagggcggcgcctttgacggcaccatgaacgggccgttcgggcacggctacggcgagggggccggcgagggcatcgacgacgtggagtgggtggtgggcaaggacaagcccacctacgacgagatcttctacacgctgtcccctgtcaacggcaagatcacgggcgccaacgccaagaaggagatggtgaagtccaagctccccaacaccgtgctagggaagatctggaagctggccgacgtggacaaggacgggctgctggacgacgaggagttcgcgctggccaaccacctcatcaaggtcaagctggagggccacgagctgcccgccgacctgcccccgcacctggtgccgccctccaagcgcagacatgagtgatggcgcccggccccgcacctgccatttgcacgcccggccgggaggcagagacggggggaggggaagcctcaccatttctcaaggtccataaagactgagcggatgtttcctcgcctctcgaaaaggaaaaccaccatctttcttttaaggctgttcctgggcctggcgggggaggcaggggtgagaggatggaattgtgtgcacaagaactgtggctattttaatatataacgttagaggctgcgttctttgtcgccgcctcccctgtgtgccagccctgtgtgcacggcctctgccccccggcctttgctgtggctggagctggacagtgcagcgactgcgaccgtgggggagccaggtcgcccttttggcagctgctaggctgaggctgcatggacaggaacaccaggcaccctccgtgtgcttctgagctgaggttgcttcacgggaccgtggcttccttcctcacctggctctgcctcccccgtgctctcgggcgaagtgggttcttgtgccttcccctcccgggcccaggctccccgtgcgcgggccctgccctttcctcccgcgccccaccggctccgacgcgcaaccccgctcagcagtcacagaagcagggcccagccaccttggtctttttttgggagttcaggggagtaggagaatgtcttccagaaaaatacataagctagtttctgttctgtaaagtgatatctttcatacttgaccaaagttcccaataacttcccaaccactgttcaaaagctgtgatttttgtctccccttcccaccctccagccaaggagcagccctgcccagggggcattaggtgtgggtacccggggagcaccccgttcctggaccccagtgttgcatttcctggctgaggaagggtggtcatcccagctcctgccctaccctctcacttaactggagctttgggacgcaccctccacagtgggaggtggtggtgggtggcggtggcggggcctcacgacagcttggtgctggtaagaggaagcccgtggttctggctaggctctcatgtccagacagcggggaccaggggaaaacccagccccttctgtaatcccccttcatttcctaccttccttcctcctctgtttagcaaaggagggcagctcacttggatgtccttacaacgcccctggcccccaggttgagcaataagaaaccagaaccttgcggcccagtggcccgggccagttcaggccgcctccccctcctctgcctggggccattgagcccagcctccagggcccgggcgcgtttgcaggccagtggccactgtccgggctgtgatggcaccaaggcaggtggagcaccaggtaccacacagctgggcttcccaccaggctttcccgcgggggtctcagggagcttctccccagcgctgctcggagtctgcaggaactggccttgttctccttagcccgtcactccatacagtattaggtgaggatggatgcgggcgctgtccttgccgggaagtcactgttgaagttgcagtggcttgttcacacctgtgggaagagaagtgaagactttctccttgcattaaaaagtctgaactgtgaaaaaaaaaaaaaaaaaaaaaaaaa

SEQ ID NO: 3074 - DNA, 3223 bp, Homo Sapiens
  NM_006796
gccgacgtcagcgcgccggggcggggctggcggcaggagacgccgcgttgagagcttgggctcctccgtgagccgccggcgcgcttcgctgcctggcggcctttccccgagccgagcccgcttcccgaggccgccagtcgtcgcctgcccgcgcctgcgcagcgtcccgggccgagagggccacggcggcggccatggcgcaccgctgtttgcggctgtggggccggggcggctgctggccccgcggcctacagcagctcctcgtgcctggcggcgtgggcccgggcgagcagccctgcctccggacgctttaccgatttgttacaactcaagcaagggccagcagaaattctcttttgacagatataattgctgcttatcaaagattctgttctcgacccccaaaaggatttgaaaaatactttcctaatggaaaaaatggaaaaaaagctagtgaacctaaagaagttatgggagagaaaaaagaatcaaagccagctgctaccacacgctcttctggaggaggaggtggtggcggtggaaaacgaggtggcaagaaagatgattctcactggtggtccaggtttcagaagggtgacattccatgggacgacaaggatttcaggatgttcttcctctggactgctctgttctggggtggagtcatgttttacttgctgctcaagagatccgggagagaaatcacttggaaggactttgtcaataactatctttcaaaaggagtagtagacagattggaagtcgtcaacaagcgttttgttcgagtgacctttacaccaggaaaaactcctgttgatgggcaatacgtttggtttaatattggcagtgtggacacctttgaacggaatctggaaactttacagcaggaattgggcatagaaggagaaaatcgggtgcctgttgtctacattgctgaaagtgatggctcttttctgctgagcatgctgcctacggtgctcatcatcgccttcttgctctacaccatcagaagagggcctgctggcattggccggacaggccgagggatgggcggactcttcagtgtcggagaaaccactgccaaggtcttaaaggatgaaattgatgtgaagttcaaagatgtggctggctgtgaggaggccaagctagagatcatggaatttgtgaatttcttgaaaaacccaaagcagtatcaagacctaggagcaaaaatcccaaagggtgccattctcactggtcctccaggcactgggaagacgctgctagctaaggccacagccggagaagccaatgtccccttcatcaccgttagtggatctgagtttttggagatgttcgttggtgtgggccctgctagagtccgagacttatttgcccttgctcggaagaatgccccttgcatcctcttcatcgatgaaatcgatgcggtgggaaggaagagaggaagaggcaactttggagggcagagtgagcaggagaacacactcaaccagctgctggtggagatggatggttttaatacaacaacaaatgtcgtcattttggccggcaccaatcgaccagatatcctggaccccgcgctgcttaggccggggcgtttcgacaggcagatctttattggaccaccagacataaaaggaagagcttctattttcaaagttcatctccgaccgctaaaactggacagtaccctggagaaggataaattggcaagaaaactggcatctttaactccagggttttcaggtgctgatgttgctaatgtctgtaatgaagctgcgttgattgctgcaaggcatctgtcagattccataaatcagaaacactttgaacaggcaattgaacgagtgattggtggcttagagaagaaaacgcaggttctgcagcctgaggagaagaagactgtggcataccacgaagcaggccatgcggttgccggctggtatctggagcacgcagacccgcttttaaaggtatccatcatcccacgtggcaaaggactaggttatgctcagtatttaccaaaagaacaatacctctataccaaagagcagctcttggataggatgtgtatgactttaggtggtcgagtctctgaagaaatcttctttggaagaattacaactggtgctcaagatgacttgagaaaagtaactcagagtgcatatgcccaaattgttcagtttggcatgaatgaaaaggttgggcaaatctcctttgacctcccacgtcagggggacatggtattggagaaaccttacagtgaagccactgcaagattgatagatgatgaagtacgaatacttattaatgatgcttataaaagaacagtagctcttctcacagaaaagaaagctgacgtggagaaggttgctcttctgttgttagaaaaagaagtattagataagaatgatatggttgaacttttgggccccagaccatttgcggaaaaatctacctatgaagaatttgtggaaggcactggcagcttggatgaggacacctcacttccagaaggccttaaggactggaacaaggagcgggaaaaggagaaagaggagcccccgggtgagaaagttgccaactagaggcccagagggaggccatctcagtctgtccactgtggtttcagctggtgcattatttcagctgtggctttcagaagaatgggaatgctgcgctgattttagccagccactggcccagctgaaatgatggggaaaggagtccttagtcctttcagcctcagaggtcacagtgggtggcaggtgactttccggaggccttgagggaaatgcacactgtcccatagcctcattgggctcccagacgtgctggaaaggttgagcccagagtggccgaggctggaccctgtggcaccaagtggggtcggctgaccgtgtggcagggatcgttgcactggactcttggcgtgtgggaagggatgctttctctttgtcgcccactcttcattcctgtttctcctcagttcccctgtgcagatgggctgtgaaattaaattggagtcttgataagaacattttaatttgacttaatattttaaagattgaatccagatcacttgttgctgtcttaatggaatggttttctacaggagctgtaacatacttaaaaatatgaatgtattatgtaaatatggcttctttacataaaaaataaaatgtcaacactgtacttttctgaacacaaaaaaaaaaaaaaa

SEQ ID NO: 3075 - DNA, 2855 bp, Homo Sapiens
  NM_006802
ttccggcactcgcggaactttggtgcagcctgatgcgcaacgtggggactcaggcgcgctgggcggcaggagttgcttccggccgtgttggtggtctgaattgagaagccgcgactaagggaagatggagacaatactggagcagcagcggcgctatcatgaggagaaggaacggctcatggacgtcatggctaaagagatgctcaccaagaagtccacgctccgggaccagatcaattctgatcaccgcactcgggccatgcaagataggtatatggaggtcagtgggaacctgagggatttgtatgatgataaggatggattacgaaaggaggagctcaatgccatttcaggacccaatgagtttgctgaattctataatagactcaagcaaataaaggaattccaccggaagcacccaaatgagatctgtgtgccaatgtcagtggaatttgaggaactcctgaaggctcgagagaatccaagtgaagaggcacaaaacttggtggagttcacagatgaagagggatatggtcgttatctcgatctccatgactgttacctcaagtacattaacctgaaggcatctgagaagctggattatatcacatacctgtccatctttgaccaattatttgacattcctaaagaaaggaagaatgcagagtataagagatacctagagatgctgcttgagtaccttcaggattacacagatagagtgaagcctctccaagatcagaatgaactttttgggaagattcaggctgagtttgagaagaaatgggagaatgggacctttcctggatggccgaaagagacaagcagtgccctgacccatgctggagcccatcttgacctctctgcattctcctcctgggaggagttggcttctctgggtttggacagattgaaatctgctctcttagctttaggcttgaaatgtggcgggaccctagaagagcgagcccagagactattcagtaccaaaggaaagtccctggagtcacttgatacctctttgtttgccaaaaatcccaagtcaaagggcaccaagcgagacactgaaaggaacaaagacattgcttttctagaagcccagatctatgaatatgtagagattctcggggaacagcgacatctcactcatgaaaatgtacagcgcaagcaagccaggacaggagaagagcgagaagaagaggaagaagagcagatcagtgagagtgagagtgaagatgaagagaacgagatcatttacaaccccaaaaacctgccacttggctgggatggcaaacctattccctactggctgtataagcttcatggcctaaatatcaactacaactgtgagatttgtggaaactacacctaccgagggcccaaagccttccagcgacactttgctgaatggcgtcatgctcatggcatgaggtgtttgggcatcccaaacactgctcactttgctaatgtgacacagattgaagatgctgtctccttgtgggccaaactgaaattgcagaaggcttcagaacgatggcagcctgacactgaggaagaatatgaagactcaagtgggaatgttgtgaataagaagacatacgaggatctgaaaagacaaggactgctctagtgttcagggatgtagctcagcttttgggctagcccaggcttccctaagatctgctttttctatttctcccaaccaaatcctcttaaagaccctttgctatgtagtctcatggtctagcatgcatcttgtagaaacaaggcatgctggcagattgcagggttgagatgtgttttatctgttttatattttaaaagattctgccagaaaataaaaccagaccttgttctaaagcccagggttatggaccaactcagtgcttcaggtcttaacgcctccatacctcttcctcaccaactttactagtagctgagatttaatgggcacctattatgctacatatcatgttaggtaaatctgacctgacctctttccccaccctcctttgttgctgcttccctgaatgagtattaccccaggatgaggtctgccatcagcttagttagccattgatgcaaatactagggaaagactaggaggatgagccagggttgctactaaggactaagtgtcgcaccaaggtttgccttttgtatttgcataaagaaaggagttggagctgggtgcagtggcttgtgcctgtagtcccagctacttgggaggctgaggcaggagggttgcttgagactagcctaggtaacatagtgagaccctgtctcattaaaaaaaaaaaaaaggcatggtggcacgcactgtagtcccagctactcaggagactgaggctagaagatcctttgaacctaggagtttgagaccagcctgggcgatatagtgaggccccatctcaaaaaaaaaaaaaggggggggggggggagttgggctgtgttggaatgggcctgcagcccaacaaacaagggaactaggaccgacagtgacttcaccagcttgctaggtcagaatgagagactggtgggtctgtctacctgtttcttctacaagatccctatttgactgtaaaagtagctaatactcacatgttctccaatcccaggtagccatggtagagttgggtagagttgagcagctgccccaggatccaaatgtggtgtctgaaatggaaagaactaaggcaaccaggaaggcactgatctgccttataagcacagtcatctgaaagtcaggcctgctgcaggacaggatcccccagagaccccatttgcctctcaacactcagaccttcaactgttttttaataaatctactttttaaaaaaaaaaaaaaaaaaaaa

SEQ ID NO: 3076 - DNA, 3624 bp, Homo Sapiens
  NM_006803
atacccaatcagcggccttcaggcgcagatcgtgggcggagcggtagccaggccgcgggccggccaatcagcgggcgagcggctgcctcagcgcgcgcggcgggcggggcggggcctgtccgcgcctaggagcagtgggcgctgagagcagcaaggccagagttgaaaacttacagagtcctgaggctttcagactgaaaaaggctttcttctgtcactgacaatcgccaccatgatccatagtcttttcttgatcaactcctctggagacattttcctggagaaacattggaaaagtgtggtcagccgttctgtttgtgattacttttttgaggcgcaagagagagctactgaggcagaaaatgtgcctccggttatccctacccctcaccactatctcttaagtgtttaccgccacaagatcttttttgtggccgtgatccagacggaggtcccccctctgtttgtcattgagtttcttcaccgagtggtggacacatttcaggattattttggagtctgttcagagccagtgatcaaagacaatgtagttgtggtttatgaggtattggaagagatgcttgacaatggttttccattggctaccgagtcgaacattcttaaagaactcataaagcctcctaccatccttcgaacggttgtcaacaccatcacaggaagcacgaatgtgggtgaccagcttcccactgggcagctgtcagtggtgccttggcgacggactggggtgaaatataccaacaatgaggcctattttgatgtgattgaagagattgatgcaattattgataaatcaggctccacaattactgctgagatccagggggtgattgatgcctgtgtcaagctgactggcatgccagaccttacactttccttcatgaaccctaggttgttggatgatgtcagcttccatccttgtgttcgtttcaaacgctgggaatctgagcgcatcctctccttcatccctcctgatggaaacttccgcctgctgtcttaccatgtcagtgcacagaatctggttgcaatcccagtgtatgtcaaacataacatcagtttccgggacagtagttcccttggacgctttgaaataacggtgggacccaagcagacgatggggaagaccattgagggagtgactgtcaccagccagatgcccaagggggtcctgaacatgagccttactccatcacaggggacacacacattcgacccagtcacaaagatgctgtcttgggatgtaggaaaaataaatccacaaaagctaccaagtttgaaggggaccatgagtcttcaggctggagcttccaaaccagatgaaaaccccacaattaacctgcagtttaagatccagcagctggccatttctggactcaaggtgaatcgtctggatatgtatggagaaaagtacaaaccctttaagggcataaaatacatgaccaaagctgggaagttccaagttcgaacctgaagggagcatttgctgagggaatagtcttgcacattttttcatttcttacttgtctaaaagtaaaaaaaaatatcagcctgtctcctaggtcagtcccctcctggacccacccgctcccttttttccttagccttcagtgccatggaactaatcaagggaggaaaaggtcaccagggagaactggacagaactgaaacacagcaacaccagttctcaaggacaaggtgtgtgatgggggtaggaagcttggtgcttatgtaaccattttaaacgtggtttctataggaaagaccaacatttgtttagcttgcttggctttaattatctaaagccaatgaaagacttctttgttgattttttaagatagaaagattaaaaagaaagaaagatgggaagaaaatgaatgtcagtcaaggaaaggccacttaaggatctgctctatgaaggagaagaaagaggaaaaagaagtaaaggagttaggaggagacacttaaatgaaagattggcaagaaaagcagtcggactctaccttaaggagggatgggaaggaaagagttgagttggtttctttctgattcctctactcatgtagaaaacacttgtacttctggaaatggactggagactttttaaatttgagtccactattgacatggaaaccccagtggaatcagattttccctcaaagaccatgatggtatcggactagttttcagacactgcctgttgctgtccatcagcacttggtctcttatcttcagtgagaaggtgacccgccttcttcccatggtggctgcctaaagtgcttcttttctaacccaaaacagttctactcacttccttttacagaattcaccggccattttcctgttacctgatccttctacaggatttttaaaaagtaagagagtttcagagaagccgatcccataatccccagtgcagccagggtttgtgtgtcatcgtactggagtagagggccgactcttcccatgaaggtgagcacagctgtgagtgagtgagctcatatctccatttgtcagtgctggactggtaccagatcgtaaccttcccgttggtcggaaacttttccatctgtcgccctagaaaaagagaaagcttaccatcgagggtgtggttgatccttgaagctgcttggtaaagttatcatttcctcagtcttttcttttgtactcctatcatgtattcattaatatctaccagtcccttttcattctaagacaaaacatttctcctaaatctctgaataaaatcagtgctgtaggaagatggactgtgttgatcatgggtgtaagcaacccagtttaagaaacatggcaactaaagggatacctcaggctttctttcccagtgggtcatttttgtcctagttcagtgtgtctgttactatttaaatatttatacaaaagggtttttgtttatagcttaaggaatgatactgtgctctgcttggtgcatggagaaaaaggaagacccgtactctccacaccctagagcttttctctaaatattgtgcaaagtttttgctagttttatcttctgactttgggactagtttttgctgcagagttgtgttgctttgtgattttcctctgggatagtgtactgtacacaaccagatgtgttccacactccgtgactccgcagtttgtcctggagtgacatacacatccaccatggaaagggaagcatctctgcctgtggattctcaagtacttggaagcacctctcctgaggaacctacaggattctaaggtttcctaggtcactgaacaactaatcttggtccctgaatatttctaggtttgtaagtgcagcagttttatttcctctagaactcatcctgtttcaagggaagtacctaagaagatatagagtgtttctagggtaagggacctgcaggtgtaagcatagatgaaataactgtcctgtcacatgtgcagcaggccatggagtgtagcgggcatcgctgccgccattcctgcagcatcaccataagcagtgcagggtgtctccatcgagctgtttggttccatgtgtgtttaacatgtgcagaagtagcttctctgtttaagtttaataaagttgagtttcaccagtcaaaaaaaaaaaaa

SEQ ID NO: 3077 - DNA, 2983 bp, Homo Sapiens
  NM_006805
gcccagataggggagcggaggtggcggcggcggcggtagcggtggccttggttgtcttccagtctcctcggctcgccctttagccggcaccgctccccttccctcccccttcctctcttccttccttccctccccttccctttttcccttccccgtcggtgagcggcgggggtggctccagcaacggctgggcccaagctgtgtagaggccttaaccaacgataacggcggcgacggcgaaacctcggagctcgcagggcgggggcaaggcccgggccttggagatggagaattctcagttgtgtaagctgttcatcggcggcctcaatgtgcagacgagtgagtcgggcctgcgcggccactttgaggcctttgggactctgacggactgcgtggtggtggtgaatccccagaccaagcgctcccgttgctttggcttcgtgacctactccaatgtggaggaggcggacgccgccatggccgcctcgccccatgccgtggacggcaacactgtggagctgaagcgggcggtgtcccgggaggattcggcgcggcccggtgcccacgccaaggttaagaagctctttgtcggaggccttaaaggagacgtggctgagggcgacctgatcgagcacttctcgcagtttggcaccgtggaaaaggccgagattattgccgacaagcagtccggcaagaagcgtggattcggcttcgtgtatttccagaatcacgacgcggcagacaaggccgcggtggtcaagttccatccgattcagggccatcgcgtggaggtgaagaaagcagtccccaaggaggatatctactccggtgggggtggaggcggctcccgatcctcccggggcggccgaggcggccgggggcgcggcggtggtcgagaccagaacggcctttccaagggcggcggcggcggttacaacagctacggtggttacggcggcggcggaggcggcggctacaatgcctacggaggcggcggcggcggttcgtcctacggtgggagcgactacggtaacggcttcggcggcttcggcagctacagccagcatcagtcctcctatgggcccatgaagagcggcggcggcggcggcggtggaggcagtagctggggcggtcgcagtaatagtggaccttacagaggcggctatggcggtgggggtggctatggaggcagctccttctaaaagaaaatttaaaatgcctgggagtggctataggggtagctctttccaacagcccaagtggggtcaactcctaagccccaccccctcacacacaccgccttccctgttttgcccttgggggagccacttctaaggctgcttacccttgggggtgttcctctatttgcctgccacctctcttgtctctccctctgaagatggactcggccccacatacacatttttgtgttacagtcattgatggactctatttttttattattacttggaccttggtcgtttttatactagcaaaatgtcttgttttaatttgtgttttttggggggagggagggagtgaacttgctgattctgtagcaaaacctgggtgggggttggggtggggggtagtttactttgttgtaaggacttgataacctggctacagcgttttctatgaaatctacttggatcccatgcctgaaatttggaagcatatgtacaaaaatcatttttacgttttatttttaataaatcattgtgtttgaccgtacatgtctaacattttttttctaggatccattccgtaccgttttttaagggatatttgtttaagactttacgtgttaattctttattcttgatgtgtacttagagaaacttaagaggtcctgtggtttttttcccctctcctgttgccctgctagttgcgtgttgaattatatcccttacaggcaaaacttttgaagtggtggatgtggctttttaaactcttaagtttctgtgcatccatctcttgtactaagcgaattgtttatcatcttgacatggttggtcatttctatgacaatttacttcaaactgtgtactgtgtagttctatatagtttgtgttaagcatgtcattcatataaactgtttaaaatttttcagatggcctagtttcatccctcttactggtttgtctgtaatgaatggttaaaaataagggttatattttaccctcaaatgcgtttttgtactttcagagcaggtttaaacgttttttttttttttttcctatatccgaactgttggcctcatggaaatccctttcccgatctttgtagcaccatctactggcagaatggcagagtagctgcgaaacaatttgtttaaaaacttgcttaagacaattgcatcagatttggaagttttgccatcaaaattctttgcagaattggaagttaacacatttgcttgtaactgagatgggcttcacaggaatgtagttgccagttcatatcacaatagccctttctatatgaggtttgaaaatgtaaactgctatgcatagcttgggcaatagccctaaattgctatgacaactaatgaaccagctacgtatactggtattttaggtgcaagttgtaaagcaaaatatctgtgtattctgcttggttaacaaatgtatatttgtagccctttcctgcaatagcattcaagttgttgtttataagagaagaacaaaagtgataataggtgaaaattgcctttctggatagaaatagagaatagcaacgtttatggatatcacaaataaagaattcaattctttacatgattgagtgagagtatgtataacctggtgggtgggttcagagtaccttttaatctagtatgcttaacttgatgttaatatttaacttaaatatttgacttacatgttgacgttgaaggctcaaagctatactaagaagctttctgaaagattgggctttaaaataaaataatattttaatattgaaaaaaaaaaaaaaaaaa

SEQ ID NO: 3078 - DNA, 2066 bp, Homo Sapiens
  NM_006809
aggtctcgcaggccccgccccctcgccgcgggttcgctgttgggcggagatattcgccgccggcgcttgcgcccggaaggtgtgccgcaccacacgggggaggaaggaaggagctcccaactcgccggcctggccacgggatggcccccaaattcccagactctgtggaggagctccgcgccgccggcaatgagagtttccgcaacggccagtacgccgaggcctccgcgctctacggccgcgcgctgcgggtgctgcaggcgcaaggttcttcagacccagaagaagaaagtgttctctactccaaccgagcagcatgtcacttgaaggatggaaactgcagagactgcatcaaagattgcacttcagcactggccttggttcccttcagcattaagcccctgctgcggcgagcatctgcttatgaggctctggagaagtaccctatggcctatgttgactataagactgtgctgcagattgatgataatgtgacgtcagccgtagaaggcatcaacagaatgaccagagctctcatggactcgcttgggcctgagtggcgcctgaagctgccctcaatccccttggtgcctgtttcagctcagaagaggtggaattccttgccttcggagaaccacaaagagatggctaaaagcaaatccaaagaaaccacagctacaaagaacagagtgccttctgctggggatgtggagaaagccagagttctgaaggaagaaggcaatgagcttgtaaagaagggaaaccataagaaagctattgagaagtacagtgaaagcctcttgtgtagtaacctggaatctgccacgtacagcaacagagcactctgctatttggtcctgaagcagtacacagaagcagtgaaggactgcacagaagccctcaagctggatggaaagaacgtgaaggcattctacagacgggctcaagcccacaaagcactcaaggactataaatccagctttgcagacatcagcaacctcctacagattgagcctaggaatggtcctgcacagaagttgcggcaggaagtgaagcagaacctacactaaaaacccaacagggcaactggaacccctgcctgaccttacccagagaagccatgggccacctgctctgtgcccgctcctgaaacccagcatgccccaagtgagctctgaagccccctcctcaatcccttgatggcctcccaccctgtaagaggctttgcttgttcaaattaaactcagtgtagtcaaacacagacatggttgttgcaccagaaaggtccccactagagctaagcgtgaagctgaagctctgtccctattcccccagcccagctagctgatcacaccaacagatcctcatcagcaaagcatttggctttgtcctgcccaagtgggctgcagactgagtgctgcccttgtagcttccccagaccccaactcactgcagttcatctgaacaacctgagctcctgggccggggtggaaggagggggataaacctaaggccctgatccaaagcagcctgttgagctggttctccagggctgcagtctctccaggtgtacagctgctgtccctgccctgtcctgtccttgcacagtctcctatgtctgagccccagtgccttctgttcgggccctcctttggtgggaaggcagagccctgacccttgaatggttgtccttgactctgtgctgctgccttctgcagagaggcacctaagctgtttaaagagcccagtgattgtggctgctcctcctagaggtgggagggggcaagaggcctccttggtcagtgtccatgctttctgggcagggacttggttttttgttccaacagtggccttctccgggcttcatagttctttgtaatatgttgaagttaatttgaattgactgattttgttgaactgtgtgtttaagctgttgcattaaaaagctttcttctacatcaatatctgctgtgctttcatttatgccttttcagctttgcacctggaactctgtagtaataataaaagttattgcttattgggcattcaaaaaaaaaaaaaaaaaa

SEQ ID NO: 3079 - DNA, 2592 bp, Homo Sapiens
  NM_006811
catccgtgcgtctgtggaaggctgcgtttccggcctgagaaaccgtcatgtttctggggagtcacctcagctggcagttaccaccgtgttagaaagcagcctcaggaccggccacctccatcactggcgtcaccatgggggctgtgctgggtgtcttctccctcgccagctgggttccatgcctctgcagcggtgcctcatgtttgctgtgtagttgctgtcctaacagtaagaattccacggtgactcgcctcatttatgctttcattctcctcctgagcactgtcgtatcctatatcatgcagagaaaagagatggaaacttacttgaagaagattcctggattttgtgaagggggatttaaaatccatgaggctgatataaatgcagataaagattgtgatgtgctggttggttataaagctgtgtatcggatcagctttgccatggccatctttttctttgtcttttctctgctcatgttcaaagtaaaaacaagtaaagatctccgagcggcagtacacaatgggttttggttcttcaaaattgctgcccttattggaatcatggttggctctttctacatccctgggggctatttcagctcagtctggtttgttgttggcatgataggggccgccctcttcatcctcattcagctggtgctgctggtagattttgctcattcttggaatgaatcatgggtaaatcgaatggaagaaggaaacccaaggttgtggtatgctgctttactgtctttcacaagcgccttttatatcctgtcaatcatctgtgtcgggctgctctatacatattacaccaaaccagatggctgcacagaaaacaagttcttcatcagtattaacctgatcctttgcgttgtggcttctattatatcgatccacccaaaaattcaggaacaccagcctcgctccggcctcttgcagtcctccctcatcaccctctacactatgtacctcacctggtcagccatgtccaatgaacctgatcgttcctgcaatcccaacctgatgagctttattacacgcataactgcaccaaccctggctcctggaaattcaactgctgtggtccctacccctactccaccatcaaagagtgggtctttactggattcagataattttattggactgtttgtctttgttctctgcctcttgtattctagcatccgcacttccactaatagccaagtagacaagctgaccctgtcagggagtgacagcgtcatccttggtgatacaactaccagtggtgccagtgatgaagaagatggacagcctcggcgggctgtggacaacgagaaagagggagtgcagtatagctactccttattccacctcatgctctgcttggcttccttgtacatcatgatgaccctgaccagctggtacagccctgatgcaaagtttcagagcatgaccagcaagtggccagctgtgtgggtcaagatcagctccagctgggtctgcctcctgctttacgtctggacccttgtggctccacttgtcctcaccagtcgggacttcagctgaacctctgagtgccaaggacaccactggaactcacaaaggtctccttcaccgaaaacccatataccttttaagtttgtttcaactaaaatattaagtgaatgctttgcaagtttgactgtatgcaggtttatatcagaaggtgagattgaataatgcttgatgcagaatcgaaacttctcatttatctgtatattatgtttacttctaaggatatagcacaaagggaacattttttgtttaaagtgaactacagctgtgctgtgaagagagttctttataaagcctgtaggttcttttaactttggtttaaaatgtaagataggaaaatgttggatatttgaggccatgcttaatatatttatattgcagtatcctttaaaagcaaaaaaaaaaaaatgcatttatattacagttttcctctatgaaagtccttacttatatgatacaagcactgtgttttgtgcttaaactcttcagcggggtagcatcaaagttcttggggaaggatcgtatatgtgggtcccttccctagaagaatggttgctgatatggctactgcttctacatcttgagttttttaatttactttttttacactgtagcattgagactgcttgattcaagtctggtgctttgccagatgtattaatttccataaatgctttgtgagtttggttaaaatgaagattcacttgggaaaacactgcagctttagtctgtgttactatcttgttatgagtatgtaaaagtaaaatgcatgtgaatttatcatatttgcactatgaaggtatttggttaaaatacaaagacttttaagattttaaggccctttcttccaacagcttttatagttagcagccattctttattttctggatagccaggttttatcacgcttctagtcaggatgctcctattccttctaaaaattacggtctgactagtgagcaaagtcttgaatttattcaaaagtcctaaataccttctctaggtaagacacttggtagatgagagacggaaggcattgtcaagaacc

SEQ ID NO: 3080 - DNA, 2180 bp, Homo Sapiens
  NM_006818
ggcgcactgctcccctctggactgcggaggcactgcactgcgcgggacgtgggagggtgcctctgcagcccctcaaggccgccgcccctgcggggagaactggagaatgcggacacctagatgaggccctggcacccaagctggggcccccggaatctcacgttccctttactcgccaggcatttcggggcaaaacgaagcggagccccccaaacccccagacctaaccaagttcagagattcgcagaagcacgccccccaccccaaatttattgtgctctacccaaaatggaataggactaggtttatttacccattgtgagggtagagaggcgagtctggaggagcagggattgggagaaggggtggaaaaatactctgattcttaaaaatactttgtaacctaaagtccttaaattgtggaagaaaggaatactcctcctttccattgtagtctagagttaagatttcaaatccataaattagaggacctaaaattagagggcaattaactgctcattcattgggcccccagtcagcacgggggtgctggaagagatcgggaataatagcgcagaccaatgagcctagggagatgctttcatcgtctctccttccctcaagtgttctggaacctatcatttgaattagccgagtcaggcaggagggggcggggaatccttccgcccttcttaggaggggctgcattgcagggggagagtgaactgacagactcagtcactgaagagggaaaaggagtgagaagacaaagccgtcaaagccccaacagctttgtatttctccagcccggcgcagaccccggagctcccgaggcactccctccatctttggaacacgccagtaattgattgataacaggaagctatgagggaccctgtgagtagccagtacagttcctttcttttctggaggatgcccatcccagaactggatctgtcggagctggaaggcctgggtctgtcagatacagccacctacaaggtcaaagacagcagcgttggcaaaatgatcgggcaagcaactgcagcagaccaggagaaaaaccctgaaggtgatggcctccttgagtacagcaccttcaacttctggagagctcccattgccagcatccactccttcgaactggacttgctctaaggccaagacttctctctcccatcaccttgccctcattgtcttccctctcaagccccttcctttccactcctttcccattttaatcttgttctctccctactgtgttggtggtgctgatgaatctgccagagttgagttctatgtatttatttatctatctgtctactccatttctctcaaaagccctcaagtcacaaagtaaatggttcaagcaatggagtactgggtcacagggattcctcctttcccccccaaatattaactccagaaactaggcctgactggggacacctgagagtagtatagtagtgcaaaatggaagactgatttttgactctattataatcagcttcagagattccttaaaccttcctaatttcctgctccagggcagtaaacacaaatatttcttcaaggggtgatgaaaacctcggaagttttaatttgaggttatctgctacgaaacagtatttctaaaaggctaaagtgataagtctcttgcttttttttgatcctgctcttatattcttttttttcctcagagaaatcaggagggtagttagaggtataaaacaggaggaaatattatggaaaatgaaaatagggaaaataattgaatcattttagaagtagctaatttcttttctcaaaagagtgtcccttcttcacacctactcactttacaactttgctcctaactgtgggttgaaaactctagctaaagaaagttatcaaatcttaacatgcattcctactattatgatagtttttaaggtttcaattcaatcttctgaacggcataagtcctattttagccttacctcctgcatttgcaatacgtaatactgatcagtgggcacagttcttcagctacattgagaccctgaaatgaacaattatattctgactcgacatcttgtccccaatccttccaaaaatattgatggtgatttgtgctaccatttactcgtttatttaataaagacattcaatcccaggaaaaaaaaaaaaaaaaaaaaaaa

SEQ ID NO: 3081 - DNA, 2219 bp, Homo Sapiens
  NM_006819
ctagaagaactcgaccagtgagcaggcgaggaaggggcgggagccggggtcccggtagcttctagtaggttccagaaggcggcgcgtgcggttgggaacgcggagcggacggattcgattcaacggggttccggaccgcgctgcgctatggagcaggtcaatgagctgaaggagaaaggcaacaaggccctgagcgtgggtaacatcgatgatgccttacagtgctactccgaagctattaagctggatccccacaaccacgtgctgtacagcaaccgttctgctgcctatgccaagaaaggagactaccagaaggcttatgaggatggctgcaagactgtcgacctaaagcctgactggggcaagggctattcacgaaaagcagcagctctagagttcttaaaccgctttgaagaagccaagcgaacctatgaggagggcttaaaacacgaggcaaataaccctcaactgaaagagggtttacagaatatggaggccaggttggcagagagaaaattcatgaaccctttcaacatgcctaatctgtatcagaagttggagagtgatcccaggacaaggacactactcagtgatcctacctaccgggagctgatagagcagctacgaaacaagccttctgacctgggcacgaaactacaagatccccggatcatgaccactctcagcgtcctccttggggtcgatctgggcagtatggatgaggaggaagagattgcaacacctccaccaccaccccctcccaaaaaggagaccaagccagagccaatggaagaagatcttccagagaataagaagcaggcactgaaagaaaaagagctggggaacgatgcctacaagaagaaagactttgacacagccttgaagcattacgacaaagccaaggagctggaccccactaacatgacttacattaccaatcaagcagcggtatactttgaaaagggcgactacaataagtgccgggagctttgtgagaaggccattgaagtggggagagaaaaccgagaagactatcgacagattgccaaagcatatgctcgaattggcaactcctacttcaaagaagaaaagtacaaggatgccatccatttctataacaagtctctggcagagcaccgaaccccagatgtgctcaagaaatgccagcaggcagagaaaatcctgaaggagcaagagcggctggcctacataaaccccgacctggctttggaggagaagaacaaaggcaacgagtgttttcagaaaggggactatccccaggccatgaagcattatacagaagccatcaaaaggaacccgaaagatgccaaattatacagcaatcgagctgcctgctacaccaaactcctggagttccagctggcactcaaggactgtgaggaatgtatccagctggagccgaccttcatcaagggttatacacggaaagccgctgcgctggaagcgatgaaggactacaccaaagccatggatgtgtaccagaaggcgctagacctggactccagctgtaaggaggcggcagacggctaccagcgctgtatgatggcgcagtacaaccggcacgacagccccgaagatgtgaagcgacgagccatggccgaccctgaggtgcagcagatcatgagtgacccagccatgcgccttatcctggaacagatgcagaaggacccccaggcactcagcgaacacttaaagaatcctgtaatagcacagaagatccagaagctgatggatgtgggtctgattgcaattcggtgatgacttgttcatccccccttcccttcgccctcatgtggaaagaggagctgggaccgcggcgagcagcacggagcggaagggagagcaggggagagaaggcctcatctctctatatttatacataaccccggggaagacacagagactcgtacctgcgctgtttgtgccgccgctgcctctgggccctcccagcacacgcatggtctcttcaccgctgccctcgagttccatgtctctttcccctgcccctagttgctgtctcggctgctctcccatagttggttttttttttatttggggcagtgggcatgttatggggaggggagggggttcttccagcctcaggtcccagctgtctcacgttgtttattctgcgtccccttctccaataaaacaagccagttgggcgtggttatatgttgaaaaaaaaaaaaaaaaaa

SEQ ID NO: 3082 - DNA, 1767 bp, Homo Sapiens
  NM_006821
ctaggaagtagctttccaacataaagtggaggtttcaacacaggagactttaagcaagttccagtgtgtctatatttggtctggctgatcggctggactctggccttccccgctcacgttagcagacagctctgccctagtgggcgcttagcctgcgacggcagcccgagaggatgtctaacaagcttctttctccccacccccattcagttgttctcaggtctgaattcaaaatggcctcatctcctgctgtccttcgagcgtcccggctgtaccaatggagcctgaagagttcggcgcagttcctggggtctccacagctgaggcaggttggtcagatcattagggttcctgctcggatggcggcgacgctgatcctggagcctgcgggccgctgctgctgggacgaaccggtgcgaatcgccgtgcgcggcctagccccggagcagccggtcacgctgcgcgcgtccctgcgcgacgagaagggcgcgcttttccaggcccacgcgcgctaccgcgccgacactcttggcgagctggacctggagcgcgcgcccgcgctgggcggcagcttcgcggggcttgagcccatggggctgctctgggccttggagcccgagaaacctttggtgcggctggtgaagcgcgacgtgcgaacgcccttggccgtggagctggaggtgctggatggccacgaccccgaccccgggcggctgctgtgccagacgcggcacgagcgctacttcctcccgcccggggtgcggcgcgagccggtgcgcgtgggccgggtgcgaggcacgctcttcctgccgccagaacctgggccctttcctgggattgtggacatgttcggaactggaggtggcctgctggagtatcgggctagtctgctggctgggaagggttttgctgtgatggctctggcttattataactatgaagacctccccaagaccatggagacgctccatctggagtactttgaagaagccatgaactacttgctcagtcatcccgaggtaaaaggtccaggagttgggctgcttggaatttccaaagggggtgagctctgcctttccatggcctctttcctgaagggcatcacggctgctgtcgtcatcaacggctctgtggccaatgttgggggaaccttacactacaagggcgagaccctgccccctgtgggcgtcaacagaaatcgcatcaaggtgaccaaagatggctatgcagacattgtggatgtcctgaacagccctttggaaggacctgaccagaagagcttcattcctgtggaaagggcagagagcaccttcctgttcctggtaggtcaggatgaccacaactggaagagtgagttctatgctaatgaggcctgtaaacgcttgcaggcccatgggaggagaaagccccagatcatctgttacccagagacagggcactatattgagcctccttacttccccctgtgtcgggcttccctgcatgccttggtgggcagtcctattatctggggaggggagcccagggctcatgccatggctcaggtggatgcttggaaacaactccagactttcttccacaaacacttgggtggccacgaggggacaatcccatcaaaagtgtaaattttatttgatcatgtggcctctctgttgctaatctctcctggaaacatctgccacatttagtgtgtgtatgtgtattcattcttttgtttttaataactaaagttttttcccctcattattaaaatgaatttaccagtaa

SEQ ID NO: 3083 - DNA, 1776 bp, Homo Sapiens
  NM_006822
gggcggcggggcggggccggaggcgagcaaggactcggggcccgcgcggcgcctctcggggccgggccgccgcctctgcgctcagccccgcaggccgggcatgggtgggggcgccgggccgtcacgatgagcgccctgggcagcccggtccgggcctacgactttctgctcaagttcctgctggtgggcgacagcgacgtgggcaagggcgagatcctggcgagcctgcaggatggcgcggccgagtccccgtacggccacccggcgggcatcgactacaagacgaccaccatcctgctggacgggcggcgggtgaagctgcagctctgggatacttcaggccagggaagattttgtaccatattccgctcctactcccggggcgcacagggtgtgatcctggtctatgacattgcgaaccgctggtcttttgacggcattgatcgatggattaaggagatcgatgagcatgcccccggagtccccaagatcctggtggggaaccgcctgcacctggcgttcaagcggcaggtgcccacggagcaggcccaggcctacgccgagcgcctgggcgtgaccttctttgaggtcagccctctgtgcaatttcaacatcacagagtcgttcacggagctggccaggatcgtgctgctgcggcatgggatggaccggctctggcggccgagcaaggtgctgagcttgcaagacctctgctgccgggcggtcgtgtcctgcacgccggtgcacctggtggacaagctcccgctccccattgccttaagaagccacctcaagtccttctcgatggccaacggcctgaatgccaggatgatgcacggcggttcctactccctcaccaccagctccacccacaaaaggagcagcctccgcaaagtgaagctcgtccgccccccccagagcccccccaaaaactgcaccagaaacagctgcaaaatttcttaaggaaggcactgaaagaaacacggcggaatctctccaggagaagctcggcgttacccccggcagctggtggatgcatctcagatcccggttcctctcggcgaatgctgcttgcgaatgtgtgcgacgccttccgtgtgatggaaacacactaccccgtcggacttcgaatttctacgtggatgtgcatgaagctcttgttttcgatgtgtgtttgtaaagggaaaattagtactctgctcgactcttggtaacatgaaattctgaatgttactttatcatgattgcactgcaactttttccttaaaataactgcttttgtaagaacggtgatattggagtgattagtataaattcaatggaatttgagaagcaatggcagcgggataatttagagtcactgatattacgagaggggtctttttgtaaacctccttttcaatgtcaaagcgccaatttataaaacgctgcagatgtagaggttatgtgcaactgatctgtccagtttgtgtatgaaatggatttgataaagtttttgctagttatttactacattttgggattaataagtgatttatatgcatatttttctgtaaatctacagttttttgtacaagatattctacaagttatgaagctaagggaagaaaatgccaaagatacctctagttatgttgaacacagccagcacagtttcgacaggtcaaggaagagctgtttcagtaaagaatgaagtgaaaacacttatttaggaaaatgtttctcaacaataaaatgtatagttgtttctctcttggtaaaaaaaaaaaaaaaaaa

SEQ ID NO: 3084 - DNA, 2184 bp, Homo Sapiens
  NM_006823
cgctatgcagagaaagcccccctggctcttctctctcaatccataatccagcgatgctgcagctgtaaaagcattaatagaaaatcaatccacaacctcgcggggcagcgatcgtcgagcgccgtttccaggctgccttccctggggtcgggagcggccccgctccccccgtggctggcgcggaatgtggtgatccgtcccggggcggggatgacttcatgcagccggagctccgcggcgggagcggaggctgctgctggcaggtggggcgcgggccggcgcgagctgaccgagcactcggcgggcgcggcgggactgcggcccgtggcggcgtgcgcggggacctgcgctgactaggtccggggaagtttcctgactttctgagaagccctggtttccccaaagaagtgatttctgatagaaatctgaaggtcatctccaagaaaaaagagatctagtatagtcaatgaattaaagacaagaaggtttccaatcagtccctgctatgtggatatttggtagcaatgactgatgtggaaactacatatgcagattttattgcttcaggaagaacaggtagaagaaatgcaatacatgatatcctggtttcctctgcaagtggcaacagcaatgaattagccttgaaattagcaggtcttgatatcaacaagacagaaggtgaagaagatgcacaacgaagttctacagaacaaagtggggaagcccagggagaagcagcaaaatctgaaagctaacaccccactttgaccctcgaccacacctgaaaatgtctcaaatctccaggagtatctggaatgcatttgtttccatgagtgaaaagaggaaaaagaaaatggctgtgctgcattgcaggaacctgctcattatcatgttaaaaatgagggcagaggctgtggctgcaggcagacttttccctacctctgtcattagcaatggttgaaatcatgtggcttgtgtttgggcgtcatttttgtatggatcctttcacttgatcatatgacgaaatgcttatagagagtagctccgacctagatgatgattcttcctgtagcatctggcccctcacaatgtcagaggatttaattgtgtctaattgcgaagggttgattgaaccccagagtttaaatatctctggctcaagtgttcacccagtaaaagaaagatccagaaagcactgtttttagcattacgtatctgtgtgttactgctgtgttatttacactgttttgtattgtacaatatatatgctcagcactgcccccttctctgattgcttatgaaaaacaaaatgatgtacattactgtgaatttttataccactcatttttaaaagggctgtcttttcattttagttttccatactgtggtggtgtacacaggatagaacacccttttttaaaacacagtctttccccttgctcattgtatgttgatgagttgattaagtctaacagattcatcaagactccattgctttattatagagacatttgaaaatatccattaatgtgaatatcacctgaattcagtctgtttggtgtctgcacagactggaattcaatctgtcaaatttgttttattctcaagtggagaacttctcccacataatatatatatatatatatattttaatttatgagaattttggacaattggaaaggtagaaaagaaaagccaagatcatactaaggactggaaatattttgttctatggaatcaaatttctcacaatgctgtatgatactatttaaatttggaggacaacttatcttcactaagctgaatcaggtggagaaagtaatctccttgcaatcatgtggacaccaatcacaaaagtaaagccctggtgttgtgttttcatgtcttttttcagccctctcagatccaaatgttattatgcactttttaatgtttgtaaacttttactaataattagtgtgaattgcattctgatacaataatgattatcattagaagctaacaaaattctcattaatactgtgtttgatggcctctgctgtgttttaacatcgtgcttcttatatggaaagtttttgtgagctgtgtaatccctctggtcagtattatgaaatcatttgtcagtggtaataaataaggaaccagtaatatgccaatggttcatgaattactggacaaatagca

SEQ ID NO: 3085 - DNA, 1397 bp, Homo Sapiens
  NM_006824
gaagcggaagtcccaatcaaaagttgagcagtagctgtgagttgctggcgctggagcgattcggtggcacgtggagccacggcgtgggagtagggggctgaaggcaggcagcagcggccagggccgccctctgctagccgcttgggtctcgggataccccgtttcttcctgtaggtgtgggacgtgcgtgcggcgagatggacactcccccgctctcggattcggagtcggaatccgatgaatcccttgtcacagacagagagttgcaggatgcgttttcccgagggcttctgaagccaggcctcaatgtcgtgctagaggggccgaagaaggccgtgaacgacgtgaatggcctgaagcaatgtttggcagaattcaagcgggatctggaatgggttgaaaggctcgatgtgacactgggtccggtaccggagatcggtggatctgaggcgccagcacctcagaacaaggaccagaaagctgttgatccagaagacgacttccagcgagagatgagtttctatcgccaagcccaggccgcagtgcttgcagtcttaccccgcctccatcagctcaaagtccctacgaagcgacccactgattattttgcggaaatggccaaatctgatctgcagatgcagaagattcgacagaagctgcagactaaacaggctgccatggagaggtctgaaaaagctaagcaactgcgagcacttaggaaatacgggaagaaggtgcaaacggaggttcttcagaagaggcagcaggagaaagcccatatgatgaatgctattaagaaatatcagaaaggcttctctgataaactggatttccttgagggagatcagaaacctctggcacagcgcaagaaggcaggagccaaaggccagcagatgaggaaggggcccagtgctaaacgacggtataaaaaccagaagtttggttttggtggaaagaagaaaggctcaaagtggaacactcgggagagctatgatgatgtatctagcttccgggccaagacagctcatggcagaggcctcaagaggcctggcaagaaagggtcaaataagagacctggaaaacgaacaagagagaagatgaagaacagaacacactaaatagcatctttgaatacaaagaaccaagaaaaaggaatgaagactcgcaatttcacgacacactttgatcccttctgttggtgtcatgttgtaaacatttctttcaataaactaaagaaaaattattaaaggaacacatacctttggttaaatagtctagactaaaagattgagaagttactttccattgctatctattgataatttagacattgagttcaaattgccttcattttatgataaataatgatttaactgacaccttctcaaaaaaaaaaa

SEQ ID NO: 3086 - DNA, 3036 bp, Homo Sapiens
  NM_006825
gggggagcccctgcaagtttcccgggccgcgcgccgcgctcgctcgcctcccagcccgcggcccgagccgccgccgcgcccgccatgccctcggccaaacaaaggggctccaagggcggccacggcgccgcgagcccctcggagaagggtgcccacccgtcgggcggcgcggatgacgtggcgaagaagccgccgccggcgccgcagcagccgccgccgccgcccgcgccgcacccgcagcagcacccgcagcagcacccgcagaaccaggcgcacggcaagggcggccaccgcggcggcggcggcggcggcggcaagtcctcctcctcctcctccgcctccgccgccgctgccgccgccgccgcctcgtcctcggcgtcctgctcgcgcaggctcggcagggcgctcaactttctcttctacctcgccctggtggcggcggccgctttctcgggctggtgcgtccaccacgtcctggaggaggtccagcaggtccggcgcagccaccaggacttctcccggcagagggaggagctgggccagggcttgcagggcgtcgagcagaaggtgcagtctttgcaagccacatttggaacttttgagtccatcttgagaagctcccaacataaacaagacctcacagagaaagctgtgaagcaaggggagagtgaggtcagccggatcagcgaagtgctgcagaaactccagaatgagattctcaaagacctctcggatgggatccatgtggtgaaggacgcccgggagcgggacttcacgtccctggagaacacggtggaggagcggctgacggagctcaccaaatccatcaacgacaacatcgccatcttcacagaagtccagaagaggagccagaaggagatcaatgacatgaaggcaaaggttgcctccctggaagaatctgaggggaacaagcaggatttgaaagccttaaaggaagctgtgaaggagatacagacctcagccaagtccagagagtgggacatggaggccctgagaagtacccttcagactatggagtctgacatctacaccgaggtccgcgagctggtgagcctcaagcaggagcagcaggctttcaaggaggcggccgacacggagcggctcgccctgcaggccctcacggagaagcttctcaggtctgaggagtccgtctcccgcctcccggaggagatccggagactggaggaagagctccgccagctgaagtccgattcccacgggccgaaggaggacggaggcttcagacactcggaagcctttgaggcactccagcaaaagagtcagggactggactccaggctccagcacgtggaggatggggtgctctccatgcaggtggcttctgcgcgccagaccgagagcctggagtccctcctgtccaagagccaggagcacgagcagcgcctggccgccctgcaggggcgcctggaaggcctcgggtcctcagaggcagaccaggatggcctggccagcacggtgaggagcctgggcgagacccagctggtgctctacggtgacgtggaggagctgaagaggagtgtgggcgagctccccagcaccgtggaatcactccagaaggtgcaggagcaggtgcacacgctgctcagtcaggaccaagcccaggccgcccgtctgcctcctcaggacttcctggacagactttcttctctagacaacctgaaagcctcagtcagccaagtggaggcggacttgaaaatgctcaggactgctgtggacagtttggttgcatactcggtcaaaatagaaaccaacgagaacaatctggaatcagccaagggtttactagatgacctgaggaatgatctggataggttgtttgtgaaagtggagaagattcacgaaaaggtctaaatgaattgcgtgtgcagggcgcggatttaaagtccaatttctcatgaccaaaaaatgtgtggttttttcccatgtgtcccctaccccccaatttcttgtcccctcttaaagagcagttgtcaccacctgaacaccaaggcattgtattttcatgcccagttaacttatttacaatatttaagttctctgcttctgcatttggttggtttcctgaagcgcagcccctgtgaataacaggtggcttttcatggatgtctctagtcagagaaaaatgataaaggcttaaattgaggattaacagaagcagattaacctcagaaatcctgtctggctggcagatttcaagtaaaaaaaaaaaaaaggtgggttggggggacccttttctttctagttgtctttaaggaaaattaattttacttttttttttgttctggccgaaatttttatgagatatctctcacttgtcttccactttgaaccggttaaagctcatagctgtcagctctgaatgaggaggggagaagcccctgggtctttctttgaaaggaatccgctgcttgagggctgcctccctcatggtgtgcgtgtcgtttctcttcctgacgcatcttgtgatatcagaggtaactatgcaaagcatccaggcggttctgaatgtgaagcactacacccagcagagtcccggtgccctctgtccccactgccggcccatgttctctctccggaggtcaccaaggaatgcacaggtttcgactaccagaaaggggagtccttgggttctttcaaaaaattcgtgaggagagctgtctacagtggaatagggggtctccctggggaatgcaggccaagtccttttattttaacatgatgtccatgaagaggtttgccgtctgggcagccctgtcggcaaggagcgtgcatactgcgtttgtgtaattgtttgctgtatctcccttccctctgagctgtattgttctttaatggctgtcttgcccttccaaaaaaaattgaaaaaaaaaaaaaaaaaaaaacccgaaaagtaaaaaaaaaaaaaaaaagttttgtttagtttactgtgaaatgaactgtatggcttatttacagtatttttaattcttaataaacacttgagctttgttatga

SEQ ID NO: 3087 - DNA, 2166 bp, Homo Sapiens
  NM_006826
gtggtgggactcgcgtcgcggccgcggagacgtgaagctctcgaggctcctcccgctgcgggtcggcgctcgccctcgctctcctcgccctccgccccggccccggccccgcgcccgccatggagaagactgagctgatccagaaggccaagctggccgagcaggccgagcgctacgacgacatggccacctgcatgaaggcagtgaccgagcagggcgccgagctgtccaacgaggagcgcaacctgctctccgtggcctacaagaacgtggtcgggggccgcaggtccgcctggagggtcatctctagcatcgagcagaagaccgacacctccgacaagaagttgcagctgattaaggactatcgggagaaagtggagtccgagctgagatccatctgcaccacggtgctggaattgttggataaatatttaatagccaatgcaactaatccagagagtaaggtcttctatctgaaaatgaagggtgattacttccggtaccttgctgaagttgcgtgtggtgatgatcgaaaacaaacgatagataattcccaaggagcttaccaagaggcatttgatataagcaagaaagagatgcaacccacacacccaatccgcctggggcttgctcttaacttttctgtattttactatgagattcttaataacccagagcttgcctgcacgctggctaaaacggcttttgatgaggccattgctgaacttgatacactgaatgaagactcatacaaagacagcaccctcatcatgcagttgcttagagacaacctaacactttggacatcagacagtgcaggagaagaatgtgatgcggcagaaggggctgaaaactaaatccatacagggtgtcatccttctttccttcaagaaacctttttacacatctccattccttattccacttggatttcctatagcaaagaaacccattcatgtgtatggaatcaactgtttatagtcttttcacactgcagctttgggaaaacttcattccttgatttgtgtttgtcttggccttcctggtgtgcagtactgctgtagaaaagtattaatagcttcatttcatataaacataagtaactcccaaacacttatgtagaggactaaaaatgtatctggtatttaagtaatctgaaccagttctgcaagtgactgtgttttgtattactgtgaaaataagaaaatgtagttaattacaatttaaagagtattccacataacttcttaatttctacattccctcccttactcttcgggggtttcctttcagtaagcaacttttccatgctcttaatgtattcctttttagtaggaatccggaagtattagattgaatggaaaagcacttgccatctctgtctaggggtcacaaattgaaatggctcctgtatcacatacggaggtcttgtgtatctgtggcaacagggagtttccttattcactctttatttgctgctgtttaagttgccaacctcccctcccaataaaaattcacttacacctcctgcctttgtagttctggtattcactttactatgtgatagaagtagcatgttgctgccagaatacaagcattgcttttggcaaattaaagtgcatgtcatttcttaatacactagaaaggggaaataaattaaagtacacaagtccaagtctaaaactttagtacttttccatgcagatttgtgcacatgtgagagggtgtccagtttgtctagtgattgttatttagagagttggaccactattgtgtgttgctaatcattgactgtagtcccaaaaaagccttgtgaaaatgttatgccctatgtaacagcagagtaacataaaataaaagtacattttataaaccatttactatggctttgtaacaattgcatacccatattttaagggacaggtgaatttactactttctaaagtttattgatacttcccttttatgtaaaatgtagtagtgatacctatatttccacattgtgcattgtgacacacttgtctagggatgcctggaagtgtataaaattggactgcatttcttagagtgttttactatagatcagtctcatgggccatctcttcctcagatgtaaatgatatctggttaagtgttatatggaataaagtggacattttaaaacta

SEQ ID NO: 3088 - DNA, 4163 bp, Homo Sapiens
  NM_006827
gagtcacgtgggtccccccggttccggcgcggttgaggccttcggtggtgaacgagtctccagcaccatgtctggtttgtctggcccaccagcccggcgcggcccttttccgttagcgttgctgcttttgttcctgctcggccccagattggtccttgccatctccttccatctgcccattaactctcgcaagtgcctccgtgaggagattcacaaggacctgctagtgactggcgcgtacgagatctccgaccagtctgggggcgctggcggcctgcgcagccacctcaagatcacagattctgctggccatattctctactccaaagaggatgcaaccaaggggaaatttgcctttaccactgaagattatgacatgtttgaagtgtgttttgagagcaagggaacagggcggatacctgaccaactcgtgatcctagacatgaagcatggagtggaggcgaaaaattacgaagagattgcaaaagttgagaagctcaaaccattagaggtagagctgcgacgcctagaagacctttcagaatctattgttaatgattttgcctacatgaagaagagagaagaggagatgcgtgataccaacgagtcaacaaacactcgggtcctatacttcagcatcttttcaatgttctgtctcattggactagctacctggcaggtcttctacctgcgacgcttcttcaaggccaagaaattgattgagtaatgaatgaggcatattctcctcccaccttgtacctcagccagcagaacatcgctgggacgtgcctggcctaaggcatcctaccaacagcaccatcaaggcacgttggagctttcttgccagaactgatctcttttggtgtgggaggacatggggtaccacctacacccaacaagtcaatgagggacttctttttaatttggtaggattttgactggttttgcaacaataggtctattattagagtcacctatgacaaaaaataggggttacctagataatgccaaagtcagcatttgtcctgggttcccttgtgtgatctgtttggactatgttttcttttcttctcccacttgctcagcagcttgggcttccattctagttcttttaccaagatttttgtgtgaccatgttgacttcatttggattgccctctttcaatttccttgtgaaaacacccttaactttctctttacccttagctgaaatgtttacatagcttctggtgatatcttttcatgattttatatctcttaaaatggtgatggatgtgacacctcataaaagtgagctttgaactgtagataactcttaaagaaaatgtcattttagacaattaaaatatttgtgctcaactgcttgaacttttttcgtgtatgtgtatttaattctatgcaatattatcacatgtgtagattcatgtgaccaccatcacaagagacagaacagttctgtcacatggatcccttgcactgcccttttacagccgcagccacatccctttcttataccctcaccccaacctgtggctaccactgttctgtcctccatctctgtaattttgtcatttcaagaatgttgtatgaatggaatcatacagaatgtaatcttacgaggctgatcttttttcattcagcataattcccttgaaatccatccaagttgttgcatgtatgaatagtttcttcctttttttcttttaaaaatgttttatatatttagggggtataagtacagatttcttacatgcatatattgcatcgtggtgaagtgggggcagttccttttgattgctgagtagtattccatggtatggatgtaccacagtttgcttaaccattcacccactaaaggacataagagttgttttcagttttttgccctaataaagctgctgtgaacattcatgtacaggtttttatgtgaacatacattttcattttctgggataaatgctcaaaagggcaactgttgggttgtatggtaaacacatatatttttgtaagaaactaccctactctttttccagagtggctctactttttacatacagccactcatacaattcagacagcaatgtatgattgatccagtttcttcacatcctcaccagcatttggtattactactattttttatcttaaccattcacatagatgtgtgtaatgataccacatgtggttttaatttgcatttccaatggctaatgatgttgagtatctttttgtgtgctaatttgccatctatgtatcctcttcggtgaaatgtcttcatgtcttttgtctattttctatttaggtcatttgttctttttactattgagttttgagaggttttttatatatcctagataaaattcctctgttagatatgtggttgcttgaatttttaacataacttctaccaaggaaaaataagtaaaatttccaacccttgcatggccagtcacttacttaattcctgtccttcagtgttccatctagagaattaagagatatgatgtataaaatagacatcgagggccattaagagagtaaatacttaaaaatacatgttatgaaagcaaagccaataatcactgtaggagtatgagttgcctaagggccaaaactaatgtaaataagagaaagtgtggatataaatgaccattgtttataaacagttatgaaaaatgctgtgacttgaaatctttcccacatctcccaagaaagtaggtaggagtttatcctttccgtaatctctttttaaccctgctgactattacagggcttgtttaatcacagtggcaagaattacatgtatcttacagtaaagaaacagaatactggaatcgttagagaaccctgatgtgttgacctggataaagtacaaaggtggaagagggaatgagttatgctgttaaaatctcaggctattctgttaatgttcctgctactatgaacccaaactttttttttcccccttttgactccttgtgtcttcctctcctgtggcataaaagtagttctgtcgttaacttgtacaacattgccatctgctgttgagaattggtaggtactgcttctgagaacctggctgcagatccttagcataggcagcaaatgttgagaaagtctatctgtagtattacatatactaagttacagaggatgcatccaagtagagaaaataatatgtgggttaagatacatccttaaacttttttttttttggggggggggggacggagtcttgctgcaacgcccaggctggagtgcaatggcactatctcagctcgctgcaaccttcacctcctgggttcaagcaattctcctgcctcagcctcctgagtagctgggaatataggtgcacaccaccatgcctggctaatttttgtattttcagtagaagcagagtttcaccatattggccaggttggtctcgaactcctgacctcaagtgatctgcctgcctcagcctcccaaagtgctgggattacacgcgtgagccaccacacccagcctccatctttaaacttttaaatgtgaaatttctatcatgtaccgttagcctaacaagattttctttcctatttctgactggtgcctttcccctttttaggagcaacgaaagctactctcttagttatgttcttgtgatgtgacaaaatgtcaagaagataggagaagagaatattttatttcgttgatgcttttgttcccaagtgtgaccctaaacttaagctttgtaggagttgacattctttcatgtcccttccctttactcatgccgaaactatcaactgggacattttgtgcttttggtttaaaagttaattgatattatactttggttttatctaaaaagtaaatgtatttgcctttgacaaaagactgacacaagagcaaataagctttaaaatcgggtgttatgtgctttcctccatttttgagcatattatccaaaatggtctgtataatataaatgagaatgatgcagtttaagtaagccttgttataccattgtcatggacccctgtcataaagccatttcttggtttgtttgggaaagaggcatatgggatttatacagattcacttgtaaatgttggattggggatttttgtgtaaattttctcaaataaaggctagcagaaaccataaaaaaaaaaaaaaaaaaa

SEQ ID NO: 3089 - DNA, 7598 bp, Homo Sapiens
  NM_006828
gtaggccggcgccagctccactctgtccctcctcgccgggtctgtgcgtctttgcgtctgtctgtctgactgatggtcctcacacgcggttccctgtgactgggcgcgaccccggcaagcgcggcttggagggcggacggggcgcggcgatacagctgcccgctcgcatctttggccctgcgctcagctcctcacccggcgtgggaagttaaagtaaaaccgaaagggaagaaggcgcggtggcaggagctgacagagtgatgggaaacgcgtgagccaggccgagagtttcaggtttcttgctgtatggatcactgattgaataatagatggctttacctcgtctcacaggagccttgcgttccttttcaaatgtcaccaagcaagataattataatgaagaagtggctgacttaaagataaagcgatctaaacttcatgaacaagttttagatttgggcctgacatggaagaagataataaaatttttgaatgaaaaactggagaagagtaaaatgcaaagtataaatgaagacttaaaagatatattacatgctgcaaagcagatagttggaactgataatgggagagaagcaattgaaagtggggctgcatttctcttcatgacatttcacttgaaggactctgttggtcacaaggaaacaaaggctatcaaacagatgtttggcccctttccttcatcatctgccactgcagcttgtaatgctactaatcgaattatttctcattttagtcaagatgatcttactgctcttgtgcagatgacagaaaaagaacatggcgatagggttttttttggtaaaaatttagcattttcatttgacatgcatgatttggaccactttgacgaactgccaataaatggtgaaactcagaaaactataagcctagattataagaagtttctgaatgaacatctccaggaggcttgcaccccagaactcaagcctgtggaaaaaacaaatggctcctttttgtggtgtgaagttgaaaagtacctaaattcaactttgaaggaaatgactgaagtgccaagagtagaagatctttgctgtactttatatgatatgcttgcttctattaaaagtggtgatgaacttcaggatgagctatttgaactgctgggacctgaaggacttgaacttattgagaaactcctccagaacagaattacaattgtggatagatttcttaattcttcaaatgatcataggtttcaggctcttcaagacaattgtaaaaaaattttaggagaaaatgctaaacccaattatggttgtcaagtcactattcagtctgaacaagaaaagcagttaatgaaacaatatcgacgtgaagaaaaaagaattgccagacgagaaaaaaaggctggagaagatttagaagtttcagaaggacttatgtgctttgatcctaaggaattgcggatacaaagagaacaggcacttctgaatgctagaagtgttccaattctgagcaggcagagagatgcagacgttgaaaaaatacattatccccatgtgtatgattcccaggctgaagccatgaaaacatcagcatttattgctggtgcaaagatgattttgccagaaggaatccaaagagagaataacaagctttatgaagaagtaaggattccctacagcgaaccaatgccactcagctttgaggaaaagccagtttatatccaagacttagatgagatcggacagctggcttttaaaggaatgaagagactcaatagaatccagtcaatagtgtttgagactgcctacaacaccaatgagaacatgctgatttgtgcccctacaggagctggaaaaaccaacattgcaatgctgacagtcttgcatgaaattcgccaacattttcaacaaggtgttatcaaaaagaatgaatttaagattgtatatgttgctccaatgaaagccttggcagctgaaatgacagattacttcagcagacgtctagagccactaggcatcattgtgaaagaattgactggtgacatgcagttgtccaaaagtgaaattttacgaactcagatgcttgtgaccacaccagaaaaatgggatgtagtgacaagaaagagtgttggggatgtagctctttcccagattgtaaggctccttattcttgatgaagttcatttgctgcatgaagatagaggaccagtattagaaagcatagttgcccgtactttacggcaggtggaatccacacagagtatgataaggattctcggactgtctgcaactttacctaactacctcgatgttgccacatttttacatgttaatccatacattggacttttcttctttgatggccgttttcgaccagtacctcttggacagacatttttggggattaaatgtgcaaataagatgcagcagttgaataacatggatgaagtatgttatgaaaatgttttgaagcaagtaaaggctggacaccaggtgatggtgtttgtacatgctcgaaatgccactgtaagaacagctatgtctctaatagaaagagcaaaaaattgtggccatattcccttcttttttcctacccaaggacatgactatgtacttgcagaaaaacaggtacaaaggtcgagaaataagcaagtacgagaattattcccagatggttttagtattcatcatgcaggaatgcttcggcaggacagaaatttagttgaaaacttgttttctaatgggcatatcaaagtcctagtgtgtacagctacgttagcctggggtgtcaatcttcccgcccatgctgttattattaagggaacacaaatatatgctgcaaaaagaggctcctttgttgaccttggaattttagatgtcatgcagatatttggtcgagctggacgaccacaatttgacaaatttggggaaggaataattataacaacgcatgataaactcagccattacctcactttgctcactcaacgaaacccaattgagagtcagtttctggaaagccttgcagataacctaaatgcagagattgctctgggaacagttactaatgtggaagaagcagtgaagtggataagttacacttatctttatgtacggatgagagcaaatccattagcatatggcatcagtcacaaggcttatcagattgacccaacattaagaaagcatcgagaacagttggtcattgaagttggacgaaaactagacaaagctcagatgattcgttttgaggagcgaactggatatttttcctcaactgatttgggtagaactgccagccattactatattaaatacaacaccattgagacctttaatgaactctttgatgctcacaaaacagaaggtgatatctttgccatagtctccaaagctgaagaatttgatcaaattaaggtcagagaagaggaaatagaggagttagataccttattaagcaatttttgtgaactctccactcctggaggtgtagagaatagttatgggaaaataaacatcttacttcaaacttatatcagccgaggagaaatggacagtttctcccttatatcagattctgcatatgttgcacagaatgcagctagaattgtccgtgctctttttgaaattgctctgaggaaacgttggcctaccatgacctacaggctcctgaatcttagtaaagtcattgacaagaggctttggggttgggctagccctttgagacaattttcaatcctaccaccacacatcctaacaagattagaagaaaaaaagcttactgtggataagctgaaagacatgaggaaagatgaaataggtcacattttacatcatgtgaatattggactgaaggtcaaacaatgtgttcatcagattccttctgttatgatggaagcatccattcagcctatcacaaggactgtcctccgagtgacactcagcatctatgctgatttcacttggaatgatcaggtacatgggacagtaggagaaccttggtggatttgggtagaagatcctacaaatgatcatatttatcattcagagtattttctagctctaaaaaaacaagtcattagtaaagaagcccaactactggtatttacaatccctatttttgagcctttgccttcccaatactacatccgagcagtgtctgatagatggttgggtgctgaggcagtatgtattatcaactttcaacatctaattctaccagagagacatcctcctcatacagaattactggatcttcagcctttaccaatcacagctttgggatgtaaagcatatgaagccctgtacaacttcagccactttaaccctgtacagacacaaatatttcatacattgtatcacacggattgtaatgtcctacttggagcacctactggatcgggaaagactgttgcagctgaattagccattttcagagtcttcaacaaataccctacttcaaaggcggtatatattgcacccctaaaagccctagtacgtgaaagaatggatgattggaaagttagaatagaagaaaaacttggtaaaaaagttattgaactaacaggggatgtgactcctgatatgaaatccattgccaaggctgaccttatcgtcactacgccagagaagtgggatggagtcagcagaagctggcaaaataggaactatgttcagcaagtcactattctcatcatagatgagatccatctgcttggggaggaaagaggccctgttctagaggtcattgtatctcgaacaaattttatctcatcacacacagaaaagcctgttagaatagttggactatctactgcattagctaatgccagagaccttgctgattggctcaatattaagcagatgggcttgtttaacttccgaccatcagtacgcccagttccactggaagttcacattcaaggctttccaggtcaacattactgtcctcgtatggctagtatgaacaagcctgcatttcaggcaattagaagccattctccagccaaacctgttttgatatttgtctcatcaagacgtcaaactcgtcttactgctttggaattgatcgccttcctggctactgaagaagatccaaagcagtggttaaacatggatgaaagagagatggagaacatcattgcaacagtaagagattccaacctcaagctgacccttgctttcgggataggaatgcatcatgctggactacatgagagggaccgaaaaacagtagaggaactatttgtaaactgtaaagttcaggttcttattgctacaagcacattagcctggggtgtaaactttccagctcatttagtaattattaagggaacagaatactatgatggaaaaacaagacgttatgtggattttcccattacagatgtcctccagatgatggggcgtgctgggaggccgcagttcgatgaccaaggcaaagctgtaattctagttcatgacataaagaaagacttttataaaaaatttctttatgaacctttcccagtagaatcaagtttattaggagtgctctctgaccacttaaatgcagagattgctggtggtacaattacatctaagcaagatgcattggattatatcacctggacttactttttccgacgtcttatcatgaatcccagctattacaatttgggtgatgtgagccatgattctgtgaacaagtttctgtcccatctgattgagaagtccctgattgaattggaactttcctactgtattgaaattggagaggataatcgcagcattgaacctctaacttatggccgaattgcctcctattactatttgaagcatcaaacagttaaaatgttcaaggaccgcttgaagcctgaatgcagtactgaagaactgctttcaattctaagtgatgcagaagaatatacagatttgccagtgagacacaatgaagatcatatgaatagtgaactggcaaaatgtcttcccattgaatcaaatcctcattcatttgacagccctcacaccaaagcacatctcctgctacaggcacatctcagccgagccatgctaccctgcccagattatgacactgataccaaaacagtcttggaccaagctctcagagtatgtcaggcaatgctggacgtggctgcaaaccagggctggctggtgactgtcctgaatatcaccaacctgattcagatggtgatccagggtcggtggttaaaggactcttctcttcttacactaccaaacatagaaaaccatcatcttcaccttttcaagaaatggaagccgattatgaagggcccacatgctaggggtcggacctccatcgagtcccttcctgaactgatccatgcctgtggagggaaagaccatgtatttagctccatggtagaaagtgagctacatgctgcaaaaacgaaacaggcatggaatttcttatctcacttgccagtgataaatgttggcataagtgttaaaggctcgtgggatgacttagttgaaggacataatgaactctctgtctcaactctgactgcagacaaacgagatgacaacaaatggatcaaattgcatgctgaccaagagtatgtgcttcaagtgagcttgcagagagtccactttgggttccacaagggaaagccagagagctgtgcagttactcctcgatttcccaaatcaaaagacgaaggatggtttttgatattaggagaagtggataagagagaacttattgctttgaaaagagtaggatatattcgaaatcatcatgttgcttccctttctttttatacccctgaaatacctggaaggtatatctacacattatatttcatgagtgactgctaccttggcctggaccagcagtatgacatctatctcaacgttacacaagcgagtctttctgcacaggtcaacaccaaggtctctgattccctgactgacctggcattaaagtaacttgacctgaacaatccatttgaaaggagtggctaagaattctctctgttcagtcatctagacaaatcgaattacttgatgtttgccttgaaagaatcaacttctaacctcaaccatccaggaaattgacagtggctgcagtattgactccagtgacataaagttaaccacagtggccttttaacaaatgttgccttttataatgttatctttatgagtttcttgatatgtaagatgaaaaagcatttagaataatcttttaatttgtgtatatttgggatgatatttaggagctatcaatcaaattttacatctcacaatgtactgtttacatggatattggctgctttttttaaggaaaaccacattgagatgtgacaagtgttaggacttgtcacagatttctaactctgccgcataaactataaatctgtaaggtggtacacagcgtgtcttgttagcaaaatttatactttgatatgatcacatgtagaagtagcttcaagaatttcttgtagtcataaatgtttaataatatatgatgtaaaattatattatggagcctaatgatgataacaaagaaaacaatatactgatcttagaaaatgtagacatggttaactgggaaataaaatatagagtggcacttcaagaaaaaaa

SEQ ID NO: 3090 - DNA, 1335 bp, Homo Sapiens
  NM_006830
cgcgccgcggccgcgcctgcgcagtgtagccgggtcagctggacagggtcatcctgagggtgcgactccgccgcgatggtgacccggttcctgggcccacgctaccgggagctggtcaagaactgggtcccgacggcctacacatggggcgctgtgggcgccgtggggctggtgtgggccaccgattggcggctgatcctggactgggtaccttacatcaatggcaagtttaagaaggataattaattacacaaacccttcacagactgctctggtgcctggtggtgctagctcctcccacctcagcacctgctgcatctggagcagcccaagcctcaggatggacaagaggaaacccacagctcagcttcaggcttcttatgtttctgaaaacagcttggatattttaatgcacgttgcattaaacctcactgaaacctgctccgtgcccggatgttgatcatgctggtggcttggttactgtgactgtagctggagtggcacaggtgacccaggcgtcctttcagctccagaatgttgcaagtctaggagagtgttccaatggctgacagaaactgcctatttgaaatggctcataagtagtatctgcagtgtgttcatccgttgctgccttaacaagtcacccacacgtagtggcttaaagcaacgaacattcactctctcacagtctgtgtcagtcggggatttgggagtgatgtatctgggtggttgtggcccagagtctctcatgaggttgcagttaagacatcagccaaggccacttcgtctgaggaaggctcaactggggctggagccacttccaagccagtgccctcacgtggctgtcggtgacagccacagttccttcccatgggggcccctacacgaagctgcttgagcatcctcacggcatggcctctgccttccccagagcaggtgaaccaagggagaggaaggagcaagccacagtgcttctatgagccaccctgagaagtctcacgtgatcacttccgccacagcctgtttatcaaaagcaagccccccaggcccagcccacgtgcagagggaggagaatgaggttctgtgttttgaagggaagaatatcagaattggtagacatttcaaactgtcacattagggatacaaaaatgaacaggctgggagtggtggctcagcctacaatcccaacactttgggaggctgaggaaggggcatcacttgaaccaggagttcagtactaacctgggcaacaaagaggcccctgtctctgataaaaagaaaaaaaatgaaaaaataaaaatgaacaggtataaaaagagaatatggtacaaagtc

SEQ ID NO: 3091 - DNA, 3351 bp, Homo Sapiens
  NM_006832
gggtggagcgcggggagccaggcgaggggccgcgacgacgggactccattagccgctccggccacaggcagcgcttcgccagccgaggaaccggacgcggacaccgccgccccgcgagcctccagcccctcgcctgttgccgcgcgagtcccgggcccggagcgctaggagcgcgcggaaggagccatggctctggacgggataaggatgccagatggctgctacgcggacgggacgtgggaactgagtgtccatgtgacggacctgaaccgcgatgtcaccctgagagtgaccggcgaggtgcacattggaggcgtgatgcttaagctggtggagaaactcgatgtaaaaaaagattggtctgaccatgctctctggtgggaaaagaagagaacttggcttctgaagacacattggaccttagataagtatggtattcaggcagatgctaagcttcagttcacccctcagcacaaactgctccgcctgcagcttcccaacatgaagtatgtgaaggtgaaagtgaatttctctgatagagtcttcaaagctgtttctgacatctgtaagacttttaatatcagacaccccgaagaactttctctcttaaagaaacccagagatccaacaaagaaaaaaaagaagaagctagatgaccagtctgaagatgaggcacttgaattagaggggcctcttatcactcctggatcaggaagtatatattcaagcccaggactgtatagtaaaacaatgacccccacttatgatgctcatgatggaagccccttgtcaccaacttctgcttggtttggtgacagtgctttgtcagaaggcaatcctggtatacttgctgtcagtcaaccaatcacgtcaccagaaatcttggcaaaaatgttcaagcctcaagctcttcttgataaagcaaaaatcaaccaaggatggcttgattcctcaagatctctcatggaacaagatgtgaaggaaaatgaggccttgctgctccgattcaagtattacagcttttttgatttgaatccaaagtatgatgcaatcagaatcaatcagctttacgagcaggccaaatgggccattctcctggaagagattgaatgcacagaagaagaaatgatgatgtttgcagccctgcagtatcatatcaataagctgtcaatcatgacatcagagaatcatttgaacaacagtgacaaagaagttgatgaagttgatgctgccctttcagacctggagattactctggaagggggtaaaacgtcaacaattttgggtgacattacttccattcctgaacttgctgactacattaaagttttcaagccaaaaaagctgactctgaaaggttacaaacaatattggtgcaccttcaaagacacatccatttcttgttataagagcaaagaagaatccagtggcacaccagctcatcagatgaacctcaggggatgtgaagttaccccagatgtaaacatttcaggccaaaaatttaacattaaactcctgattccagttgcagaaggcatgaatgaaatctggcttcgttgtgacaatgaaaaacagtatgcacactggatggcagcctgcagattagcctccaaaggcaagaccatggcggacagttcttacaacttagaagttcagaatattctttcctttctgaagatgcagcatttaaacccagatcctcagttaataccagagcagatcacgactgatataactcctgaatgtttggtgtctccccgctatctaaaaaagtataagaacaagcagataacagcgagaatcttggaggcccatcagaatgtagctcagatgagtctaattgaagccaagatgagatttattcaagcttggcagtcactacctgaatttggcatcactcacttcattgcaaggttccaagggggcaaaaaagaagaacttattggaattgcatacaacagactgattcggatggatgccagcactggagatgcaattaaaacatggcgtttcagcaacatgaaacagtggaatgtcaactgggaaatcaaaatggtcaccgtagagtttgcagatgaagtacgattgtccttcatttgtactgaagtagattgcaaagtggttcatgaattcattggtggctacatatttctctcaacacgtgcaaaagaccaaaacgagagtttagatgaagagatgttctacaaacttaccagtggttgggtgtgaataggaatactgtttaatgaaactccacggccataacaatatttaactttaaaagctgtttgttatatgctgcttaataaagtaagcttgaaatttatcattttatcatgaaaacttctttgccttaccagaccagttaatatgtgcactaaacaagcacgactattaatctatcatgttatgatataataaacttgaatttgtcacacattccttagggccatgaattgaaaactgaaatagtgggcaaatcaggaacaaaccatcactgatttactgatttaagctagccaaactgtaagaaacaagccatctattttaaagctatccagggcttaacctatatgaactctatttatcatgtctaatgcatgtgatttaatgtatgtttaatttgatatcatgttttaaaatatcctacttctggtagccatttaattcctccccctacccccaaataaatcaggcatgcaggaggcctgatatttagtaatgtcattgtgtttgaccttgaaggaaaatgctattagtccgtcgtgcttgatttgtttttgtccttgaataagcatgttatgtatattgtctcgtgtttttatttttacaccatattgtattacacttttagtattcaccagcataatcactgtctgcctaaaatatgcaactctttgcattacaatatgaagtaaagttctatgaagtatgcattttgtgtaactaatgtaaaaacacaaattttataaaattgtacagttttttaaaaactactcacaactagcagatggcttaaatgtagcaatctctgcgttaattaaatgcctttaagagatataattaacgtgcagttttaatatctactaaattaagaatgacttcattatgatcatgatttgccacaatgtccttaactctaatgcctggactggccatgttctagtctgttgcgctgttacaatctgtattggtgctagtcagaaaattcctagctcacatagcccaaaagggtgcgagggagaggtggattaccagtattgttcaataatccatggttcaaagactgtataaatgcattttattttaaataaaagcaaaacttttatttaataaaaaaaaaaaaaaaaa

SEQ ID NO: 3092 - DNA, 1441 bp, Homo Sapiens
  NM_006833
ggcggggccgaggctggcgggcgcggggaaaatggcggcggcggcggcggcggctgcagctacgaacgggaccggaggaagcagcgggatggaggtggatgcagcagtagtccccagcgtgatggcctgcggagtgactgggagtgtttccgtcgctctccatccccttgtcattctcaacatctcagaccactggatccgcatgcgctcccaggaggggcggcctgtgcaggtgattggggctctgattggcaagcaggagggccgaaatatcgaggtgatgaactcctttgagctgctgtcccacaccgtggaagagaagattatcattgacaaggaatattattacaccaaggaggagcagtttaaacaggtgttcaaggagctggagtttctgggttggtataccacaggggggccacctgacccctcggacatccacgtccataagcaggtgtgtgagatcatcgagagccccctctttctgaagttgaaccctatgaccaagcacacagatcttcctgtcagcgtttttgagtctgtcattgatataatcaatggagaggccacaatgctgtttgctgagctgacctacactctggccacagaggaagcggaacgcattggtgtagaccacgtagcccgaatgacagcaacaggcagtggagagaactccactgtggctgaacacctgatagcacagcacagcgccatcaagatgctgcacagccgcgtcaagctcatcttggagtacgtcaaggcctctgaagcgggagaggtcccctttaatcatgagatcctgcgggaggcctatgctctgtgtcactgtctcccggtgctcagcacagacaagttcaagacagatttttatgatcaatgcaacgacgtggggctcatggcctacctcggcaccatcaccaaaacgtgcaacaccatgaaccagtttgtgaacaagttcaatgtcctctacgaccgacaaggcatcggcaggagaatgcgcgggctctttttctgatgagggtacttgaagggctgatggacaggggtcaggcaactatcccaaaggggagggcactacacttccttgagagaaaccgctgtcattaataaaaggggagcagcccctgagcacccctgctggtggctctgtcctctgttaggcaccacactggttggtcaacttggatgttcatcgaggctcattctggccttgctcagaagcccttctgatgctcttcagtgagggaggcactaccatttgaagtgaccccatgtcagtcacatggactggtctttagcaaagtccaaggctgcctgcttccacctaagtggtctctgttctacactttaatgtcaccctctacatcatcttacctagcccacccaaccttataaacatgataattgactactttcctgagctaaaaaaaaaaaaaaaaaa

SEQ ID NO: 3093 - DNA, 1234 bp, Homo Sapiens
  NM_006834
gggccgcgagcactggcgggttctgggtcctgtgaccggtcaggcggcgtcagcgggcgcggcggagggctggccggcctcgggggagtttccgcggccgccgggggcgcggcggcagagcgcgaggccgggcagggggccagactcggagtcgaggcgcgcccgacagccgcagcgctcatggcgggcggaggagccggggaccccggcctgggggcggccgccgccccagcgcccgagacccgcgagcacctcttcaaggtgctggtgatcggcgagcttggcgtgggcaagaccagcatcatcaagcgctacgtccaccagctcttctcccagcactaccgggccaccatcggggtggacttcgccctcaaggtcctcaactgggacagcaggactctggtgcgcctgcagctgtgggacatcgcggggcaggagcgatttggcaacatgacccgagtatactacaaggaagctgttggtgcttttgtagtctttgatatatcaagaagttccacatttgaggcagtcttaaaatggaaaagtgatctggatagtaaagttcatcttccaaatggcagccctatccctgctgtcctcttggctaacaaatgtgaccagaacaaggacagtagccagagtccttcccaggtggaccaattctgcaaagaacatggctttgccggatggtttgaaacctctgcaaaggataacataaacatagaggaagctgcccggttcctagtggagaagattcttgtaaaccaccaaagctttcctaatgaagaaaacgatgtggacaaaattaagctagatcaagagaccttgagagcagagaacaaatcccagtgttgctgatatatggcttctgcttctcttgtgtgtgcctcagctctgaagaagttcctgagaatgggttacagatgtcatgttagctgggagtcttcccacatgtggcacttcaaaaggcagcaccactgggcgcctgcacttatttgaaaatggaactttgggagaagtatccctgctagtggctctgtaacttaacagatgacaattaggcttttgtcattgttgccatcatatggaagataatgtttacatccttttaaacatttttatatgacaattcctcaggatttggtaaggcttccaagttgtagcttttagtgtaagtgctggggtggtaataaaatgttacctgcaaaaaaaaaaaaaaaaaaaaaaaaaaaaa

SEQ ID NO: 3094 - DNA, 8699 bp, Homo Sapiens
  NM_006836
cagccccggcaggatggcggcggacacgcaggtttccgagacactaaagcgttttgcagggaaggtgacaacagccagtgtaaaggaacggagagaaatcctcagtgaacttgggaagtgtgttgctggaaaagatcttccagagggagcagtgaaggggctctgcaaattgttctgcttgactctgcatcgatatagagatgcagcctcccgcagggccttgcaggcagccatccagcagttggctgaggcccagccagaagccactgctaagaaccttctacactctctgcagtcttctggtataggctccaaagcaggtgttcccagtaagagcagtggctctgccgccttgctggccttgacctggacctgcctcctggtgcgcattgtctttccatcgagagccaagcgacaaggagacatctggaacaaactggtggaagtgcagtgcctgctcttgctggaggtgctgggtggctcccacaagcacgccgtggatggtgctgtgaagaaactcacgaagctgtggaaagagaaccccgggctggtggaacagtacttgtcagccattctcagcctagagcccaaccagaactatgctggcatgctggggctgctggtgcagttctgcacgagtcacaaggagatggacgtggtcagtcagcacaagagcgccctactggacttttacatgaagaacatcctgatgagcaaagtcaagcctccgaagtacctgttggatagctgtgcccctctgctccgatacctgtcccactcagaatttaaggatctgatactgcccaccatacagaagtccttactgaggagtccagagaatgttattgaaactatttctagtctgctggcatcagtgacgcttgacctcagccagtatgccatggacatcgtgaaaggactggctggtcacctgaaatccaacagtccccgcctgatggatgaagctgtgctggcactgcggaacctggcacgccagtgcagtgactcttcggccatggaatccctgaccaagcacctatttgctatcctcggaggctcggaaggaaaactaactgttgtagcccagaagatgagcgtcctctcagggattgggagcgtcagtcatcacgtggtgtctggaccttccagtcaggtcctgaatgggatcgtggctgagctgttcatcccgttccttcagcaggaagttcatgaagggaccttggtacacgctgtctcagtcctggctctctggtgtaaccgattcactatggaagtgcccaagaagctcactgaatggttcaaaaaagctttcagccttaaaacctccacatctgcggtgaggcatgcctacctgcagtgcatgttggcctcttaccggggtgacacgctgttgcaggccctggacttactgcccttgctcatccagacagtggagaaggcagcctcccaaagcactcaggttcccaccatcactgaaggggttgccgcagccttgttgctcttaaagttgtcagtggctgactcacaggctgaggccaaactgagcagtttctggcagttgattgtggatgagaaaaagcaggttttcacttctgagaaattcctggtcatggcttcagaggatgccctgtgtactgtgttgcatctgacagagagacttttccttgaccacccgcatagactcactggcaacaaagttcagcagtaccaccgggctctggtggcggtgctcctgagccgcacctggcacgtccgcaggcaggctcagcagacagttcggaagctgctgtcctctcttgggggctttaagctggcgcacggactcttggaggagctgaagactgtcctcagttctcacaaggtgctgcccttagaggctttggtgactgatgctggagaggtgactgaggcaggcaaggcctacgtgcctccacgggtcctgcaggaggctctgtgtgtcatctccggtgtgccagggctcaagggtgatgtcaccgacactgaacaactggcccaggaaatgctgatcatctcccaccacccatccttagttgccgtgcagtctggactttggccagcacttcttgccaggatgaagatcgatcctgaagcctttatcaccaggcacctggatcagatcattcccaggatgaccacacagagtcccctaaaccagtcctccatgaatgccatgggctccctttccgtcctgtcgccggaccgggtcctcccacagctcatcagcaccatcactgcctccgtgcagaaccctgcactgcgcctggtgacgcgggaggagtttgccattatgcagacccctgctggggagctgtatgacaaatccatcattcagagtgcccagcaggacagcataaaaaaggccaacatgaagcgagagaacaaagcttattccttcaaagagcagatcatcgagctggagctgaaggaggagataaagaagaagaaaggcatcaaagaggaggtgcagctgaccagcaagcagaaggagatgctgcaggcccagctagacagggaggcgcaggtccggaggcggctgcaggagctggatggggagctggaggcggcgcttggactgctggacatcatcctggccaagaacccgtccggcctgacccagtacatccctgttttggtcgactcttttctgcccttgctgaagtctcccctggctgctcccaggatcaagaaccccttcttgtccttggctgcctgtgtcatgccctctaggctcaaggctttgggcactttggtgagccacgtgaccctgcgcctgctgaagccagagtgtgtcctggataagtcctggtgccaggaagagctgtcggtggctgtgaagagggcggtgatgctgctgcacacccacaccatcaccagcagggtgggcaagggggagccaggtgctgcgcccttgtccgcgccagccttctccttagtcttcccgtttctgaagatggtgctgacggagatgccccaccacagtgaggaggaggaggagtggatggcccagattcttcagatcctcactgtccaagcccagctgagggcctcccccaacaccccacccgggcgggtggacgagaatggcccggagttgctgcctcgcgtggccatgctgcgtcttctgacttgggtgatcgggacgggctcgcctcgcttacaggttctggcttcagacaccctgaccaccctgtgtgccagcagcagtggtgatgatggctgtgcctttgcagagcaggaggaggtggacgtgctgctctgtgccttgcagtccccgtgtgccagcgtgcgggaaaccgtgctccgggggctgatggaactccacatggtattgccagcacctgatactgatgagaagaatggcctgaaccttctgcggagactctgggtggtcaagtttgacaaggaggaggagatccggaagctggctgagaggctctggtcaatgatgggcctagacctgcagccagacctctgctccttgctgattgacgacgtgatctatcatgaggcggctgtaaggcaggcaggggccgaagccctctcccaagcagtggcacgttaccagcggcaggcggcggaggttatgggcaggctcatggagatttaccaggaaaagctctaccggccgcccccagtgctggatgctttgggacgagttatttcagaatctcctccagatcagtgggaagccaggtgtggcttggcgttggccctcaacaagctctcccagtatttggacagctctcaggtgaagccactctttcagttttttgtccctgatgccctcaatgaccgacacccagatgtccggaagtgcatgttggatgcagccctcgcaacgctcaacactcatgggaaggagaacgtcaactcgctgttgccagtattcgaggagttcctgaagaacgcgcccaatgatgccagctatgatgctgtgcgacagagtgtggtggtcctgatgggctctctggccaagcacctggacaagagtgaccccaaagtgaagcccattgttgccaagctcatcgctgccctctccaccccctcccagcaggtccaggagtccgtagccagctgcttgccaccccttgtgccagccatcaaggaggatgctggagggatgatccagaggcttatgcagcagctgctggagtcagacaagtacgcagagcgcaaaggggccgcctatggcctggcgggcctggtgaagggcctgggcatcctctcgctgaagcaacaggagatgatggcggcactgactgatgccatccaagataagaagaacttccgccggcgagagggagccctctttgccttcgagatgctctgcaccatgctggggaaactttttgagccgtatgtggttcacgtgctgccccatctgctcctgtgctttggggatggaaaccagtatgtgcgtgaggctgcagatgactgtgccaaggctgtgatgagcaacttgagtgctcacggggtgaagctggtgctcccctccttactggctgccctggaggaggaatcgtggcggaccaaagctgggtcagtggagcttcttggggcaatggcgtactgtgctcctaagcagctgtcatcctgtctacccaacattgtgcccaagcttacggaggtgctgaccgactcccatgtcaaagtccagaaggctggacagcaggcgctcaggcagatcggctccgttatcaggaacccggagatcctggccattgctccagtcctcctggatgccctgacggatccctccaggaagacccagaagtgcttgcagaccctgctggacaccaagtttgtccacttcattgatgccccatccctggccctcatcatgcccattgtccagagagccttccaggaccgttccacggacacgcggaagatggcagcccagattattggcaacatgtactccctgacagaccagaaggacttggctccgtacctgcccagcgtgacgcctggcctgaaagcatcgcttttggaccctgtgcctgaggtgcggaccgtatctgcaaaggcccttggggccatggtgaagggcatgggggagtcgtgctttgaggacttgctgccgtggctgatggagacactgacctatgagcagagctctgtggatcgctcaggcgctgcacaggggttggctgaggtcatggccggtttgggggtggagaagttggagaagttgatgccagaaatcgtggctacagccagcaaagtggacattgcaccccatgtccgagatggctacattatgatgtttaactacctgcccatcacctttggagacaagtttactccttatgtggggcccatcatcccctgtatcctcaaagctcttgctgatgagaatgagtttgtgcgtgacaccgccctgcgcgcgggccagcgggttatctccatgtacgctgagacagccatcgccctgctgctgccccagctagagcaaggcctctttgatgacctttggagaatcaggttcagctctgttcagctccttggggatctcctgtttcacatctcaggagtcactgggaagatgaccacagaaactgcctctgaggatgataactttggaactgcccagtccaacaaggcgatcatcactgccctgggggtagagcggcggaaccgggtgttggcagggctgtacatgggccgctcagacacccagctggtggtgcggcaggcgtccctgcatgtctggaagattgttgtctccaataccccccgcaccttgcgtgagatcctacccactctctttgggctcctgctgggtttcctggccagcacgtgtgcagataagagaacgattgcagcgagaacattgggagatcttgtgcggaagttaggggagaaaatcctccccgagatcatccccatccttgaggaaggcctgaggtctcagaagagcgatgagaggcagggtgtgtgcattggcctaagtgagatcatgaagtccaccagccgggatgccgtgctgtatttctctgaatccctcgtgcccacggcaaggaaggctttgtgtgacccactggaggaggtcagagaggcggcagccaagactttcgagcagctgcattccaccatcggccaccaggctctggaggacattctcccatttttactaaagcagctggatgacgaggaggtgtcagagtttgccttggatggtctgaagcaagtcatggctattaagagtcgtgtggtgctgccctaccttgtgcccaagctgacaacgccacctgtcaacacccgggtgctggctttcctttcgtcagtggctggtgatgccctcacccgtcatcttggcgtgatcctcccagcggtcatgctggccctgaaggaaaagcttgggaccccagatgagcagctggagatggccaattgtcaggctgtgatcctctccgtagaggatgacacagggcaccggatcatcatcgaggatctgctggaggccacccgcagccctgaggtgggcatgaggcaagctgctgccatcatcctcaacatctactgttcccgctcaaaggctgactacaccagccacctgcggagcctggtctcgggcctgatccgcctcttcaatgactccagccctgtggttctggaggagagctgggatgccctaaatgccatcactaagaagctggatgctggcaaccagttggcactcattgaagagctgcacaaggaaatccggctcatagggaacgagagcaaaggcgagcatgtgccaggattctgcctcccgaagaagggagtgacctccatccttccagtgttgcgggaaggagtcctgactggcagccctgagcagaaggaggaggcagccaaagccttaggcttggtaatccgcctgacctcggctgacgccctgaggccctccgtggtcagcatcactggccctctgatccgcatcctgggggacaggttcagctggaatgtgaaggcggctctgctcgagacactcagcctcttgttggctaaggttgggattgccctgaagcccttcctgccccagctgcagaccactttcaccaaagccctgcaggactccaaccggggggtgcgcctgaaggccgcagatgctctggggaagctcatttccatccacattaaggtggaccccctcttcacagagctgctcaatggcatccgcgccatggaggacccaggtgtcagggacaccatgctgcaggccctgaggtttgtgattcagggagcaggggccaaagtggatgccgtcatccggaaaaacatcgtctcactcctgctgagcatgctgggacacgatgaggacaacactcgcatctcctcagccgggtgcctaggggaactgtgtgcctttttgactgaagaggagcttagtgccgttctacagcagtgcttgctggcggacgtgtccggcattgactggatggttcggcacgggcggagcctggcactttccgtggctgtgaatgtggctcctggcagactttgtgccggcagatatagcagtgatgttcaggaaatgatcctgagcagtgccacggcggacaggatccccattgcggtgagcggggtccggggcatgggctttctcatgagacaccacatcgagacaggcggagggcagttgccggccaaactttccagcctgttcgttaagtgtctgcagaacccatccagcgacatcaggctggtggctgagaagatgatctggtgggcaaataaggacccactgcctcccctggacccccaggccatcaagcccatcctgaaggctcttcttgacaacaccaaggataagaacaccgtggtcagggcctacagcgaccaggcaattgtcaacctcctcaagatgcggcagggtgaagaggtgtttcagtccctctccaagatcctggatgtggccagtttggaggtgctgaacgaggttaaccgaaggtccctgaagaagctggccagccaggccgactccacggagcaggtggacgacaccatcctgacatgagaggcctgggccagcagcagcattgccgctccacatctttgctcaatgttttcatttttgaaaatacatttgttccaatggggagcttggaagatggcgttcccagaaagtattttaatatcaatagaccacagccaaagccttaaatcaaacccacacacaactgaaaattgcctcctccatctctcaccttttcctgtggagaagagaaggaaaagcacacgcatgcgcctcagcaaatggcagcccaggagctgtttgtccagtttagcatggctaggtctggaactataatagcagggtcagactgtgggttcctcttctcctgtgcttgagctctggtttgagagctggcgctaccaacctttttcctatatcccgagtggggcacagacggtggatctctgcccagtgtggtgtgtctggcttggcttttcaatattgtgaggtctgaatggatctgacccctgtcagatgaaaatgattcacagctctggcagttcccaagtctggggaggggtataggtttgaaaggctgtttgaaagaggaatgtttaataaaggctttgatttaatcttgatataaacagatttttaaaaatctccacccattaaacatgaagcttcctgcatcaggaaaaaaaaaaaaaaaaaaaaaaaaaaaaaaaaa

SEQ ID NO: 3095 - DNA, 1510 bp, Homo Sapiens
  NM_006837
gactataccactcccataccctataactttgtttgttctatttcacacatataattttccgagacaagatgttctcatttaagcaacaagaagattcgtctctcgctattactgtaactgctgtttatatcgtcatgtcccggaaaggtccctgtcttccctgaatggtctctaccaacttcacctccggttctaggtgtcatggctgccccaagagtctaggtaagagtttgttcccgtggtgcggagggtcaaggcccacacccggaaacctagcgaggtaaagttgcgtcttggttgtagagacgacaacttctccgcttcctcggcgatggcggcgtccgggagcggtatggcccagaaaacctgggaactggccaacaacatgcaggaagctcagagtatcgatgaaatctacaaatacgacaagaaacagcagcaagaaatcctggcggcgaagccctggactaaggatcaccattactttaagtactgcaaaatctcagcattggctctgctgaagatggtgatgcatgccagatcgggaggcaacttggaagtgatgggtctgatgctaggaaaggtggatggtgaaaccatgatcattatggacagttttgctttgcctgtggagggcactgaaacccgagtaaatgctcaggctgctgcatatgaatacatggctgcatacatagaaaatgcaaaacaggttggccgccttgaaaatgcaatcgggtggtatcatagccaccctggctatggctgctggctttctgggattgatgttagtactcagatgctcaatcagcagttccaggaaccatttgtagcagtggtgattgatccaacaagaacaatatccgcagggaaagtgaatcttggcgcctttaggacatacccaaagggctacaaacctcctgatgaaggaccttctgagtaccagactattccacttaataaaatagaagattttggtgtacactgcaaacaatattatgccttagaagtctcatatttcaaatcctctttggatcgcaaattgcttgagctgttgtggaataaatactgggtgaatacgttgagttcttctagcttgcttactaatgcagactataccactggtcaggtctttgatttgtctgaaaagttagagcagtcagaagcccagctgggacgagggagtttcatgttgggtttagaaacgcatgaccgaaaatcagaagacaaacttgccaaagctacaagagacagctgtaaaactaccatagaagctatccatggattgatgtctcaggttattaaggataaactgtttaatcaaattaacatctcttaaacagtctctgagaagtactttacctgaaagacagtatgagaaaaatattcaagtaacactttaaaaccagttacccaaaatctgattagaagtataaggtgctctgaagtgtcctaaatattaatatcctgtaataaagctctttaaaatgaaaaaaaaaaaaaaaaaaaaaaa

SEQ ID NO: 3096 - DNA, 3506 bp, Homo Sapiens
  NM_006838
gagtcctccgccgtcccagcattccctgcgtccctaccatcgagagcagcttccggcgtggctggtgtaggcgggtggagaaggatcggggccctcgccgctctgtctcattccctcgcgctctctcgggcaacatggcgggtgtggaggaggtagcggcctccgggagccacctgaatggcgacctggatccagacgacagggaagaaggagctgcctctacggctgaggaagcagccaagaaaaaaagacgaaagaagaagaagagcaaagggccttctgcagcaggggaacaggaacctgataaagaatcaggagcctcagtggatgaagtagcaagacagttggaaagatcagcattggaagataaagaaagagatgaagatgatgaagatggagatggcgatggagatggagcaactggaaagaagaagaaaaagaagaagaagaagagaggaccaaaagttcaaacagaccctccctcagttccaatatgtgacctgtatcctaatggtgtatttcccaaaggacaagaatgcgaatacccacccacacaagatgggcgaacagctgcttggagaactacaagtgaagaaaagaaagcattagatcaggcaagtgaagagatttggaatgattttcgagaagctgcagaagcacatcgacaagttagaaaatacgtaatgagctggatcaagcctgggatgacaatgatagaaatctgtgaaaagttggaagactgttcacgcaagttaataaaagagaatggattaaatgcaggcctggcatttcctactggatgttctctcaataattgtgctgcccattatactcccaatgccggtgacacaacagtattacagtatgatgacatctgtaaaatagactttggaacacatataagtggtaggattattgactgtgcttttactgtcacttttaatcccaaatatgatacgttattaaaagctgtaaaagatgctactaacactggaataaagtgtgctggaattgatgttcgtctgtgtgatgttggtgaggccatccaagaagttatggagtcctatgaagttgaaatagatgggaagacatatcaagtgaaaccaatccgtaatctaaatggacattcaattgggcaatatagaatacatgctggaaaaacagtgccgattgtgaaaggaggggaggcaacaagaatggaggaaggagaagtatatgcaattgaaacctttggtagtacaggaaaaggtgttgttcatgatgatatggaatgttcacattacatgaaaaattttgatgttggacatgtgccaataaggcttccaagaacaaaacacttgttaaatgtcatcaatgaaaactttggaacccttgccttctgccgcagatggctggatcgcttgggagaaagtaaatacttgatggctctgaagaatctgtgtgacttgggcattgtagatccatatccaccattatgtgacattaaaggatcatatacagcgcaatttgaacataccatcctgttgcgtccaacatgtaaagaagttgtcagcagaggagatgactattaaacttagtccaaagccacctcaacacctttattttctgagctttgttggaaaacatgataccagaattaatttgccacatgttgtctgttttaacagtggacccatgtaatacttttatccatgtttaaaaaagaaggaatttggacaaaggcaaaccgtctaatgtaattaaccaacgaaaaagctttccggacttttaaatgctaactgtttttccccttcctgtctaggaaaatgctataaagctcaaattagttaggaatgacttatacgttttgttttgaatacctaagagatactttttggatatttatattgccatattcttacttgaatgctttgaatgactacatccagttctgcacctataccctctggtgttgctttttaaccttcctggaatccattttctaaaaaataaagacattttcagatctgagagctacatctcaatgtctgtggttataattctggacaggataaatagctaaacttaatgtaggcaaatgcagagacatttatctgaaatgtagacctctacactgagacttttctggcatagtggctaaaacaagatctacacatgcataaaaagggacaatcaccttttcttcataaatatacagctttaggaatatttcaccattctttgtaggacatagtagtccttgtctttttttctcctgacattggaaagatgtgctaattgaaacttgacttagtaggaacattgtgccaactcaaaaccttgatttagtaaaaatctcaatgtttagatcctttgtccagtggtggtgtttatcagggaatgtattcagcttgctcagaaaaccaaaagggtattaaagccacaaaagcaaagaagaaaaaaaaaaacttcccatgtttggatcttgttctagttagaaaaattaagttgaaattcttggactttttcattcatgaggcaaatgctgtaataccttcccctttgacaggtttggattcttaacattactagtggtatttcaggaagtgacgttacagttactttccttatagcggctaagtgtattaagttgaatgtaacgatggtaatattaatttgtttgaactgaggcccactactgattctttgacaaattgaattcttatatttaaataattttatgggaatgttccatcataatttctaaatcatttatatatcaaggtagccttaatttgtatatgtttcagtacaatgagattttattgcctctgggatgctgtttagtttgtattttgttgaacgtttttatcctaggaagagaaacctatgacttgtgtacctagatcatctgttacattaaaaagctgctctttcagcattagagctataaatgaatgttaccttgtcgggaaacaatctaggttttagctgtatgagctatgtttattatggtgctaatgttcagtagccacatttgactaatgtctccattctctgtgatgctgtggctagcagcagagctcgccagttcatgcctggacatactgtcagggctgggccctccagctagctcctttggggttgagtccgtatctttttgatgtggaagtataaagcaagtatcttgatttctaaacccagcaattttagaattgacctttatgagtgaagacttttggagcttttaaagaccttggcagtcatgatctcaaaccaattaggagctccaagctcccttcccaggtaactgttgggagcaatggcatcactgtatgcccttgtaatggctggaagggacatgatcttgtaagtaggaaagctgtaactaaaaattgtattgtttgcttattagccatgtatctcttaaaattttgttatgtttacaacgatgtaccttattggcaacaagttattagtttgatgtttaacaatagtgcctttagtaaattattttacaactaaaa

SEQ ID NO: 3097 - DNA, 2902 bp, Homo Sapiens
  NM_006842
cccagcttccgggttggtcgcgcgccttcctgcggctaagatggcgacggagcatcccgagcctcccaaagcagaattgcagctgccgccgccgccacctccaggccactatggcgcctgggctgcccaggagcttcaggccaagttggcagagatcggagctccgatccagggtaatcgcgaggagctggtggagcggctgcagagctacacccgccagactggcatcgtgctgaatcggccggttttgagaggggaagatggggacaaagccgctccacctcccatgtcggcacagctccctggaattcccatgccaccaccacctttgggactcccccctctgcagcctcctccgccacccccaccacctccaccaggccttggccttggctttcctatggcccacccaccaaatttggggcccccgcctcctctccgtgtgggtgagccagtggcactgtcagaggaggagcggctgaagttggctcagcagcaggcggcattgctgatgcagcaggaggagcgtgccaagcagcagggagatcattcgctgaaggaacatgagctcttggagcagcagaagcgggcagctgtgttactggagcaggaacgacagcaggagattgccaagatgggcaccccagtccctcggcccccacaagacatgggccagattggtgtgcgcactcctctgggtcctcgagtagctgctccagtgggcccagtgggccccactcctacagttttgcccatgggagcccctgttccccggcctcgtggtcccccaccgccccctggagatgagaacagagagatggatgacccctctgtgggccccaagatcccccaggctttggagaagatcctgcagctgaaggagagccgccaggaagagatgaattctcagcaggaggaagaggaaatggaaacagatgctcgctcgtccctgggccagtcagcgtcagagactgaggaggacacagtgtccgtatctaaaaaggagaaaaaccggaagcgtaggaaccgaaagaagaagaaaaagccccagcgggtgcgaggggtgtcctctgagagctctggggaccgggagaaagactcaacccggtcccgtggctctgattccccagcagctgatgttgagattgagtatgtgactgaagaacctgaaatttacgagcccaactttatcttctttaagaggatctttgaggcttttaagctcactgatgatgtgaagaaggagaaagagaaggagccagagaaacttgacaaactggagaactctgcagcccccaagaagaagggatttgaagaggagcacaaggacagtgatgatgacagcagtgatgacgagcaggaaaagaagccagaagcccccaagctgtccaagaagaagttgcgccgaatgaaccgcttcactgtggctgaactcaagcagctggtggctcggcccgatgtcgtggagatgcacgatgtgacagcgcaggaccctaagctcttggttcacctcaaggccactcggaactctgtgcctgtgccacgccactggtgttttaagcgcaaatacctgcagggcaaacggggcattgagaagccccccttcgagctgccagacttcatcaaacgcacaggcatccaggagatgcgagaggccctgcaggagaaggaagaacagaagaccatgaagtcaaaaatgcgagagaaagttcggcctaagatgggcaaaattgacatcgactaccagaaactgcatgatgccttcttcaagtggcagaccaagccaaagctgaccatccatggggacctgtactatgaggggaaggagttcgagacacgactgaaggagaagaagccaggagatctgtctgatgagctaaggatttccttggggatgccagtaggaccaaatgcccacaaggtccctcccccatggctgattgccatgcagcgatatggaccacccccatcgtatcccaacctgaaaatccctgggctgaactcgcccatccctgagagctgttcctttgggtaccatgctggtggctggggcaaacctccagtggatgagactgggaaaccgctctatggggacgtgtttggaaccaatgctgctgaatttcagaccaagactgaggaagaagagattgatcggaccccttggggggaactggaaccatctgatgaagaatcctcagaagaagaggaagaggaagaaagtgatgaagacaaaccagatgagacaggctttattacccctgcagacagtggccttatcactcctggaggcttttcatcagtgcctgctggaatggagacccctgaactcattgagctgaggaagaagaagattgaggaggcgatggacggaagtgagacacctcagctcttcactgtgttgccagagaagagaacagccactgttggaggggccatgatgggatcaacccacatttatgacatgtccacggttatgagccggaagggcccggctcctgagctgcaaggtgtggaagtggcgctggcgcctgaagagttggagctggatcctatggccatgacccagaagtatgaggagcatgtgcgggagcagcaggctcaagtagagaaggaggacttcagtgacatggtggctgagcacgctgccaaacagaagcaaaaaaaacggaaagctcagccccaggacagccgtgggggcagcaagaaatataaggagttcaagttttaggtcccctcacactagccctttttttggccctacgtctggatgcctgggcttcacacaagaaccacctctcccgcagttcccaaggacttgtcatttcatgttcttattttagacctgttttgtaaataaagctgtttcccaaggaaagagatgaatatttaacactaaaaaaaa

SEQ ID NO: 3098 - DNA, 2328 bp, Homo Sapiens
  NM_006844
cggggcgccgctgagccaagtgggccacccgggcacggccacgctcccgggtcacgtgacacggagggggccgaattctgctggaggcagcgccatatcctggaggtgaaggtaccacctcatggagacccccgcggccgccgcccccgctgggagcttattcccctccttcctgctcctggcctgcgggacgctggtggccgccttgctgggcgccgctcaccgcctggggctcttctatcagctgctgcacaaggtggacaaggcaagcgtccggcatggcggagagaacgtggccgctgtgctgagggcccatggtgtgcggttcatcttcacgctggtcggtgggcacatttccccgctgctggtggcctgtgagaaactgggcatccgtgtggtggacacacgccatgaggtcacggccgtctttgctgctgatgctatggcccgcctgtccgggacggtgggcgtggcggcagtgacagcaggccctggcctcaccaacacggtgactgcggtgaagaatgctcagatggctcagtccccaatcctgcttctgggtggggctgccagcactctgctgcagaaccggggtgcgctccaggctgttgatcagctgtcccttttccggccactctgtaagttttgtgtgtctgtgcggagggtgcgggacattgtgcccaccctgagggccgcgatggctgccgcccagtcgggcaccccaggtccggtgtttgtggagctgcccgttgacgtgctgtacccctacttcatggtccagaaggagatggtgccagccaagccacccaagggcctcgtgggccgagtggtctcctggtatttagagaattacctggccaacctctttgcaggagcctgggagcctcagcccgagggaccgctgcccctggacatcccccaggcttccccgcagcaggttcagcgctgtgtggagatcctgagccgggccaagaggcctctgatggtgctggggagtcaggccctgctcaccccaacgtctgccgacaagcttcgggctgccgtggagaccttgggtgttccctgcttccttggagggatggcacgggggctgttaggccgcaaccaccccctccacatccgggagaaccgcagtgcggccctgaagaaggcggatgtcattgtcctagcaggaactgtgtgtgacttccgcctatcctatggccgtgtcctcagccacagcagcaagatcatcatcgtcaatcgtaatcgggaagagatgttgctcaactcagacatcttctggaagccccaggaggctgtgcagggagatgtgggttccttcgtgctgaagttagtggagggccttcagggccagacctgggccccagactgggtggaggagctgcgggaagccgaccggcagaaggagcagacctttcgggagaaggcagcgatgcctgtggcccagcacctgaacccagtgcaggtgctgcagctggtggaggaaacgctacctgacaactcaattctggtggtggatggcggggacttcgtgggcactgctgcccatctggtacagccccgcggccccctgcgctggctcgatcctggggcctttgggactctgggagttggtgcaggatttgcacttggggccaagctgtgccggccagatgctgaggtctggtgcctgtttggggacggagcttttggctacagcctcatcgaatttgatacattcgtcagacacaagatcccagtgatggccttggtagggaatgatgctggctggacacagatttctcgggagcaggtgccctctctgggcagcaacgtggcctgtggcctggcctacactgattatcacaaggcagccatgggtctgggggcccggggcttgctgctctcacgggagaacgaggatcaggtggtcaaggtgctgcacgatgcccagcagcagtgccgagacggccacccggttgtggtcaacatcctcattgggaggacggacttccgcgatggctccattgctgtatagggccttgtgggtcaggacgcttggctgccttcctgcccctggactgtgtccagctggtttggagtctcatcattgcttgccctgggcctatcccatgaggcccagtgactccacaacctccctgaggaggggatggaggggtcaaatctcagagaggctctcttgtgagctcttggaccctcctcttcacggacccaactgtgccgtttgtcccctctcttatggagactgaataaaccacctctggcccatgtaggcccaagtactcagtctcagaaaaaaaaaaaaaaaaaaaaaaaaaaaaaaaa

SEQ ID NO: 3099 - DNA, 2896 bp, Homo Sapiens
  NM_006845
acgcttgcgcgcgggatttaaactgcggcggtttacgcggcgttaagacttcgtagggttagcgaaattgaggtttcttggtattgcgcgtttctcttccttgctgactctccgaatggccatggactcgtcgcttcaggcccgcctgtttcccggtctcgctatcaagatccaacgcagtaatggtttaattcacagtgccaatgtaaggactgtgaacttggagaaatcctgtgtttcagtggaatgggcagaaggaggtgccacaaagggcaaagagattgattttgatgatgtggctgcaataaacccagaactcttacagcttcttcccttacatccgaaggacaatctgcccttgcaggaaaatgtaacaatccagaaacaaaaacggagatccgtcaactccaaaattcctgctccaaaagaaagtcttcgaagccgctccactcgcatgtccactgtctcagagcttcgcatcacggctcaggagaatgacatggaggtggagctgcctgcagctgcaaactcccgcaagcagttttcagttcctcctgcccccactaggccttcctgccctgcagtggctgaaataccattgaggatggtcagcgaggagatggaagagcaagtccattccatccgaggcagctcttctgcaaaccctgtgaactcagttcggaggaaatcatgtcttgtgaaggaagtggaaaaaatgaagaacaagcgagaagagaagaaggcccagaactctgaaatgagaatgaagagagctcaggagtatgacagtagttttccaaactgggaatttgcccgaatgattaaagaatttcgggctactttggaatgtcatccacttactatgactgatcctatcgaagagcacagaatatgtgtctgtgttaggaaacgcccactgaataagcaagaattggccaagaaagaaattgatgtgatttccattcctagcaagtgtctcctcttggtacatgaacccaagttgaaagtggacttaacaaagtatctggagaaccaagcattctgctttgactttgcatttgatgaaacagcttcgaatgaagttgtctacaggttcacagcaaggccactggtacagacaatctttgaaggtggaaaagcaacttgttttgcatatggccagacaggaagtggcaagacacatactatgggcggagacctctctgggaaagcccagaatgcatccaaagggatctatgccatggcctcccgggacgtcttcctcctgaagaatcaaccctgctaccggaagttgggcctggaagtctatgtgacattcttcgagatctacaatgggaagctgtttgacctgctcaacaagaaggccaagctgcgcgtgctggaggacggcaagcaacaggtgcaagtggtggggctgcaggagcatctggttaactctgctgatgatgtcatcaagatgatcgacatgggcagcgcctgcagaacctctgggcagacatttgccaactccaattcctcccgctcccacgcgtgcttccaaattattcttcgagctaaagggagaatgcatggcaagttctctttggtagatctggcagggaatgagcgaggcgcggacacttccagtgctgaccggcagacccgcatggagggcgcagaaatcaacaagagtctcttagccctgaaggagtgcatcagggccctgggacagaacaaggctcacaccccgttccgtgagagcaagctgacacaggtgctgagggactccttcattggggagaactctaggacttgcatgattgccacgatctcaccaggcataagctcctgtgaatatactttaaacaccctgagatatgcagacagggtcaaggagctgagcccccacagtgggcccagtggagagcagttgattcaaatggaaacagaagagatggaagcctgctctaacggggcgctgattccaggcaatttatccaaggaagaggaggaactgtcttcccagatgtccagctttaacgaagccatgactcagatcagggagctggaggagaaggctatggaagagctcaaggagatcatacagcaaggaccagactggcttgagctctctgagatgaccgagcagccagactatgacctggagacctttgtgaacaaagcggaatctgctctggcccagcaagccaagcatttctcagccctgcgagatgtcatcaaggccttgcgcctggccatgcagctggaagagcaggctagcagacaaataagcagcaagaaacggccccagtgacgactgcaaataaaaatctgtttggtttgacacccagcctcttccctggccctccccagagaactttgggtacctggtgggtctaggcagggtctgagctgggacaggttctggtaaatgccaagtatgggggcatctgggcccagggcagctggggagggggtcagagtgacatgggacactccttttctgttcctcagttgtcgccctcacgagaggaaggagctcttagttacccttttgtgttgcccttctttccatcaaggggaatgttctcagcatagagctttctccgcagcatcctgcctgcgtggactggctgctaatggagagctccctggggttgtcctggctctggggagagagacggagcctttagtacagctatctgctggctctaaaccttctacgcctttgggccgagcactgaatgtcttgtactttaaaaaaatgtttctgagacctctttctactttactgtctccctagagatcctagaggatccctactgttttctgttttatgtgtttatacattgtatgtaacaataaagagaaaaaataaatcagctgtttaagtgtgtggaaaaaaaaaaaaaaaaaa

SEQ ID NO: 3100 - DNA, 1976 bp, Homo Sapiens
  NM_006850
gcttgcctgcaaacctttacttctgaaatgacttccacggctgggacgggaaccttccacccacagctatgcctctgattggtgaatggtgaaggtgcctgtctaacttttctgtaaaaagaaccagctgcctccaggcagccagccctcaagcatcacttacaggaccagagggacaagacatgactgtgatgaggagctgctttcgccaatttaacaccaagaagaattgaggctgcttgggaggaaggccaggaggaacacgagactgagagatgaattttcaacagaggctgcaaagcctgtggactttagccagacccttctgccctcctttgctggcgacagcctctcaaatgcagatggttgtgctcccttgcctgggttttaccctgcttctctggagccaggtatcaggggcccagggccaagaattccactttgggccctgccaagtgaagggggttgttccccagaaactgtgggaagccttctgggctgtgaaagacactatgcaagctcaggataacatcacgagtgcccggctgctgcagcaggaggttctgcagaacgtctcggatgctgagagctgttaccttgtccacaccctgctggagttctacttgaaaactgttttcaaaaactaccacaatagaacagttgaagtcaggactctgaagtcattctctactctggccaacaactttgttctcatcgtgtcacaactgcaacccagtcaagaaaatgagatgttttccatcagagacagtgcacacaggcggtttctgctattccggagagcattcaaacagttggacgtagaagcagctctgaccaaagcccttggggaagtggacattcttctgacctggatgcagaaattctacaagctctgaatgtctagaccaggacctccctccccctggcactggtttgttccctgtgtcatttcaaacagtctcccttcctatgctgttcactggacacttcacgcccttggccatgggtcccattcttggcccaggattattgtcaaagaagtcattctttaagcagcgccagtgacagtcagggaaggtgcctctggatgctgtgaagagtctacagagaagattcttgtatttattacaactctatttaattaatgtcagtatttcaactgaagttctatttatttgtgagactgtaagttacatgaaggcagcagaatattgtgccccatgcttctttacccctcacaatccttgccacagtgtggggcagtggatgggtgcttagtaagtacttaataaactgtggtgctttttttggcctgtctttggattgttaaaaaacagagagggatgcttggatgtaaaactgaacttcagagcatgaaaatcacactgtcttctgatatctgcagggacagagcattggggtgggggtaaggtgcatctgtttgaaaagtaaacgataaaatgtggattaaagtgcccagcacaaagcagatcctcaataaacatttcatttcccacccacactcgccagctcaccccatcatccctttcccttggtgccctccttttttttttatcctagtcattcttccctaatcttccacttgagtgtcaagctgaccttgctgatggtgacattgcacctggatgtactatccaatctgtgatgacattccctgctaataaaagacaacataactcaagtctggcagactttcttctctatttctggatgaatgcccagtgagactgtgttgtacagctagaaaaggccttcttcccaatagcaaggctgtgcatctagcctcaagctctggctgaactttgtggtcgacatcaatctaaagatacagtgtctgactataaccttgttccaaaaacctaggcaaagagtatatgtaggaggtgggatatcacttccatgacataagtgctattgcagagccgtggccacccaggaactcctgactgctttcc

SEQ ID NO: 3101 - DNA, 1743 bp, Homo Sapiens
  NM_006859
gtaatttcgacctgtcctttcccgggagttagcgatccctcaacccctgcactgcgctagtcctaaagaggaaatgtctctacgctgcggggatgcagcccgcaccctggggccccgggtatttgggagatatttttgcagcccagtcagaccgttaagctccttgccagataaaaaaaaggaactcctacagaatggaccagaccttcaagattttgtatctggtgatcttgcagacaggagcacctgggatgaatataaaggaaacctaaaacgccagaaaggagaaaggttaagactacctccatggctaaagacagagattcccatggggaaaaattacaataaactgaaaaatactttgcggaatttaaatctccatacagtatgtgaggaagctcgatgtcccaatattggagagtgttggggaggtggagaatatgccaccgccacagccacgatcatgttgatgggtgacacatgtacaagaggttgcagattttgttctgttaagactgcaagaaatcctcctccactggatgccagtgagccctacaatactgcaaaggcaattgcagaatggggtctggattatgttgtcctgacatctgtggatcgagatgatatgcctgatgggggagctgaacacattgcaaagaccgtatcatatttaaaggaaaggaatccaaaaatccttgtggagtgtcttactcctgattttcgaggtgatctcaaagcaatagaaaaagttgctctgtcaggattagatgtgtatgcacataatgtagaaacagtcccggaattacagagtaaggttcgtgatcctcgggccaattttgatcagtccctacgtgtactgaaacatgccaagaaggttcagcctgatgttatttctaaaacatctataatgttgggtttaggcgagaatgatgagcaagtatatgcaacaatgaaagcacttcgtgaggcagatgtagactgcttgactttaggacaatatatgcagccaacaaggcgtcaccttaaggttgaagaatatattactcctgaaaaattcaaatactgggaaaaagtaggaaatgaacttggatttcattatactgcaagtggccctttggtgcgttcttcatataaagcaggtgaatttttcctgaaaaatctagtggctaaaagaaaaacaaaagacctctaaaacttcaacaagaccttcaagatcacagaaatttttaaaatttgattccagttaataacagaggtggtgccagaatgcctggactgcagtggatgtgccccacctctttgcttaaaaaaaaaaatgtcaatagccaggcatagtggctcacgcctgtaatcccagcactttaggaggccaaggcgggtggatcacctgaggtcaggagttcgagaccagcctggccaacatggtgaaatcctgtctccactaaaaacacaaaaattagtcaggcgtggtagtgggtgcctgtaatcccagctactcgggaggctaaggcaggagaatcacttgaacctgggagggggaggttgcagtgagccaagatcgctccattgccctccagcctgggtgacaagagcaaaactccatctcaaataaataaaaaggaaaaaaaagtcaataaactgtacaaatttaattacagtaattcatttggcttttagtgtatcttctttgtcccaattaaacagttgcttgctgtgatgtaatcttaaaaaaaaaaaaaaaaa

SEQ ID NO: 3102 - DNA, 2343 bp, Homo Sapiens
  NM_006862
gcggggaagtggcggctgaagcgccgccggcggggctcactgtggtggtgtgagtgggaggcggcggcgctggtggctgcagctggggtgaggcgcgaggcggcgcactcgacggctgactggagcagcggtaaaggcgaggatggagaccgaaggatataagtcaaagagtacagcagaaaatgtctactgaacggacttcttggacaagcctgtccaccattcagaaaatagccctgggccttgggatcccagccagtgcaacagttgcctatatcctataccgcaggtatagggaaagcagagaagagcggctgacatttgttggggaagatgacattgagatagagatgcgggttccccaggaggctgtgaaactcatcattggccggcaaggagccaatattaaacagctgcggaaacagacaggtgctcggattgatgtggacacagaggatgtaggcgatgagcgagtgctgcttatcagtggttttcctgttcaggtgtgcaaggccaaagcagcaatccatcagatcctgacagagaataccccagtgtctgagcagctttcagttccccagagatctgtgggcagaatcatagggagaggcggcgagacaattcgttctatctgtaaggcatctggagccaaaattacctgtgacaaagaatcagaagggacattactactatcaagacttataaaaatctcaggaacacagaaggaagtggcagcagccaagcatttgatactggagaaagtttcagaagatgaagaacttcggaagagaattgctcattctgcagaaaccagggtcccacgcaaacagccaatcagtgtgagaagagaagacatgacagagccaggtggagctggagagccagcattatggaaaaacaccagttctagcatggagccgactgcacccctggtgactcctccacccaaaggaggaggcgacatggctgtggtagtgtcaaaggaaggttcctgggagaaacctagtgatgacagctttcagaagtctgaagcccaggccatcccagagatgcccatgtttgaaatccccagtcctgacttcagttttcatgctgatgagtacctagaagtctacgtttctgcttctgagcaccctaaccacttctggatccagatcgttggctcccgcagcctgcaattggataagcttgtcaatgagatgacccagcactatgagaatagtgtgcctgaagacttgactgtgcatgtaggagacattgtagcagcacctttacctacaaatggttcctggtatcgagcccgggtcctcggcaccttggagaatgggaacttggacctctattttgttgactttggagataatggagattgcccactgaaggacctcagggctctcaggagtgacttcctaagccttccatttcaagcaatagaatgtagtctggcacggattgctccctcaggtgaccagtgggaagaggaagctttggatgagtttgatagactcactcattgtgctgactggaagcctctggtagccaagatctctagctatgtccagactgggatctcaacttggccaaagatctacttatatgatactagcaatgggaagaaacttgatattgggctagaattagtacacaaaggatacgcaattgagcttcctgaagacatagaagaaaacagagctgtcccagacatgttgaaggacatggccacagaaacagatgcctctctcagcacgttgctcactgagaccaaaaagagctctggagagataacacataccctgtcctgcctcagcttatcagaagctgcttccatgtctggtgatgataaccttgaagatgactacttactctgaagtctgggcttcagtttgctcagccatctgctttgctgtatgttgcctgcaatgaactcgctgaagcatgctcagccctggaactggtgctaccagagttccgtagggaacctttactctttagaggttccctgatataaatcattcataagacttcctaccctggaaaatgagtaatgtctcattcttacctgcagtttgttactatgtataaaagtctttttctttaatatgcctttaagtcttacctgtttacagcccattctgatgggttctttgtcattctgttagtataacccagtacttttcctgctgcctggaatgccctcttctatgttacctattctgtccgttgagatcccccaacttgggccaaagccaagagatctatgtgccttctctggttttctccacatctatagcacctcaactgaaatatatggataaaaacagcctaacaaaaaaaaaaaaaaaa

SEQ ID NO: 3103 - DNA, 2840 bp, Homo Sapiens
  NM_006864
atgacaagaaggacccagcctccgagcggccacaccctgtgtgtctctctgtcctgccagcactgagggctcatccctctgcagagcgcggggtcaccgggaggagacgccatgacgcccgccctcacagccctgctctgccttgggctgagtctgggccccaggacccgcgtgcaggcagggcccttccccaaacccaccctctgggctgagccaggctctgtgatcagctgggggagccccgtgaccatctggtgtcaggggagccaggaggcccaggagtaccgactgcataaagagggaagcccagagcccttggacagaaataacccactggaacccaagaacaaggccagattctccatcccatccatgacagagcaccatgcagggagataccgctgccactattacagctctgcaggctggtcagagcccagcgaccccctggagatggtgatgacaggagcctacagcaaacccaccctctcagccctgcccagccctgtggtggcctcaggggggaatatgaccctccgatgtggctcacagaagggatatcaccattttgttctgatgaaggaaggagaacaccagctcccccggaccctggactcacagcagctccacagtcgggggttccaggccctgttccctgtgggccccgtgacccccagccacaggtggaggttcacatgctattactattatacaaacaccccctgggtgtggtcccaccccagtgaccccctggagattctgccctcaggcgtgtctaggaagccctccctcctgaccctgcagggccctgtcctggcccctgggcagagcctgaccctccagtgtggctctgatgtcggctacaacagatttgttctgtataaggagggggaacgtgacttcctccagcgccctggccagcagccccaggctgggctctcccaggccaacttcaccctgggccctgtgagcccctccaatgggggccagtacaggtgctacggtgcacacaacctctcctccgagtggtcggcccccagcgaccccctgaacatcctgatggcaggacagatctatgacaccgtctccctgtcagcacagccgggccccacagtggcctcaggagagaacgtgaccctgctgtgtcagtcatggtggcagtttgacactttccttctgaccaaagaaggggcagcccatcccccactgcgtctgagatcaatgtacggagctcataagtaccaggctgaattccccatgagtcctgtgacctcagcccacgcggggacctacaggtgctacggctcatacagctccaacccccacctgctgtctcaccccagtgagcccctggagctcgtggtctcaggacactctggaggctccagcctcccacccacagggccgccctccacacctggtctgggaagatacctggaggttttgattggggtctcggtggccttcgtcctgctgctcttcctcctcctcttcctcctcctccgacgtcagcgtcacagcaaacacaggacatctgaccagagaaagactgatttccagcgtcctgcaggggctgcggagacagagcccaaggacaggggcctgctgaggaggtccagcccagctgctgacgtccaggaagaaaacctctatgctgccgtgaaggacacacagtctgaggacagggtggagctggacagtcagagcccacacgatgaagacccccaggcagtgacgtatgccccggtgaaacactccagtcctaggagagaaatggcctctcctccctcctcactgtctggggaattcctggacacaaaggacagacaggtggaagaggacaggcagatggacactgaggctgctgcatctgaagcctcccaggatgtgacctacgcccagctgcacagcttgacccttagacggaaggcaactgagcctcctccatcccaggaaggggaacctccagctgagcccagcatctacgccactctggccatccactagcccggggggtacgcagaccccacactcagcagaaggagactcaggactgctgaaggcacgggagctgcccccagtggacaccagtgaaccccagtcagcctggacccctaacacagaccatgaggagacgctgggaacttgtgggactcacctgactcaaagatgactaatatcgtcccattttggaaataaagcaacagacttctcaacaatcaatgagttaataacaaaaaaacaaaaaacaaaaacagacgtaaaggccgggtgtggtactcaggaggctgagtggggaggattccttgaacacaagaagttaaggctgctgaggctgcagtgagctatgactgtgccactgcactccagcctgtgtgacagagcgagaccttgtctctaaaaaaaaaaacagtgaatgttttaaactgaatgataatgtaaatattatacatcgaacttatgacatgggaaaattaagaagcataaataggccgggcgcggtggctcacgcctataatctcagcactttgggaggctgatgcgggcggatcatgaggtcaggagatcgagaccatcctggctaacacggtgaaaccccgtctctactaaaaatacaaaaaaattagccgggcgtggtggcgagtgcctatagtcccagctactcaggaggctgaggcaggagaatggcatgagcccgggaggcagagcttgcagtgagctgagatcgcaccactgcactccagcctgggcgacagagtgagattccgtctcgaaaaaaaaaaaaaaagaaagaaaaaaaataaaaaagaagcataaccaggaaaaaaaaaaaaaaaaaa

SEQ ID NO: 3104 - DNA, 1651 bp, Homo Sapiens
  NM_006865
gagcctccaagtgtccacaccctgtgtgtcctctgtcctgccagcaccgagggctcatccatccacagagcagtgcagtgggaggagacgccatgacccccatcctcacggtcctgatctgtctcgggctgagcctggaccccaggacccacgtgcaggcagggcccctccccaagcccaccctctgggctgagccaggctctgtgatcacccaagggagtcctgtgaccctcaggtgtcaggggagcctggagacgcaggagtaccatctatatagagaaaagaaaacagcactctggattacacggatcccacaggagcttgtgaagaagggccagttccccatcctatccatcacctgggaacatgcagggcggtattgctgtatctatggcagccacactgcaggcctctcagagagcagtgaccccctggagctggtggtgacaggagcctacagcaaacccaccctctcagctctgcccagccctgtggtgacctcaggagggaatgtgaccatccagtgtgactcacaggtggcatttgatggcttcattctgtgtaaggaaggagaagatgaacacccacaatgcctgaactcccattcccatgcccgtgggtcatcccgggccatcttctccgtgggccccgtgagcccaagtcgcaggtggtcgtacaggtgctatggttatgactcgcgcgctccctatgtgtggtctctacccagtgatctcctggggctcctggtcccaggtgtttctaagaagccatcactctcagtgcagccgggtcctgtcgtggcccctggggagaagctgaccttccagtgtggctctgatgccggctacgacagatttgttctgtacaaggagtggggacgtgacttcctccagcgccctggccggcagccccaggctgggctctcccaggccaacttcaccctgggccctgtgagccgctcctacgggggccagtacacatgctccggtgcatacaacctctcctccgagtggtcggcccccagcgaccccctggacatcctgatcacaggacagatccgtgccagacccttcctctccgtgcggccgggccccacagtggcctcaggagagaacgtgaccctgctgtgtcagtcacagggagggatgcacactttccttttgaccaaggagggggcagctgattccccgctgcgtctaaaatcaaagcgccaatctcataagtaccaggctgaattccccatgagtcctgtgacctcggcccacgcggggacctacaggtgctacggctcactcagctccaacccctacctgctgactcaccccagtgaccccctggagctcgtggtctcaggagcagctgagaccctcagcccaccacaaaacaagtccgactccaaggctggtgagtgaggagatgcttgccgtgatgacgctgggcacagagggtcaggtcctgtcaagaggagctgggtgtcctgggtggacatttgaagaattatattcattccaacttgaagaattattcaacacctttaacaatgtatatgtgaagtactttattctttcatattttaaaaataaaagataattatccatgagaaaaaaaaaaaaaaaaaaaaaaaaaaaaaaaaaaaaaaaaaaaaaaaaaa

SEQ ID NO: 3105 - DNA, 4009 bp, Homo Sapiens
  NM_006868
ggccggcggccacgtgacccaccgcggcggggccggcggcccagaaatagcagcggcggcggttccgcccgcgggcggcgcgagcgaggggcagaggcgagagacgccggcggggcgcgggcgcggcggccccggaggatgctgctgagccccggcactgcctggctgcgagcacatgatggcgatacgggagctcaaagtgtgccttctcggggacactggggttgggaaatcaagcatcgtgtgtcgatttgtccaggatcactttgaccacaacatcagccctactattggggcatcttttatgaccaaaactgtgccttgtggaaatgaacttcacaagttcctcatctgggacactgctggtcaggaacggtttcattcattggctcccatgtactatcgaggctcagctgcagctgttatcgtgtatgatattaccaagcaggattcattttataccttgaagaaatgggtcaaggagctgaaagaacatggtccagaaaacattgtaatggccatcgctggaaacaagtgcgacctctcagatattagggaggttcccctgaaggatgctaaggaatacgctgaatccataggtgccatcgtggttgagacaagtgcaaaaaatgctattaatatcgaagagctctttcaaggaatcagccgccagatcccacccttggacccccatgaaaatggaaacaatggaacaatcaaagttgagaagccaaccatgcaagccagccgccggtgctgttgacccaagggccgtggtccacggtacttgaagaagccagagcccacatcctgtgcactgctgaaggaccctacgctcggtggcctggcacctcactttgagaagagtgagcacactggctttgcatcctggaagacctgcagggggcggggcaggaaatgtacctgaaaaggattttagaaaaccctgggaaaacccaccacaccaccacaaaatggcctttagtgtatgaaatgcacatggaggggatgtagttgcatttttgctaaaaaaaaaaaaaaacctttaaaaattgttggatgtgtacaaaagtcttactgccttattatgtgtatgggattctaaagtggcattccacttggatttcctgtgctacctatccaaattccagtaactacttcagtgtcattgcctttgttacctaaccaaccttcactgaaaggcaaatttagttcaggaggttagtttttagctagctttggaagtaagcctttatttattactttttggaggaaatcagagaagtgtcaatggaccgtcactcagactgagacttgagttattacagaagccaggaaaagtgtattagaaactgttgtctacaccacttttaattggtgaacaatttttctaagttatggtcatatatacccaaacaaaccaaatcaaactaaattactgcatataattttgggattgggtggcctagtttgaaagagtgatttaagtaatcactatgtaagtggtgagagatgcaggacatacacattattcaagagaccacctgacatgcatctcctccgcaggaatacattcgtcctctcttagagaagtttaacgcacatagtattattttactaagagaatatctcttggtgtcatatctaggggaagagaattaactagaattaaatttaatgtttgaatctaaatcattgggcaaacttctaataataacaattaataataggttacaggaaagccagccagaggaagtgtcagcactttaaaattctagaccccaaaaaactacaaaatcagaaaaagtatttttatgtttctagcttgaggagaagggctttagggctaaccagaggtctgaccctagaatgccaaggaactgagaatgggctccgatgaaaaccttccttttcagattccctgtctgctcaattaaagatgtttgaatccaaaggaagtcaaggaagaaaaagcatggaaaggaagagaactgattcctactgaaaattcaaattctattaccattctaactttcataaaaagttgggatcaagaagcagctgatttcctgccagggcttatattagggggtgattcttaaaggacattaggattggtgctcagaaatggttaatcatgctgtgtgctagccagggccagctggtaccttctttgccatgagcattcaagggacggctaacctttattgacaatctatatcgcaaaagtcaggaaagaggttgtgagctgattggattaaagacctggcacttcagtaactcagcacgcttccacttcactcaacttaagagagttcattgacagtgttaggatgtgaaggctgggaaacacttattttgcttcaagagttccacttggctctcccaaataggtacctcaaaaactgttagcaagcggcatttggatgtcttgacaggggctttgcagggatttttagggttttttccacattgtccacattaatggttggcatgattgtgcttgcaggccaagaaatgatcataccccttgccaaaggtaaaaaaaaaaaaaaaaaaatgagttgaaaattgaagtgacctctttccagctgagttgcaggcttattttgtaacctttcctcatccagttttccctgagaacctgggtttatctctagatagctgttcaggttttttagctgaggggtaagtatcctagctgagagttttgcatctttgggctgggtttgcagtggttgtgttttgcataaaatgtctagtctttgccacagatagtgagctacccactaatgagcccatggttttatttcagaagcacatgagggtgtgaaaccactctgttacctttctgtattgtcttagctattcaagccagtcagaggataatatatatattctcatcagcactcagagtagtcagtgaagagagtagatcacacttgggcacaccaggattcacataaacattgtatcttctctgtggatgctcaggccttgtctacaatgaggctttacaaccttcctttgttttggctcgggattacttcctggctgtctaataattgaaccataaccatgtaatattatgtaaaggcctggaaattactgttgctaaaaaaagtcatgtagtttcatgtagtgtagcatccttggcatcgttttccaaaatttgttccttctcccttttttttttctttcgtgtgtggcatgagtgtgtatctgtgtaaatatgattgtatatgtgttactccgatatgtaatccatttcactggctgagtttggcccctagccatgtgttaatataaagtaggcatggcttcccaatggaaatctctgagaatgacagtggagttgtgcaagcattttacattgccacataattgacttgccattttatggttaaaaacggcacattaggcagttgaatatgacgttaccttgcagactaaaaggttgaaggcccgaaactaacttttagctaacaataagggctgtgccccaatggaaactgagttcattttctgagaaaggtttggatgactgaaatatttcctctacagtcaaggactttggcatgtggtggctgaaactgagcttttttgtgtgggctccagttctcactgttctgcaatgctcatggcaagttgaatggtgagctagcttataaattaaagagctctgaactgtattcagaccgactgggtatctagcttactgttttaacatcattgttgaaaccagaccctgtagtccagtggtgctgccctgttgtgcaaactgctcctttttctcgtgtttttgtaaagagcttccatctgggctggacccagttcttgcacatacaagacaccgctgcagtcagctaggacctttccgccatgtattctattctgtagtaaagcatttccatcaacaatgcctaattgtatctgttatttttggtttaacacacactgattcatactaataaatattttcagttttaccgttaaaaaaaaaaaaaaa

SEQ ID NO: 3106 - DNA, 1614 bp, Homo Sapiens
  NM_006870
gggaagctcccctccgagactctggatagccgccgggggggcgttgcctggccggctggttgcgtagcaacggcaggcggtgcgtgacgtgcgcagccgcgttccgtcctgaggcgcgcccgccccggggtaagctcgcgccgccgcgtcagctcagcgctgggtctctcggtcccgcagccgtgaggaggacggtctgcatactcgctgcccgccggctccctcccccgcgtccctgcgaccgccgcggcgaagatggcctcaggagtgcaagtagctgatgaagtatgtcgcattttttatgacatgaaagttcgtaaatgctccacaccagaagaaatcaagaaaagaaagaaggctgtcattttttgtctcagtgcagacaaaaagtgcatcattgtagaagaaggcaaagagatcttggttggagatgttggtgtaaccataactgatcctttcaagcattttgtgggaatgcttcctgaaaaagattgtcgctatgctttgtatgatgcaagctttgaaacaaaagaatccagaaaagaagagttgatgttttttttgtgggcaccagaactagcacctctgaaaagtaaaatgatctatgcaagctccaaggatgcaattaaaaagaaatttcaaggcataaaacatgaatgtcaagcaaatggaccagaagatctcaatcgggcttgtattgctgaaaagttaggtggatccttaattgtagcctttgaaggatgccctgtgtagattattcagtgccacaaattgaaagcttccatgtttaatgttatcctcttgctatataaataaagcaaatatatttaggccagggtctcactgagggggagctgtcttgtcatcttttagagtaaactattctataaacatatgcaaacagccctaaataaatctaaagtctaaagttttattgatgtgaaattaaattcttattggccaaatgcctgttttgatgagttgatttataaagatttttgttaagctcaggattttaaattacacagttcacaaacagtaaaggccatgtgaagagaattattacatctttattaacctcagcatttactttgtttcttttgcttaggaaattgctcataatctggttataattttggtccaaattctttattcttccttgagctaagcagaataatggaatataatatgtcttcataatataacaacactaatacactaatagtaagattaagttaggcagtcttctaccaaatgtgtaatggagattgcctcaaaattgtgtccacataatccacgctcatcttgcaaagcgctatttcaggcacatcattggaatacaggaagtagccctgcacctgccagtgagctcgccattcactgattggaagagtgacctggcatcttggaaatcattgtgtgtcttcaggagaatgtgcagtgtcttgtaacaactaattataatgcaaattagggctacattgtaatctgctttgttaatgaaaatgataaaacagaatattgacaagctaggacacctgtggtatctttaattgtatctccttcagaagtttgcttcttatggtataataaagtatggaagaatattgagta

SEQ ID NO: 3107 - DNA, 1940 bp, Homo Sapiens
  NM_006871
gcgggactgtagaggcgcctataagggaagttgttcagtcaactcggaaaaagggtaacaacccggaaagtagactcaccgtcttggtctagagactgacccctgcacagacagaccccttcccctctctgcgaaaggaccaagccccagaagtcactccatctcctacggctcgcaatttccagaggccccctggcaccttccagcctgatgtcgtgcgtcaagttatggcccagcggtgcccccgcccccttggtgtccatcgaggaactggagaaccaggagctcgtcggcaaaggcgggttcggcacagtgttccgggcgcaacataggaagtggggctacgatgtggcggtcaagatcgtaaactcgaaggcgatatccagggaggtcaaggccatggcaagtctggataacgaattcgtgctgcgcctagaaggggttatcgagaaggtgaactgggaccaagatcccaagccggctctggtgactaaattcatggagaacggctccttgtcggggctgctgcagtcccagtgccctcggccctggccgctcctttgccgcctgctgaaagaagtggtgcttgggatgttttacctgcacgaccagaacccggtgctcctgcaccgggacctcaagccatccaacgtcctgctggacccagagctgcacgtcaagctggcagattttggcctgtccacatttcagggaggctcacagtcagggacagggtccggggagccagggggcaccctgggctacttggccccagaactgtttgttaacgtaaaccggaaggcctccacagccagtgacgtctacagcttcgggatcctaatgtgggcagtgcttgctggaagagaagttgagttgccaaccgaaccatcactcgtgtacgaagcagtgtgcaacaggcagaaccggccttcattggctgagctgccccaagccgggcctgagactcccggcttagaaggactgaaggagctaatgcagctctgctggagcagtgagcccaaggacagaccctccttccaggaatgcctaccaaaaactgatgaagtcttccagatggtggagaacaatatgaatgctgctgtctccacggtaaaggatttcctgtctcagctcaggagcagcaataggagattttctatcccagagtcaggccaaggagggacagaaatggatggctttaggagaaccatagaaaaccagcactctcgtaatgatgtcatggtttctgagtggctaaacaaactgaatctagaggagcctcccagctctgttcctaaaaaatgcccgagccttaccaagaggagcagggcacaagaggagcaggttccacaagcctggacagcaggcacatcttcagattcgatggcccaacctccccagactccagagacctcaactttcagaaaccagatgcccagccctacctcaactggaacaccaagtcctggaccccgagggaatcagggggctgagagacaaggcatgaactggtcctgcaggaccccggagccaaatccagtaacagggcgaccgctcgttaacatatacaactgctctggggtgcaagttggagacaacaactacttgactatgcaacagacaactgccttgcccacatggggcttggcaccttcgggcaaggggaggggcttgcagcaccccccaccagtaggttcgcaagaaggccctaaagatcctgaagcctggagcaggccacagggttggtataatcatagcgggaaataaagcaccttccaagcttgcctccaagagttacgagttaaggaagagtgccaccccttgaggcccctgacttccttctagggcagtctggcctgcccacaaactgactttgtgacctgtcccccaggagtcaataaacatgatggaatgctagtcaaaaaaaaaaaaaaaaaaaa

SEQ ID NO: 3108 - DNA, 3171 bp, Homo Sapiens
  NM_006874
gttgccagctgcggcggccgccacagccacagccgccgccgccgccgccgccgcccctgcccctgccgcccctgcccctgccgttaggtggtggggtttctcagcccggcggcgggaggcgggccggcctcggcttcctgtcggaggacgcgcaaggatccgggcgtcggagtgtgtgcgagtgcgtgagtgtgtgtcggtcgcacggcgtgtgtctccggccgcgggttccgcctcctcccctgccgccgctgctcacggtgtaagtcaatgtgaagcagcagctccagccccgggataaacatggcgacgtctctgcatgagggacccacgaaccagctggatctgctcatccgggccgtggaagcatcagttcacagcagtaatgcacactgtacagataagacaattgaagctgctgaagccctgcttcatatggaatctcctacctgcttgagggattcaagaagtcctgtggaagtgtttgttcctccttgtgtatcaactccagaattcatccatgctgctatgaggccagatgtcattacagaaactgtagtggaggtgtcaactgaagagtctgaacccatggatacctctcctattccaacatcaccagatagccatgaaccaatgaaaaagaaaaaagttggccgtaaaccaaagacccagcaatcaccaatttccaatgggtctcctgagttaggtataaagaagaaaccaagagaaggaaaaggaaacacaacctatttgtgggagtttcttttagatctacttcaagataaaaatacttgtcccaggtatattaaatggactcagagagaaaaaggcatattcaagctggtggattcaaaggctgtctctaagctttggggaaagcataagaacaaaccagacatgaactatgaaaccatgggacgagctttgagatactactaccaaaggggaattcttgcaaaggttgaaggacagaggcttgtatatcagttcaaggatatgccgaaaaacatagtggtcatagatgatgacaaaagtgaaacctgtaatgaagatttagcaggaactactgatgaaaaatcattagaacgagtgtcactgtctgcagaaagtctcctgaaagcagcatcctctgttcgcagtggaaaaaattcatcccctataaactgctccagagcagagaagggtgtagctagagttgtgaatatcacttcccctgggcacgatgcttcatccaggtctcctactaccactgcatctgtgtcagcaacagcagctccaaggacagttcgtgtggcaatgcaggtacctgttgtaatgacatcattgggtcagaaaatttcaactgtggcagttcagtcagttaatgcaggtgcaccattaataaccagcactagtccaacaacagcgacctctccaaaggtagtcattcagacaatccctactgtgatgccagcttctactgaaaatggagacaaaatcaccatgcagcctgccaaaattattaccatcccagctacacagcttgcacagtgtcaactgcagacaaagtcaaatctgactggatcaggaagcattaacattgttggaaccccattggctgtgagagcacttacccctgtttcaatagcccatggtacacctgtaatgagactatcaatgcctactcagcaggcatctggccagactcctcctcgagttatcagtgcagtcataaaggggccagaggttaaatcggaagcagtggcaaaaaagcaagaacatgatgtgaaaactttgcagctagtagaagaaaaaccagcagatggaaataagacagtgacccacgtagtggttgtcagtgcgccttcagctattgcccttcctgtaactatgaaaacagaaggactagtgacatgtgagaaataaaatagcagctccaccatggacttcaggctgttagtggcagtactgacataaacatttgcaagggaagtcatcaagaaaagtcaaagaagactttaaaacatttttaatgcatatacaaaaacaatcagacttactggaaataaattacctatcccatgtttcagtgggaaatgaactacatattgagatgctgacagaaaactgcctcttacagtaggaaacaactgaacccatcaataagaaaaaggatcgaaagggaccaagcagctcactacgatatcaagttacactaagacttggaacactaacattctgtaagaggttatatagttttcagtgggaggggttgggatgggtaatctcattgttacatatagcaatttttgatgcattttatatgcataccagcaattattactgtgttcgcacagttctcacttaactggtgctatgtgaagactctgctaatataggtattttagaatgtgaattgaagaatggatcccaaaaacttcagaaagaggatagcaaaaaaagatctagtgcgattttatatatatatatatatatatatacatacatatatatatatcatatagcttaagctgatttaaaacaaaggccttagactaattttcgattttctttcttgaaataagctaatggcttgtttgtgtaaagcttttttattaaaagaaaaattttaaaaatcttgtacctagcacagtattgttatagaatatacatgtaacattttatatggtagtttaagtctgtcagtttcttaattgtggacaaattaacagttggctctggccttttgctgtaacatgcctgtgtcactcacttagccttggcatttgtgcagacataccattttcagttctgctgtcacttggaagttcaggctcagcatgaatttttggcaggtagctctaatacctggagttttctttgtttttttttcttttttttagttgaagtttatgagggaaataccagtgttcagttttgaactataatagtttgtatattcaacatttgaagtatattctattttgttgtactcttgtttcaaagtgtattcaagtaggttttctgaaatatagaaatgaaatttatcttctgttttggtctctggtgatattttaaacaatatttaaaagtcagtatagaagtgttttagttaggaagtgataaaacatctctcttctccttcccaactactgcatgaagaaattctacttccattatattaatatttgg

SEQ ID NO: 3109 - DNA, 2077 bp, Homo Sapiens
  NM_006876
gcggcgggcggggcggcgctcggggctcggctggcctcggctcgcctcggctgcgctcggcaggctgcggtaaatccgggcttgcggccgctggcgtagtctgtggccgggtggtcgttgctgcgcgccccgagccccgagagccatgcagatgtcctacgccatccggtgcgccttctaccagctgctgctggccgcgctcatgctggtggcgatgctgcagctgctctacctgtcgctgctgtccggactgcacgggcaggaggagcaagaccaatattttgagttctttcccccgtccccacggtccgtggaccaggtcaaggcgcagctccgcaccgcgctggcctctggaggcgtcctggacgctagcggcgattaccgcgtctacaggggcctgctgaagaccaccatggaccccaacgatgtgatcctggccacgcacgccagcgtggacaacctgctgcacctgtcgggtctgctggagcgctgggagggcccgctgtccgtgtcggtgttcgcggccaccaaggaggaggcgcagctggccacggtgctggcctacgcgctgagcagccactgccccgacatgcgcgccagggtcgccatgcacctcgtgtgcccctcgcgttacgaggcagccgtgcccgacccccgggagccgggggagtttgccctgctgcggtcctgccaggaggtctttgacaagctagccagggtggcccagcccgggattaattatgcgctgggcaccaatgtctcctaccccaataacctgctgaggaatctggctcgtgagggggccaactatgccctggtgatcgatgtggacatggtgcccagcgaggggctgtggagaggcctgcgggaaatgctggatcagagcaaccagtggggaggcaccgcgctggtggtgcctgccttcgaaatccgaagagcccgccgcatgcccatgaacaaaaacgagctggtgcagctctaccaggttggcgaggtgcggcccttctattatgggttgtgcaccccctgccaggcacccaccaactattcccgctgggtcaacctgccggaagagagcttgctgcggcccgcctacgtggtaccttggcaggacccctgggagccattctacgtggcaggaggcaaggtgcccaccttcgacgagcgctttcggcagtacggcttcaaccgaatcagccaggcctgcgagctgcatgtggcggggtttgattttgaggtcctgaacgaaggtttcttggttcataagggcttcaaagaagcgttgaagttccatccccaaaaggaggctgaaaatcagcacaataagatcctatatcgccagttcaaacaggagttgaaggccaagtaccccaactctccccgacgctgctgagcccttccctcccctaatctgagaagtcagcctcttggctcctcaggccaccatttaggcctgactggggtaagaaatgtcgctccactttacagaggtagctgtggtgttgaaacactggacttggatatggggtgctgggatcgattcctagctttaccactaactagctgtgtggccttgagtaaatcccgttacctctctgagcctcggttaccctgtctgtaaaaagggaggtgagaatacctacctcacggaactgttgggaggctcagatgagatgctatatgtgaaaacattctgtaagcttcgtacaaatgtgaagtattaatattatcgcagtattattgttgttattattattgttattattaacaatcttgggtgggtagtaggagagcaaaaagtatgaatgggatggagctaagaagtctgaatacttaatgaaatggactttttggaaagaaatcagatgaaggcataaaatttagttcttagctcttgaacagaagcctaaaattcctggttctctcagggcttcgccttcaagggttctggaggagggaagggtctgcaggttccatgggtgacagcctgagatctgtcccttcaacgggctgggctgggtatgtgcctaccgatgacaatgtgtaaataaatgcgtgttcacacccacaaaaaaaa

SEQ ID NO: 3110 - DNA, 16064 bp, Homo Sapiens
  NM_006885
ccgcgcgtccctgtgcgtccccgggtccctgcgggcgggcgggcgcggtcgccgccgagcaacccggcctgcgcccggcacgactgtagatgtcaggctttgcccggggagccgagcggcagcggggctgtgagtttcaaattaaccttccgctttgttgctgtgtaatgtggatccccgaaggccccccgccccgcccgccccccttccccgggcggtgcgcgctgcaaactgcgagttgggcttcatttacataaagcgattccgggcgggcggcggcagaggaggaggcggcggcggcgggcaggccggggacccggacgccagcgccgcgccccgtgggtgaatccccgccgcgtcccggggacctccctccggggacgggccgaccgccagccctgccgccaccatgagctcccctcccctgtctccgggccccctgctcctgaccagagccacctccgagtcctggggccagcgggaggtggggagcatgccgcctggggtgggtgagctcggggctcgggtgccactggaatttcccgttgttgcgcatggcggcgcggcccccggacctgcaagtgccgcctccctccggaggtgcgcggaggcttggtgtgccaggtccgagcctccgtactgggtgcaatgaaagctccacgcaggccttaccatggaaggctgtgactcgcccgtcgtctcggggaaggacaatgggtgcggtatccctcagcaccagcaatggactgaactcaacagcacccacctccctgacaaacccagtagcatggagcagtccacaggcgagagccacgggcccttggacagcctgagggcccccttcaatgagcgcctcgcggagagcaccgcgtcggccgggcccccctccgagcccgccagcaaggaggtcacctgcaacgaatgttcggcctcctttgccagcctccagacctacatggagcaccactgccccagcgcgcgccccccgccacccctgagagaggagagcgccagcgacaccggtgaggagggggacgaggagagtgacgtggagaacctggccggggagatcgtctaccagccggacggctccgcgtacattgtggagagcctgagccagctgacccagggcgggggcgcctgtgggagtggcagtggcagtgggcctctcccctcgcttttcctgaactctctccctggcgcggggggcaagcaaggggacccttcgtgtgctgcacccgtgtacccgcagatcatcaacactttccacatagcctcatccttcgggaaatggtttgagggcccagaccaggctttcccgaatacctcagccctggcggggctcagccccgtcctgcacagcttccgcgtgtttgacgtgcgacacaaaagcaacaaggattacctgaacagcgacggttctgccaaaagctcctgcgtatccaaagatgttcccaacaatgtggacctgtccaaattcgatggctttgtgctctatggcaagaggaagcccatcctgatgtgtttcttgtgcaaactctcctttgggtacgtccgttcgtttgtgacccacgcggtgcatgaccatcgaatgaccctgagcgaagacgagcggaaaattcttagcaataagaacatctccgctatcatccaagggatcggcaaagacaaggaaccccttgtaagttttctggaaccaaaaaacaaaaactttcaacaccctttagtttccacagctaacctcataggccccggacacagtttttatggtaaatttagtggcattcgaatggaaggggaggaagctctcccagcgggctccgccgctggccccgagcagccccaggctggtctcttgacccccagcaccctgttgaaccttggcgggctcaccagctcggtactgaagacccccattacctcagtccccctggggcctctggcttccagtcctaccaaatcctcagagggcaaggactctggggcggcagaaggagagaagcaggaagtgggcgacggggattgcttctctgagaaggtagagccagccgaagaggaggcggaggaggaagaggaggaggaagaggcggaggaggaggaggaagaagaggaggaggaagaagaggaggaggaagacgagggttgcaaaggactctttccaagcgagttggatgaggaactggaggacaggccccatgaggagcctggggccgcagcaggtagtagcagcaaaaaggaccttgctctctcaaaccaaagcatttctaactcccccttaatgcctaacgtgctccagaccctgtcgaggggcacagcttctactagttctaattctgcttcttcctttgttgtctttgatggtgcgaacaggaggaatcgtttaagctttaacagtgagggcgtcagggccaatgtggcagagggcggcaggaggctggacttcgctgacgaaagtgccaataaagacaatgccacagcaccagaaccaaatgaaagcacagagggtgacgatgggggcttcgttccccatcaccagcacgctggctccctctgcgagcttggggttggggagtgcccctcggggagtggcgtggagtgccccaaatgcgacacggtcctgggctcctcccgctcgctgggcggccacatgaccatgatgcattctcgtaactcgtgtaagacactcaagtgccccaagtgcaactggcactataagtaccagcagaccctggaggcacacatgaaggagaagcacccggagccggggggctcctgtgtctactgcaaaagcgggcagccccacccccggctggcacgaggcgagagctacacgtgtggttacaagcctttccgctgcgaggtgtgtaactactccacaactaccaaaggcaacctcagtattcatatgcagtctgacaagcatctcaacaacatgcagaacctgcagaatggagggggggagcaggtcttcagccacactgccggggcggcggcggcggcggtggctgcggcggcggcggcagccaatatcagtagctcctgcggggccccctcgccgaccaaaccaaaaaccaaacccacctggcggtgcgaggtgtgtgattatgagaccaacgtggccaggaacctccgcattcacatgaccagtgagaagcacatgcataacatgatgttactgcaacagaacatgacccagatccaacacaaccgccacctgggcctcggcagcctgccctcacccgccgaggccgagctctaccaatactacctggcccagaacatgaacctgcccaacctgaagatggacagtgctgcctcggacgcccagttcatgatgagcggattccagctggatcccgccgggcccatggccgccatgacgcctgctctagtgggcggtgagatccccctagacatgcggctcgggggcgggcagctggtgtcagaggagctgatgaacctgggcgagagcttcatccagaccaacgacccgtcgctgaagctcttccagtgcgccgtctgcaacaagttcacgacggacaacctggacatgctgggcctgcacatgaacgtggagcgcagcctgtcggaggacgagtggaaggcggtgatgggggactcataccagtgcaagctctgccgctacaacacccagctcaaggccaacttccagctgcactgcaagacagacaagcacgtgcagaagtaccagctggtggcccacatcaaggagggcggcaaggccaacgagtggaggctcaagtgtgtggccatcggcaaccccgtgcacctcaagtgcaacgcctgtgactactacaccaacagcctggagaagctgcggctgcacacggtcaactccaggcacgaggccagcctgaagttgtacaagcacctgcagcagcatgagagtggtgtagaaggtgagagctgctactaccactgcgttctgtgcaactactccaccaaggccaagctcaacctcatccagcatgtgcgctccatgaagcaccagcgaagcgagagcctgcgaaagctgcagcggctgcagaagggccttccagaggaggacgaggacctggggcagatcttcaccatccgcaggtgcccctccacggacccagaagaagccattgaagatgttgaaggacccagtgaaacagctgctgatccagaggagcttgctaaggaccaagagggcggagcatcgtccagccaagcagagaaggagctgacagattctcctgcaacctccaaacgcatctccttcccaggtagctcagagtctcccctctcttcgaagcgaccaaaaacagctgaggagatcaaaccggagcagatgtaccagtgtccctactgcaagtacagtaatgccgatgtcaaccggctccgggtgcatgccatgacgcagcactcggtgcaacccatgcttcgctgccccctgtgccaggacatgctcaacaacaagatccacctccagctgcacctcacccacctccacagcgtggcacctgactgcgtggagaagctcattatgacggtgaccacccctgagatggtgatgccaagcagcatgttcctcccagcagctgttccagatcgagatgggaattccaatttggaagaggcaggaaagcagcctgaaacctcagaggatctgggaaagaacatcttgccatccgcaagcacagagcaaagcggagatttgaaaccatcccctgctgacccaggctctgtgagagaagactcaggcttcatctgctggaagaaggggtgcaaccaggttttcaaaacttctgctgcccttcagacgcattttaatgaagtgcatgccaagaggcctcagctgccggtgtcagatcgccatgtgtacaagtaccgctgtaatcagtgtagcctggccttcaagaccattgaaaagttgcagctccattctcagtaccatgtgatcagagctgccaccatgtgctgtctttgtcagcgcagtttccgaactttccaggctctgaagaagcaccttgagacaagccacctggagctgagtgaggctgacatccaacagctttatggtggcctgctggccaatggggacctcctggcaatgggagaccccactctggcagaggaccataccataattgttgaggaagacaaggaggaagagagtgacttggaagataaacagagcccaacgggcagtgactctgggtcagtacaagaagactcgggctcagagccaaagagagctctgcctttcagaaaaggtcccaattttactatggaaaagttcctagacccttctcgcccttacaagtgtaccgtctgcaaggaatctttcactcaaaagaatatcctgctagtacactacaattctgtctcccacctgcataagttaaagagagcccttcaagaatcagcaaccggtcagccagaacccaccagcagcccagacaacaaaccttttaagtgtaacacttgtaatgtggcctacagccagagttccactctggagatccatatgaggtctgtgttacatcaaaccaaggcccgggcagccaagctggaggctgcaagtggcagcagcaatgggactgggaacagcagcagtatttccttgagctcctccacgccaagtcctgtgagcaccagtggcagtaacacctttaccacctccaatccaagcagtgctggcattgctccaagctctaacttactaagccaagtgcccactgagagtgtagggatgccacccctggggaatcctattggtgccaacattgcttccccttcagagcccaaagaggccaatcggaagaaactggcagatatgattgcatccaggcagcagcaacaacagcagcagcaacagcaacaacaacaacaacaacaacaacaacaagcacaaacgctggcccaggcccaggctcaagttcaagctcacctgcagcaggagctgcagcaacaggctgccctgatccagtctcagctgtttaaccccaccctccttcctcacttccccatgacaactgagaccctgctgcaactacagcagcagcagcacctcctcttccctttctacatccccagtgctgagttccagcttaaccccgaggtgagcttgccagtgaccagtggggcactgacactgactgggacaggcccaggcctgctggaagatctgaaggctcaggttcaggtcccacagcagagccatcagcagatcttgccgcagcagcagcagaaccaactctctatagcccagagtcactctgccctccttcagccaagccagcaccccgaaaagaagaacaaattggtcatcaaagaaaaggaaaaagaaagccagagagagagggacagcgccgaggggggagagggcaacaccggtccgaaggaaacactgccagatgccttgaaggccaaagagaagaaagagttggcaccagggggtggttctgagccttccatgctccctccacgcattgcttcagatgccagagggaacgccaccaaggccctgctggagaactttggctttgagttggtcatccagtataatgagaacaagcagaaggtgcagaaaaagaatgggaagactgaccagggagagaacctggaaaagctcgagtgtgactcctgcggcaagttgttttccaacatcttgattttaaagagtcatcaagagcacgttcatcagaattactttcctttcaaacagctcgagaggtttgccaaacagtacagagaccactacgataaactgtacccactgaggccccagaccccagagccaccaccacctccccctccaccccctccacccccacttccggcagcgccgcctcagccggcgtccacaccagccatccccgcatcagccccacccatcacctcacctacaattgcaccggcccagccatcagtgccgctcacccagctctccatgccgatggagctgcccatcttctcgccgctgatgatgcagacgatgccgctgcagaccttgccggctcagctacccccgcagctgggacctgtggagcctctgcctgcggacctggcccaactctaccagcatcagctcaatccaaccctgctccagcagcagaacaagaggcctcgcaccaggatcacagatgatcagctccgagtcttgcggcaatattttgacattaacaactcccccagtgaagagcaaataaaagagatggcagacaagtccgggttgccccagaaagtgatcaagcactggttcaggaacactctcttcaaagagaggcagcgtaacaaggactccccttacaacttcagtaatcctcctatcaccagcctggaggagctcaagattgactcccggcccccttcgccggaacctccaaagcaggagtactggggaagcaagaggtcttcaagaacaaggtttacggactaccagctgagggtcttacaggacttcttcgatgccaatgcttacccaaaggatgatgaatttgagcaactctctaatttactgaaccttccaacccgagtgatagtggtgtggtttcagaatgcccgacagaaggccaggaagaattatgagaatcagggagagggcaaagatggagagcggcgtgagcttacaaatgatagatacattcgaacaagcaacttgaactaccagtgcaaaaaatgtagcctggtgtttcagcgcatctttgatctcatcaagcaccagaagaagctgtgttacaaggatgaggatgaggaggggcaggacgacagccaaaatgaggattccatggatgccatggaaatcctgacgcctaccagctcatcctgcagtaccccgatgccctcacaggcttacagcgccccagcaccatcagccaataatacagcttcctccgctttcttgcagcttacagcggaggctgaggaactggccaccttcaattcaaaaacagaggcaggcgatgagaaaccaaagctggcggaagctcccagtgcacagccaaaccaaacccaagaaaagcaaggacaaccaaagccagagctgcagcagcaagagcagcccgagcagaagaccaacactccccagcagaagctcccccagctggtgtccctgccttcgttgccacagcctcctccacaagcgccccctccacagtgccccttaccccagtcgagccccagtccttcccagctctcccacctgcccctcaagcccctccacacatcaactcctcaacagctcgcaaacctacctcctcagctaatcccctaccagtgtgaccagtgtaagttggcatttccgtcatttgagcactggcaggagcatcagcagctccacttcctgagcgcgcagaaccagttcatccacccccagtttttggacaggtccctggatatgcctttcatgctctttgatcccagtaacccactcctggccagccagctgctctctggggccatacctcagattccagcaagctcagccacttctccttcaactccaacctccacaatgaacactctcaagaggaagctggaggaaaaggccagtgcaagccctggcgaaaacgacagtgggacaggaggagaagagcctcagagagacaagcgtttgagaacaaccatcacaccggaacaactagaaattctctaccagaagtatctactggattccaatccgactcgaaagatgttggatcacattgcacacgaggtgggcttgaagaaacgtgtggtacaagtctggtttcagaacacccgagctcgggaaaggaaaggacagttccgggctgtaggcccagcgcaggcccacaggagatgccctttttgcagagcgctcttcaaagccaagactgctcttgaggctcatatccggtcccgtcactggcatgaagccaagagagctggctacaacctaactctgtctgcgatgctcttagactgtgatgggggactccagatgaaaggagatatttttgacggaactagcttttcccacctacccccaagcagtagtgatggtcagggtgtccccctctcacctgtgagtaaaaccatggaattgtcacccagaactcttctaagcccttcctccattaaggtggaagggattgaagactttgaaagcccctccatgtcctcagttaatctaaactttgaccaaactaagctggacaacgatgactgttcctctgtcaacacagcaatcacagataccacaactggagacgagggcaacgcagataacgacagtgcaacgggaatagcaactgaaaccaaatcctcttctgcacccaacgaagggttgaccaaagcggccatgatggcaatgtctgagtatgaagatcggttgtcatctggtctggtcagcccggccccgagcttttatagcaaggaatatgacaatgaaggtacagtggactacagtgaaacctcaagccttgcagatccctgctccccgagtcctggtgcgagtggatctgcaggcaaatctggtgacagcggagatcggcctgggcagaaacgttttcgcactcaaatgaccaatctgcagctgaaggtcctcaagtcatgctttaatgactacaggacacccactatgctagaatgtgaggtcctgggcaatgacattggactgccaaagagagtcgttcaggtctggttccagaatgcccgggcaaaagaaaagaagtccaagttaagcatggccaagcattttggtataaaccaaacgagttatgagggacccaaaacagagtgcactttgtgtggcatcaagtacagcgctcggctgtctgtacgtgaccatatcttttcccaacagcatatctccaaagttaaagacaccattggaagccagctggacaaggagaaagaatactttgacccagccaccgtacgtcagttgatggctcaacaagagttggaccggattaaaaaggccaacgaggtccttggactggcagctcagcagcaagggatgtttgacaacacccctcttcaggcccttaaccttcctacagcatatccagcgctccagggcattcctcctgtgttgctcccgggcctcaacagcccctccttgccaggctttactccatccaacacagctttaacgtctcctaagccgaacttgatgggtctgcccagcacaactgttccttcccctggcctccccacttctggattaccaaataaaccgtcctcagcgtcgctgagctccccaaccccagcacaagccacgatggcgatgggccctcagcaacccccccagcagcagcagcagcagcagcaaccacaggtgcagcagcctcccccgccgccagcagcccagccgccacccacaccacagctcccactgcaacagcagcagcaacgcaaggacaaagacagtgagaaagtaaaggagaaggaaaaggcacacaaagggaaaggggaacccctgcctgtccccaagaaggagaaaggagaggcccccacggcaactgcagccacgatctcagccccgctgcccaccatggagtatgcggtagaccctgcacagctgcaggccctgcaggccgcgttgacttcggaccccacagcattgctcacaagccagttccttccttactttgtaccaggcttttctccttattatgctccccagatccctggcgccctgcagagcgggtacctgcagcctatgtatggcatggaaggcctgttcccctacagccctgcactgtcgcaggccctgatggggctgtccccaggctccctactgcagcagtaccagcaataccagcagagtctgcaggaggcaattcagcagcagcagcagcggcaactacagcagcagcagcagcaaaaagtgcagcagcagcagcccaaagcaagccaaaccccagtcccccccggggctccttccccagacaaagaccctgccaaagaatcccccaaaccagaagaacagaaaaacaccccccgtgaggtgtcccccctcctgccgaaactccctgaagagccagaagcagaaagcaaaagtgcggactccctctacgaccccttcattgttccaaaggtgcagtacaagttggtctgccgcaagtgccaggcgggcttcagcgacgaggaggcagcgaggagccacctgaagtccctctgcttcttcggccagtctgtggtgaacctgcaagagatggtgcttcacgtccccaccggcggcggcggcggtggcagtggcggcggcggcggcggtggcggcggcggcggcggcggcggctcgtaccactgcctggcgtgcgagagcgcgctctgtggggaggaagctctgagtcaacatctcgagtcggccttgcacaaacacagaacaatcacgagagcagcaagaaacgccaaagagcaccctagtttattacctcactctgcctgcttccccgatcctagcaccgcatctacctcgcagtctgccgctcactcaaacgacagcccccctcccccgtcggccgccgccccctcctccgcttccccccacgcctccaggaagtcttggccgcaagtggtctcccgggcttcggcagcgaagcccccttcttttcctcctctctcctcatcttcaacggttacctcaagttcatgcagcacctcaggggttcagccctcgatgccaacagacgactattcggaggagtctgacacggatctcagccaaaagtccgacggaccggcgagcccggtggagggtcccaaagaccccagctgccccaaggacagtggtctgaccagtgtaggaacggacaccttcagattgtaagctttgaagatgaacaatacaaacaaatgaatttaaatacaaaaattaataacaaaccaatttcaaaaatagactaactgcaattccaaagcttctaaccaaaaaacaaaaaaaaaaaaaaaaagaaaaaaaagaaaaagcgtgggttgttttcccatatacctatctatgccggtgattttacattcttgtctttttcttttcttttaatattaaaaaaaaaaaaaaagccctaaccctgttacattgtgtccttttgaaggtactattggtctgggaaacagaagtccgcagggcctccctaatgtctttggagcttaaaccccttgtatatttgccccttttcaataaacgccccacgctgatagcacagaggagcccggcatgcactgtatgggaaagcagtccaccttgttacagttttaaatttcttgctatcttagcattcagataccaatggcttgctaaaagaaaaaaagaaatgtaatgtctttttattctcaggtcaatcgctcacactttgttttcagaatcattgttttatatattattgttttttcagtttttttttttttttttgttccagaaaagattttttgttttgttaacttaaaaatgggcagaaagtattcaagaaaaacaatgtgaactgctttagctttctggggatttttaaggatagcttttctgctgaagccaatttcaaggggaaaagttaagcactcccactttcaaaaaaaaaaaaaaataataacccacacacacaaagagtgttgaggacttgtagcttaaaaaaaataagttttaaaaactgactttctgtatttatgatagatatgaccatttttggtgttgagtagattgttgcattggaaatgaactgaagcagtatggtagatttaaaaggaaaaaaaaaaaaaaaccttttgtgtacatttagctttttgtatggtccagctgacagctcctcatttgatgttgtcttgttcattcctagcagatgatagattgcaatccgttgattcgcctaagcttttctccccttgtcccttaattccactttctctttcttgtcccttaattccactttctctttccttctcccacctcccgtcctataatctcccacttaaggtagctgccttcatttcttagagggagctgcagaattattttataaaactaaagaaagaatttcaagggattctaggggtcattaggatcctcacagattatttttggttggggagttgaaactttttaaaggcatataattctagttacctgtgtctgttagctttgtgcatttattttttatttatccttcttttggcttttttttctttgtaccccttcttttcctccttgtttggtaggagcttcaaatattctttttttttctatactaaaggatttgtttccatttgtgtaattggctgtgtacttttcttttctaaaaaaagtttttggttagggatttggtttttggttttgtgtttgttttttctttcctctctcagaaaaaaaaatttcatgctttaaataaaatccaaagacacaccctttcactgctgatgcagaaaaaagggaaagggttcttgttacttgagaatttgtttctgatttaaacaaacaagacttagtttaataaaagaaagagaaaaacaaaagattcccaggttgttatgtgcttcttctgcaagcagagaggcaaatgttaatgacaattccatataccaaaagacacattttttacttcaaagttttgtccttgtgttaggcagtctgagcagcgagtgatccagagcgcagccaacaaagcagcagatagcagtgtacagaaagcaaaaaaggaactgtatgtgaggcacttgtttctgttaatatccatattcctgttaacacacaccctttctcatgtaaaaagaaaaataaataaatggtctgaactttgaaaactttgtgctgctaaaacatagattttggagacaaataaatagatgctttgctgtttcactttcatagctaaacatcaacagaaaccatctccccttgcccccaaagtgtgaaatccttcttcccttcgttttcttccttatgtttcaaaagggaactttgaagactgtgaatacaggttccattggtcacctttcgggcttctttccccagtgctgaagccactcatcgactttgcaaaagactggagcattccaagatctgaaaatggattttttttctttttttcttttttagccgggactattttatttttatgaatttgtttttagtttaatgaaatagtagatcctgaaatgttgtacatatttctaactaggctgatgcacagtgcaaattccttttttaattgttttttttaagtagaaatactaaagaaagaataccatctaactattcataccagtatccagttgtagcataaggtgtcaaaagcaagtacgcaaaacatttactgttttaacaagctatttccttttaacaagaaatcttgtatttcttcctgtgtttgagatgaacatttttaaattttaaagttgtacagttttttgttttccattattttatcttgtttgtaactctatgaaatatatatatatatattttttgccatttaactgttgtatgttactctgtgtctgtaccatatagaaaaaaaattgtttttgtttttggttctctatgtgatatcagttaacaatgtaacactagctttacctgtcaaattctgctaggtcttctctgaaaacgttgtttttaaaaatgatattgcttggtaatagtgcaatttctatccttttccctcccccctcaacttttaagttcttttctttataattttgctgccccctccctgatggtttgggtttttgtttttgtttttgtttttttttttcatggagctactatgccatcctccctctgtgaggcagagtgactgtcagtgttttgttatgccatgccttgagctgtgggtgtttggcgacaataaggtggttgaatagattggctgagcacacttccacccacctagtgttctcagaggggttatgtgattgtttcaacctggagtgggttgcacccttaatgctttcctctgcaactaaaccgcccacatatatgttcattgaaaaaagtaagaataattctcagcactaacccagaagtagcaaagcagtcagtgatggtgaacattagaggtcaaacatgagttagatgtttgtgggctgacagccatcgtggctatgaccagtactatttacaaagcatgaattcactacaatgctcaactgtttgtttagctttatctcacttggggaatttattcctgtctgctgcattgtaggtagctgggtaggatatatttccacttgctttttaaattagttcttcacctccattgacactcgttttttggttttctccctatagtgtgggttggtgctagacaccagtctgacccacagaatgggagttatttcatccatctttcctccatccttccaaaaaccacatatctacacaaggaaaaatttaatacatctaggaattttttttttaattacaagctatttaaagagatgaatgtggccaaagttttacacaattgaaaataaagtaaaacagacggcatgtgtttaaacctgagtttatcaggcatggcaggaagttgcaggagagagaggcagtgacccaagccagtgcacttgatgttcatggacatatattttttttaaataataaattaaaacattttaaatagaagcataaattgagttgtttgttggcgctgagatactgcccactgtgaaacaaagctttgactagttttttgtttgtttactttcttcaggggggaggggggcaagtttgggtaggaaagaaagcataaatgaacgtgaccctgaggtgaagaggtatatgaacagcctttgcaatgtacaaaaagaaaaaaaaacaaaaaacaacaaaaaaaatagagcaagtgaaaccaaaaatgatgttcttggtgtttttctataatgtagtcttgttagcttttttgttactgtaacaatgctgatctcgaactgtaccaaaatacatggagactaacaaacagaaccacatggaactttcaaactgaaaaaaaaatttgtcacaaaaactttgttgtcatagttaagttgattgtagatggtaattgaatatactcctttgaaaatatttcatcaagtatgtttcctgctcattgtgatacattaaaaaaaaaatatgagcaaaa

SEQ ID NO: 3111 - DNA, 3702 bp, Homo Sapiens
  NM_006887
gagttccagcagtccgcgagctgccgtcggctccgcggggggggcgggccgggcaccccggggcgcggaggagcgctcctcgcttctctccttcccccctgccgcactccgccggaccctcccgccggcccgcgccgctgcactcgccctctcctctcgccccccggcaaactttcggcccctccccgcccctcgcccgttattcgtcgtggctcaagcccggccacgccgccccaagggctcctcccgacctcccggcctgccgctccggccactgcgggatccagaaacatgtcgaccacacttctgtccgccttctacgatgtcgacttcttgtgcaagacagagaaatccctggccaacctcaacctgaacaacatgctggacaagaaggcggtggggacgcctgtggccgccgcccccagctcgggcttcgcgccgggattcctccgacggcactcggccagcaacctgcatgcactcgcccaccccgcgcccagccccggcagctgctcgcccaagttcccgggcgccgctaacggcagcagctgcggcagcgcggcggccggcggtccgacctcctacggcacccttaaggagccgtcggggggcggcggcacagccctgctcaacaaggagaacaaattccgggaccgctcgtttagcgagaacggcgatcgcagccagcacctcctgcacctgcagcagcagcagaaggggggcggcggctcccagatcaactccacgcgctacaagaccgagctgtgccggcccttcgaggagagcggcacgtgcaagtacggcgaaaagtgccagttcgcgcatggcttccacgagctgcgcagcctgactcgccatccgaagtacaagaccgagctgtgccgcacctttcataccatcggcttctgcccctatgggccgcgctgccacttcatccacaacgcggacgagcggcggcccgcgccgtcggggggcgcctccggggacctgcgtgcctttggcacgcgcgatgcgttgcacctgggcttcccgcgggagccgcggcccaagttgcaccacagcctcagcttctcgggcttcccgtcgggccaccatcagcccccgggcggcctcgagtcgccgctgctgctcgacagccccacgtcgcgcacgccgccgccgccctcctgctcttcggcctcgtcctgctcctcctccgcctcctcctgttcctcggcctccgcggcctccacgccctcgggcgccccgacatgctgcgcctccgcggcggccgcggctgcggccgctctgctgtacggcaccgggggcgccgaggacctgctggcgccgggggccccgtgcgcggcctgctcgtcggcctcgtgcgccaacaacgccttcgccttcggtccggagctcagcagcctcatcacgccgctcgccatccagacccacaactttgccgccgtggccgccgccgcctactaccgcagtcagcagcagcagcagcagcagggcctggcgccccccgcgcagccgccggcgccgcccagcgcgaccctccccgccggggccgccgcacctccctcgccgcccttcagcttccagctgccgcgccgcctgtccgactcgcccgtgttcgacgcgccccccagccccccggactcgctgtcggaccgcgacagctacctaagcggctccctgagctccggcagcctcagcggctctgagtctcccagcctcgaccctggccgccgcctgccaatcttcagccgcctctccatctccgacgactgaggcaagagggcgccagtgaggaggaagggaaggcggttcagagatgttggaggacacccctcgccatctcgcccttgctgggggcacgggagtggggggggtgacatgggccctaggcagactgcaagcccgaccgagcacttggactcgaactctgtgccgggaggggcccccacccctcctttttcggtttcctcttgtctttttttttttatttttattacgaagtttcattctttttgagcaaaaaagtcgaactttttctgttgaacaaaatattcacaacagggcagttgtgatacgaatagaacaaaaaaaaaaaaaaaacacttaaactttgttaggactccgatgagtttgggacttcaggaaaaatcaacccagcaccagcagctaccaaccaccattccatctcttcacttgaacagcattagttaagtccagatgtgggaacccttctcttggaagaagttcctaattgtgtctcagaccggtgtaaacaaaccagccagccgccaccttgctaaacctataagctttttaaaatccaatatattctgccaagaatatgccttgatagttagccctcagcccataggtgttttttgttttttaacagaattatatatgtctgggggtgaaaaaacccttgcattccaaaggtccatactggttacttggtttcattgccaccacttagtggatgttcagtttagaaccattttgtctgctccctctggaagccttgcgcagagcttactttgtaattgttggagaataactgctgaatttttagctgttttgagttgattcgcaccactgcaccacaactcaatatgaaaactatttaacttatttattatcttgtgaaaagtatacaatgaaaattttgttcatactgtatttatcaagtatgatgaaaagcaatagatatatattcttttattatgttaaattatgattgccattattaatcggcaaaatgtggagtgtatgttcttttcacagtaatatatgccttttgtaacttcacttggttattttattgtaaatgagtacaaaattcttaatttaagagattgtatgtaatatttatttcattaatttctttccttgtttacgtaaattttgaaagattgcatgatttcttgacagaaatcgatcttgatgctgtggaagtagtttgaggaacatcctatgagttttcttagaatgtataaaggttgtagcccatccaacttcaaagaaaaaaatgaccacatactttgcaatcaggctgaaatgtggcatgcttttctaattccaactttataaactagcaaaaaagtgtttgcttattccaccagttctactgtgacatactcgagtataaagacatgtagcaataacggggagtggggggggagtctcacagtgcctttggaagggcccgaacttgccttaaatcttcctcaaccaaataagtattttattagtgcttgagagaatctgaatgtaggatgggttcaactgcacaaaaggaaaagatttttaccactttttttatatagatataaagtgaagcaaccgccttagtgctgaaatatgtagtacatgaatatgccttgtttaattacagaaaattccaaaacttgtactatttttttttccatgtagaaaggcaggaatgtctcctaagctttcctggacagcagatgaatgagcggtagctttagtttgtacgtaggtacagttggagcactatatgtactctctggactactttggacagaagtaggtttttgaatgtaacaagataagtcaacttgagttgtaatatattttggggaatcagctcactacaaattgtgactgtaaacattgtactgtaaatgttttgtagttttcccccaataaaatttttgggaaaaaaaggtaaaaaaaaaa

SEQ ID NO: 3112 - DNA, 4268 bp, Homo Sapiens
  NM_006888
gatacggcgcaccatatatatatcgcggggcgcagactcgcgctccggcagtggtgctgggagtgtcgtggacgccgtgccgttactcgtagtcaggcggcggcgcaggcggcggcggcggcatagcgcacagcgcgccttagcagcagcagcagcagcagcggcatcggaggtacccccgccgtcgcagcccccgcgctggtgcagccaccctcgctccctctgctcttcctcccttcgctcgcaccatggctgatcagctgaccgaagaacagattgctgaattcaaggaagccttctccctatttgataaagatggcgatggcaccatcacaacaaaggaacttggaactgtcatgaggtcactgggtcagaacccaacagaagctgaattgcaggatatgatcaatgaagtggatgctgatggtaatggcaccattgacttccccgaatttttgactatgatggctagaaaaatgaaagatacagatagtgaagaagaaatccgtgaggcattccgagtctttgacaaggatggcaatggttatatcagtgcagcagaactacgtcacgtcatgacaaacttaggagaaaaactaacagatgaagaagtagatgaaatgatcagagaagcagatattgatggagacggacaagtcaactatgaagaattcgtacagatgatgactgcaaaatgaagacctactttcaactcctttttcccccctctagaagaatcaaattgaatcttttacttacctcttgcaaaaaaaagaaaaaagaaaaaagttcatttattcattctgtttctatatagcaaaactgaatgtcaaaagtaccttctgtccacacacacaaaatctgcatgtattggttggtggtcctgtcccctaaagatcaagctacacatcagttttacaatataaatacttgtactaccttaatgataaggactccttaaagttccatttgctaatgattaatacactgtttgggctggccagtttttcatgcatgcagcttgacgattgagcacagtcaggcctttgtattaaaaatgaaaaatgaaaaaacaaattcaaaacctattcaaatgggttctagttcaatttgtttagtataaattgtcatagctggtttactgaaaacaaacacatttaaaattggtttacctcaggatgacgtgcagaaaaatgggtgaaggataaaccgttgagacgtggccccactggtaggatggtcctcttgtacttcgtgtgctccgacccatggtgacgatgacacaccctggtggcatgcccgtgtatgttggtttagcgttgtctgcattgttctagagtgaaacaggtgtcaggctgtcactgttcacacaaatttttaataagaaacatttaccaagggagcatctttggactctctgtttttaaaaccttctgaaccatgacttggagccggcagagtaggctgtggctgtggacttcagcacaaccatcaacattgctgttcaaagaaattacagtttacgtccattccaagttgtaaatgctagtctttttttttttttttccaataaaaagaccattaacttaaagtggtgttaaatgctttgtaaagctgagatctaaatggggacaaggcaggtggaggggaggccagtgtacatgtaaatgcccacagcccagcattgggtttccctcccaaggccccagcaccaacctctgagcccaagaccttgcctgaaaacaagcagataccgattgcttcatcctatttatggacatgtaggtctagttgcattttcactggggggaggggggaaggtgaattatggtaacttttaatgatctattcaggcagtagagctcttaaggaaaaaaaaaaacccactttctctcaagcatgtatttaggggttgttctcaattgtgctgctgattacctgtcttatgtaactacttgagaccatctgcaagagacatgatttagtgtgtctgtaattcaatcttcgctgtgtgtggtagaagcagtagtcacttttgtaagccagtctcttcatgcctaaaagacactaccagtcacctttgattcgcgacttttaatttatgattatacttagcctcctcctcctttttttttttttcccaagttgacttgactttgcttttttccccccaagtagaactaatgctagcttccagcttgaaagtaaaactccagtgtggagtgaattttgtgtctaattataaacctgtaaccaaaactcagacatctggtactggtctttgcattgagattggtccctgtaaaaccccctttaaaagcatattgcatttagtacagagctcttttttgaaatgaaggctggagatgtgcatttttcacggtgttaactggttgtatcttattagcaaggagattggggttttgagtgtttgcgtgggtggtttcaatttgccagggaacagtggcaggctgctagcaaggcagtgagaagctcttggcagccaaatgggtgcattcagggctgatttatagagacccttggcttctccttctcctactccctgtctttctggcattttgtagcttgttagattttctgccagaggggtgggtcagagcagtggaggggagacatcgcccatgtgcttctgctactggtccttgggctgggtggttggtagaggagatgttgacactatgagctaagggttggcttttgtaattacctgaatctgaaaggaatgcctaaggttaccttggggtttctcttctggtgagatagggttcctggtttgagtaagttaatgtcctggatatttcttgtggcagggggtggtcaaagagcctgattgctgacccagtctcaggcctgtggtcgatgacctctcggtagtttcaaagggggctggagggggatatttgacttgttttttcgaaatgtagccttctaaccctcaagtctttagaagctgggtggactcttagtggtcctgcagcgtatcctaaaagactacctttgaaacaggattcttgtatggccaggatcctgtctgggaaccagaaaccctacaccctccccctccagggaatgctgagttccagttttgagcagaggtgaggcagaatccactgtagccttccgccctggtatttggggggatgaccagcccaggcgttgggtgttagtctgcatgagtttgtgagaggaaatagctgggtgtcctggcagtgcccttgaagttggttaggaccttcctgtaaactcttgcccctacttctaactactctataaatatatacatatatttatatataaagtgattagttgaactggcatcctgctttagcctgagacttgccataagaaactgctgagtacttggcaaaccctttcatagttttgttctccatctgtttggggtaggtgttgagcgaggcaaatggatctcgatatttcagatgggcttttgatgcactgttgccaaggaaggctttttctgattttttgacaaatgaatttttgcacactttcattggtgtctttcggcaacttacacacattgaaaatgagctattgtacatatttttatattctctttataaatgcatgtctgattgtacttgtaacaatattgtaatgaacggctgtgcagtaggcccagcgctgctgtgtctcgtcagaggaatagcttaccacgaacccctcagcatactgggaatctcttcctgaacaacgaatgtaaatttggtcaagtctactcttccgttcattcaattattttaagcatttgaattatttattgtatatcctaaatatatttctcctttggcagtgactagatttccactaatgtgtcttaatctatccctccagctggcagttactgtttttttaatcccctgaagttgtcctgtaggagacagaaattctttgctgtctgtatcccttggagtaagaaggtagtggcatgggtggagtgtgtgttctttctccaaatctattatgatgtttattaaacacttctgtagcaaagatggtggtagttcttttgttactgaagttgcccttcaccatggctatttgaaaaggagatgtacttggacgtttctgtaaatcttgagataaactgtttggagatttaaccacctctctgatgggggaccaactctatggaaattgtaaatacgttttatttataaacctggcactgtattcaataaacatttctgcagcctttcatctctaactgcgaaaaaaaaaaaaaa

SEQ ID NO: 3113 - DNA, 2797 bp, Homo Sapiens
  NM_006889
aggagccttaggaggtacggggagctcgcaaatactccttttggtttattcttaccaccttgcttctgtgttccttgggaatgctgctgtgcttatgcatctggtctctttttggagctacagtggacaggcatttgtgacagcactatgggactgagtaacattctctttgtgatggccttcctgctctctggtgctgctcctctgaagattcaagcttatttcaatgagactgcagacctgccatgccaatttgcaaactctcaaaaccaaagcctgagtgagctagtagtattttggcaggaccaggaaaacttggttctgaatgaggtatacttaggcaaagagaaatttgacagtgttcattccaagtatatgggccgcacaagttttgattcggacagttggaccctgagacttcacaatcttcagatcaaggacaagggcttgtatcaatgtatcatccatcacaaaaagcccacaggaatgattcgcatccaccagatgaattctgaactgtcagtgcttgctaacttcagtcaacctgaaatagtaccaatttctaatataacagaaaatgtgtacataaatttgacctgctcatctatacacggttacccagaacctaagaagatgagtgttttgctaagaaccaagaattcaactatcgagtatgatggtgttatgcagaaatctcaagataatgtcacagaactgtacgacgtttccatcagcttgtctgtttcattccctgatgttacgagcaatatgaccatcttctgtattctggaaactgacaagacgcggcttttatcttcacctttctctatagagcttgaggaccctcagcctcccccagaccacattccttggattacagctgtacttccaacagttattatatgtgtgatggttttctgtctaattctatggaaatggaagaagaagaagcggcctcgcaactcttataaatgtggaaccaacacaatggagagggaagagagtgaacagaccaagaaaagagaaaaaatccatatacctgaaagatctgatgaagcccagcgtgtttttaaaagttcgaagacatcttcatgcgacaaaagtgatacatgtttttaattaaagagtaaagcccatacaagtattcattttttctaccctttcctttgtaagttcctgggcaacctttttgatttcttccagaaggcaaaaagacattaccatgagtaataagggggctccaggactccctctaagtggaatagcctccctgtaactccagctctgctccgtatgccaagaggagactttaattctcttactgcttcttttcacttcagagcacacttatgggccaagcccagcttaatggctcatgacctggaaataaaatttaggaccaatacctcctccagatcagattcttctcttaatttcatagattgtgttttttttttaaatagacctctcaatttctggaaaactgccttttatctgcccagaattctaagctggtgccccactgaattttgtgtgtacctgtgactaaacaactacctcctcagtctgggtgggacttatgtatttatgaccttatagtgttaatatcttgaaacatagagatctatgtactgtaatagtgtgattactatgctctagagaaaagtctacccctgctaaggagttctcatccctctgtcagggtcagtaaggaaaacggtggcctagggtacaggcaacaatgagcagaccaacctaaatttggggaaattaggagaggcagagatagaacctggagccacttctatctgggctgttgctaatattgaggaggcttgccccacccaacaagccatagtggagagaactgaataaacaggaaaatgccagagcttgtgaaccctgtttctcttgaagaactgactagtgagatggcctggggaagctgtgaaagaaccaaaagagatcacaatactcaaaagagagagagagagaaaaaagagagatcttgatccacagaaatacatgaaatgtctggtctgtccaccccatcaacaagtcttgaaacaagcaacagatggatagtctgtccaaatggacataagacagacagcagtttccctggtggtcagggaggggttttggtgatacccaagttattgggatgtcatcttcctggaagcagagctggggagggagagccatcaccttgataatgggatgaatggaaggaggcttaggactttccactcctggctgagagaggaagagctgcaacggaattaggaagaccaagacacagatcacccggggcttacttagcctacagatgtcctacgggaacgtgggctggcccagcatagggctagcaaatttgagttggatgattgtttttgctcaaggcaaccagaggaaacttgcatacagagacagatatactgggagaaatgactttgaaaacctggctctaaggtgggatcactaagggatggggcagtctctgcccaaacataaagagaactctggggagcctgagccacaaaaatgttcctttattttatgtaaaccctcaagggttatagactgccatgctagacaagcttgtccatgtaatattcccatgtttttaccctgcccctgccttgattagactcctagcacctggctagtttctaacatgttttgtgcagcacagtttttaataaatgcttgttacattcaaaaaaaaaaaaaaaaaaaaaaaaaaaaaaaaaaaaaaaaaaaaaaaaaaaaaaaaaaaaaaaaaaaaaaaaaaaaa

SEQ ID NO: 3114 - DNA, 2115 bp, Homo Sapiens
  NM_006893
agttccaggtaccgccactgggggcggccgcggcctccccagcggcaacggccacgaagctgcgcggccctggtttccagccgggcccttttcgcggccgggccccagcatggctgcccccacggctgagggcctggcagctgctgcgccctcgctttcttgacattccctggcttctgtgctctcttccccaggccaccccagcagacatgtttgccaaggcctttcgggtcaagtccaacacggccatcaaggggtcggacaggagaaagcttcgagctgatgtgacaactgctttccccacccttggaactgatcaagtctctgagttagtacctggaaaggaggagctcaacattgtgaagttgtatgctcacaaaggggatgcagtgactgtgtacgtgagtggtggtaaccccatcctctttgaactggagaaaaatctgtatccaacagtgtacacgctgtggtcctatcctgatcttctgccaacctttacaacatggcctctggtgctcgagaaactggtagggggagcagatttgatgctgcctggactggtgatgccccctgctggtctgcctcaggtacagaagggcgacctctgtgccatttctttggtggggaacagagcccctgtagccattggagttgcagccatgtccacagctgagatgctcacgtcaggcctgaagggaaggggcttctctgtgctccacacttaccaggaccacttgtggcggtctggaaacaagtcctctccaccttccattgctccactggccctggattcagcagatctcagtgaagagaaggggtctgtccagatggactccaccctgcagggagacatgaggcacatgaccctggagggggaagaggagaatggggaggttcaccaggcacgtgaagacaagtctctctcagaagccccagaagacaccagcaccaggggcctgaaccaagactccacagatagcaaaacgcttcaagaacaaatggatgagctgttacagcaatgcttcttacatgccttgaagtgccgagtcaaaaaggctgacctccctttactcaccagcactttccttggcagccacatgttctcctgctgccccgaaggacgacaactggacataaagaagtcaagctacaaaaagctctctaagttcctgcagcaaatgcagcaggagcagattatacaggtgaaggagctgagcaaaggggtggagagcattgtggctgtggactggaaacacccgaggattacatctttcgtcatacccgagccctccccgacctcccagactatccaggagggtagcagggaacagccctatcaccctccagatataaaacccctctactgtgtcccagccagcatgaccctgctcttccaggagtctggccacaagaaggggagctttctggagggcagtgaggtccgaacgatcgtcattaactacgccaagaaaaatgacctggttgatgcagacaacaaaaatcttgtgagattggatcccatcctatgtgactgcatcttagagaaaaatgaacagcatacagtcatgaagcttccatgggacagtcttctgaccaggtgtttggaaaaattacagcctgcctatcaagtgacccttcccggacaagagcccattgtgaagaaagggagaatctgtccaattgacatcaccctagcacaaagagcgtctaataaaaaggtgaccgtggtccggaacttggaggcctatggtctggacccatactcagtggctgccatccttcagcagcgatgccaggctagcaccaccgtcaatcctgcccctggggccaaggacagccttcaggtgcagatccagggaaaccaggtccaccacctcggctggctattgcttgaagagtatcagctccctcgaaaacacatccaaggtctagaaaaggccctcaaacctggcaagaagaagtgacagactcttttgtctcacgtggtggatccggtggaaatccaagctctgggctggtaatttttatgagcattttcagcttttgcaaatacaaaatataattctttacaaaaataaatttttattctaatctaaaaaaaaaaaaaaaaaaaaa

SEQ ID NO: 3115 - DNA, 1539 bp, Homo Sapiens
  NM_006899
gcgggaaacatggcggcattgagcggagtccgctggctgacccgagcgctggtctccgccgggaaccctggggcatggagaggtctgagtacctcggccgcggcgcacgctgcatcgcggagccaggccgaggacgtgagggtggagggctcctttcccgtgaccatgcttccgggagacggtgtggggcctgagctgatgcacgccgtcaaggaggtgttcaaggctgccgctgtcccagtggagttccaggagcaccacctgagtgaggtgcagaatatggcatctgaggagaagctggagcaggtgctgagttccatgaaggagaacaaagtggccatcattggaaagattcataccccgatggagtataagggggagctagcctcctatgatatgcggctgaggcgtaagttggacttatttgccaacgtagtccatgtgaagtcacttcctgggtatatgactcggcacaacaatctagacctggtgatcattcgagagcagacagaaggggagtacagctctctggaacatgagagtgcaaggggtgtgattgagtgtttgaagattgtcacacgagccaagtctcagcggattgcaaagttcgcctttgactatgccaccaagaaggggcggggcaaggtcactgctgtccacaaggccaacatcatgaaacttggggatgggttgttcctgcagtgctgtgaggaagttgctgaactgtaccccaaaatcaaatttgagacaatgatcatagacaactgctgcatgcagctggtgcagaatccttaccagtttgatgtgcttgtgatgcccaatctctatgggaacattattgacaatctggctgctggcctggttgggggagctggtgtggtccctggtgagagctatagtgcagaatacgcagtctttgagacgggtgcccggcacccatttgcccaggcagtgggcaggaatatagccaatcccacggccatgctgctgtcggcttccaacatgctgcggcatcttaatcttgagtatcactccagcatgatcgcagatgcggtgaagaaggtgatcaaagttggcaaggtgcggactcgagacatgggcggctacagcaccacaaccgacttcatcaagtctgtcatcggtcacctgcagactaaagggagctagagccctttatttcttccaaccttgcaaggaccacactccccatacccttcagtgcagtgtaccagggaagagaccttgtgcctctaagcagtggaccatggtcaccttgctgggtagagcctaggttgtccttgggccggcttccttaggggacagactgttgggtggtgatggggattgttaggatggagcccaggccacatggatgatgatgattctcccccacaggttcgaacctctgacatgggtggctatgctacttgccatgacttcactgaggctgtcattgctgccttgccccacccataggccctgtccatacccatgtaaggtgttcaataaagaacatgaaccaaaaaaaaaaaaaaaaaa

SEQ ID NO: 3116 - DNA, 8704 bp, Homo Sapiens
  NM_006901
gcgcgaccgaagcggataagggacgcggcggcggttggctgtgtctgttgagagagtacaggacagcccggactgcgagaggcggcggcggaggcagtagttgcaccggcagaggcggccgctggcagcggttgaggcggcggtccaacgcgtgctctctgggcggggtgcggcgggggatgtgcctgctcaggccgggcggagtctctctgacagggcgggggatgcgccgcggccgctcgcccggaccctgaggctgctgggcccaccctcccggaaccgtccgaccctcggtggcctcggcctcttctgccatctccggtcctaccctggggcggagggtggaaggcagcttccgtcgaagaggagggggctgcggtggccaccgcggcggagcccgagttattttaccaagaaaatggtttgcacgactttgaacatatactatccatgctgatgggacaggatccaatatgaatataaatgatggaggaagacgacgctttgaagataatgaacatacattacggatatatcctggggctatttcagaagggacaatctactgtccgattcctgccagaaaaaactccacagctgctgaggtgattgagtctcttataaacaaacttcatcttgacaaaacaaaatgttatgttctagcagaggtaaaggaatttggtggagaagaatggattctcaatccaacagattgtccagttcagcgaatgatgctgtggccccgaatggctctggaaaatcgcttaagtggagaggactaccgcttccttctgagagagaaaaaccttgatggatcaatccattatggtagcctgcagtcatggctacgggtaacagaagaacgtcgcaggatgatggaacggggttttcttccacagcctcaacagaaagactttgatgatttatgtagtttacctgatttgaatgagaaaactctcttagaaaacctacgaaatcgctttaagcatgaaaaaatttatacctatgttggcagtattctaatagttattaacccattcaagtttcttcctatttataaccccaaatatgtcaaaatgtatgataaccaccaactgggaaaacttgagccccacatttatgctgtggctgatgtagcttatcatgccatgcttcagcgcaaaaagaatcagtgcatcgtgatttcaggagagagtggttctgggaagactcaaagcacaaactttcttattcaccaccttactgctctcagtcagaaaggatttgccagtggagtagaacagattattcttggagctggaccagtacttgaggcctttggaaatgcaaagacagctcataataacaattcaagtcgttttgggaagtttattcaagtaaattaccaggaaacaggcactgtacttggtgcctatgttgaaaaatatctactggagaagtccagactcgtttatcaggagcataatgaacggaactatcatgtattctattacctcctggcaggagcaagtgaagatgagagatcagcattccatcttaagcaaccagaggaatatcattatctcaatcagataacaaagaaacccctcagacagagctgggatgattattgctatgactctgagccggattgcttcacggtggaaggagaagatttgagacatgactttgagcgcctacaacttgccatggaaatggtaggatttcttcccaagacacgaagacagattttctctcttctctcagccatactacatttgggtaatatctgttacaaaaagaagacataccgggatgactccattgatatctgtaatcctgaagttctgcctattgtctcagaattattagaggttaaagaagagatgctatttgaagcattagttacaaggaagacggtgacagtgggagaaaagcttattttgccatacaagttggcagaggctgtgacagtgaggaactccatggctaagtctctgtatagtgccctgtttgactggatagtttttcgaattaatcatgcacttctgaatagtaaagatttagagcataataccaagacattgtctattggtgttcttgatatttttgggtttgaagattatgaaaataacagctttgaacagttctgtattaattttgctaatgaacgtttacagcactactttaatcagcatatctttaaattggaacaagaggaatatagaactgaaggtatcagctggcacaacatagattacattgataatacctgctgcataaatcttattagcaaaaaaccaacaggactgcttcatcttttggatgaagaaagcaactttccacaggctacaaatcaaacattgctagacaagtttaagcatcaacatgaagataattcttacatcgaatttccagccgtgatggagcctgctttcattataaaacattatgctggaaaagtaaaatatggggtaaaggatttccgggaaaaaaatacagatcatatgcgcccagacattgtagctcttctgagaagcagcaagaatgcatttatctctgggatgattggaattgatcctgtagctgttttccgatgggcaattctccgagcttttttcagagccatggttgctttcagggaagctgggaaaagaaacattcacagaaaaactggacatgatgatacagcgccatgtgcaattttgaaaagtatggatagttttagctttctccaacacccagtccaccagaggagcttagagattctgcagagatgcaaggaagagaagtacagtataacccggaaaaatcccagaacacctctttctgatctccagggcatgaatgctctaaatgaaaaaaaccaacatgatacatttgatattgcctggaatggcagaactgggattcgccagagcagactatcaagtggcacctccttgcttgataaagatggaatatttgctaattcaactagcagcaaactcctggagagagcccatggaattctcacgagaaacaaaaatttcaaatccaagcctgcccttccaaagcacttgctagaagtaaattctttaaagcacctgacaagactgacactacaagatcgcattaccaagtctcttcttcatttacacaagaagaaaaaacctcccagcatcagtgcccagtttcaggcatcattaagcaagctaatggaaacacttggtcaagcagaaccatattttgtaaaatgcattcgctctaatgctgaaaagctgcccttaaggttcagtgatgtcttggtacttagacagcttcgatacaccgggatgctggaaacagttcgaattcgccaatcaggatacagctccaaatattctttccaggattttgtgagccacttccatgtacttcttccccgaaatattattccatccaaatttaacattcaggatttcttcaggaaaataaatcttaatccagataattatcaagttggaaaaaccatggtctttctaaaggagcaggaacgacagcacttacaagatctgcttcaccaagaggtgctccgcagaatcatattgttgcagcgatggttcagggtcttgctgtgtaggcagcatttcctccatctgagacaagcatctgttattatccagagattctggaggaattacctaaatcagaagcaagtcagagatgcagctgtgcagaaggatgcttttgttatggctagtgcagctgctcttctccaagcttcctggcgtgctcacttagagaggcagcggtacttggagttacgggctgcagccatcgttatccagcagaaatggagagattactataggcgcaggcacatggctgctatttgcatacaagcaagatggaaagcctacagggaaagtaaaaggtaccaagaacaaaggaaaaaaattatccttttgcaatcaacatgtagaggattcagagcaagacaaagatttaaagctttaaaagaacaaaggctaagagaaacaaagccagaagttggattggtgaatattaagggatatggatctctggaaattcagggttcagacccttcaggatgggaggattgttcttttgacaacagaataaaagccatagaggaatgtaaatctgtaatagagagtaatcgaattagccgtgaaagttcagtggactgcttgaaggagtcaccaaacaagcagcaggagagagcccaaagccagagtggtgtggacttgcaggaagatgtgcttgtaagagagagacccagatccttggaggatctccatcagaaaaaagtaggccgggctaagagagaaagtaggagaatgagagaactagagcaagctatatttagcttagaattgctgaaagttcgttctcttggtggtatttctccttcagaggatcgcagatggtctacagaattggtgcctgaaggccttcagtctccacggggtacacctgatagtgagagctctcaaggaagcttggaacttctgagctatgaggaaagccaaaagagcaaactagagtctgtcatttcagatgaaggagacttgcagtttccatcacctaagatatccagcagtccaaaatttgattcacgggacaatgccctcagtgcctcaaatgagactagcagtgcagagcatttgaaggatggaactatgaaggaaatggtggtctgcagttctgagtctattacctgtaaaccacagctgaaagactccttcatttcaaatagtctacctacttttttttatatcccccaacaagacccactgaaaacaaattcccaactagacacaagtatccaaagaaacaaactattggaaaatgaagacacagcgggggaagctcttactttggatatcaacagggaaactagaaggtatcactgctcaggaaaagatcagattgttccttctttgaatacagagtcttctaatcctgtgcttaagaagttagaaaagctaaacactgagaaggaagaaaggcaaaaacagttgcagcaacagaatgaaaaagagatgatggaacagattcgccagcaaacagatattttagagaaggagcgcaaagccttcaagacaattgaaaagccaagaattggagagtgtttggtggcaccatcttcctatcagtcaaagcaaagagtagagaggccatcctctctcctcagcttaaatacctcaaataagggagaacttaatgtactggggtccctatcattaaaagatgcagctcttgcccaaaaagacagttcctctgctcacttacccccaaaggaccgacctgtcaccgtgttctttgaaagaaaaggaagtccatgccaatctagtactgtcaaggaattatccaagacagacagaatgggcacccagctgaatgtagcctgtaaactctcaaataatcgcatttcaaaaagagaacactttaggccaactcagtcttacagccacaattctgatgacctttccagagagggaaatgctaggcccattttcttcactccaaaggacaatatgagtattccccttgtcagcaaagaagccttaaacagtaaaaatcctcaactccataaagaagatgaaccagcatggaaacctgtgaagttagctgggccaggccaaagagagacatcacagcgattttcgtcagttgatgaacaagcaaaacttcataagactatgtctcaaggagagattaccaagttggcagtgagacagaaggcttcagattcagatataagacctcagagagctaagatgagattctgggccaaagggaaacaaggggagaagaagactaccagagtgaaacctactacccagtcagaggtttcgccactctttgcaggcacagatgtgattccagctcatcagtttccagatgaattagctgcatatcacccaacacctcctttgagcccagaactgcccggcagttgccggaaggaattcaaagagaacaaagaaccttctccaaaggctaagcgcaagcgaagtgtgaagattagcaacgtggctttggattctatgcattggcaaaatgactctgtccagatcatagcaagtgtcagtgatttaaaaagcatggatgaatttcttctgaaaaaggtgaatgacctagataatgaagacagcaagaaggatacactagtggatgttgtatttaaaaaagccctgaaggaatttcggcagaatatcttcagcttttattcatctgcattggcgatggatgatgggaaaagcatacggtataaagacctctatgcactatttgaacagattctggaaaagacgatgaggcttgagcagcgtgattcactgggtgaatctccagtgagagtttgggtcaacacttttaaagtgtttttagatgaatatatgaatgaattcaagacttcagattgcacagccacaaaggtgccaaaaacagaaagaaagaaaagaaggaaaaaggaaactgatttggtggaagaacacaatggtcacatctttaaagccacccaatatagcatccctacatactgtgaatactgttcttctttgatatggataatggaccgagcctctgtttgcaaattatgcaagtatgcttgccataagaagtgctgtctgaaaaccacagccaagtgctctaaaaagtatgatccagagctgtcatctcgacaatttggggttgaactgtcccgtttgaccagtgaagaccgaactgttcctttagtagtggaaaagctcataaactacattgaaatgcatggactgtatacagaaggtatttatcgaaagtctggttcgactaataaaatcaaggagcttcggcagggtctagatacagatgctgagagtgtaaatctagatgactataacatacacgtcattgcaagtgtattcaaacaatggcttcgagatttgcccaatcctctcatgacctttgaactctatgaggaatttcttcgagctatgggccttcaggagaggaaggagacaatccgtggtgtatactctgtgattgatcaactctcccgaactcatctcaatacactggaacgcctcatctttcatctagtcaggattgctctgcaggaagacactaatcgaatgtctgctaatgctttggccattgtgtttgcgccctgcattctccgctgccctgacaccactgacccactacaaagtgtacaggacatcagtaagactaccacttgtgtggaactgattgttgtggaacaaatgaataaatacaaggctcgtctcaaagatatcagtagcttggaatttgctgagaataaggcaaagaccaggttgtcactgattcgtagatcaatgggaaaggggcgtattcgtcgaggaaactatccaggtccatcgtctcctgttgtagttcggttgccttctgtgtctgatgtctcagaggagaccttgactagtgaggcagccatggagactgacatcacagaacagcagcaagcagctatgcagcaggaggagagagtactgactgagcagattgagaacctacagaaggagaaggaggagctaacatttgagatgcttgtactggaaccccgtgcctctgatgatgaaacccttgagtctgaggcctccattgggactgctgatagctcagagaatttgaatatggagtctgaatatgctatctctgagaaatcagaaagaagcttagcccttagctccctgaagacagctggcaagtctgaaccttccagcaagttgcgaaagcaacttaaaaagcagcaagactctttagatgtcgtggactcttcggtctcctctttatgtctgtctaacacggcatcatctcatgggaccagaaaactatttcagatttattccaaatctccattctaccgagctgcctcaggtaatgaggccctgggaatggaaggaccattgggccagaccaaattcctggaagacaagcctcagttcatcagcagaggaaccttcaacccggaaaagggcaaacaaaaattaaagaatgtgaaaaactcacctcagaaaaccaaagagaccccagaggggacagtcatgtctggccgcagaaaaactgtggacccagactgcacctccaaccaacagctagcactctttggaaataatgaatttatggtctgaaccggcagatgtgtgtccctccgtggctacagagtggtaaacaaatctcacctttggggctgcgtttcatcacctcgtccacaatagtcaatcctaattgtggtcctgcctcttttctaagcatatggctaagactgtatgtgctgaattcctgggcctcctgcagaagcagaaagcctgctggggatggtgccagctgtgccttggctgttgtatttgaattgagatttttactatacaaagccacctagggcctggggatttgggtcagttgtagttgcctctcccccaccctcttttcccttcccaaaggtgggtgttgaactaggggggatattgctgtcctgagggaccctctcatttctgacatttgaagaaaacgtataaatctttcttaaccgtgaaagcaaaagcctttgggtttattttgggatagttaggagctagggtagaatataatttttttccaaaaacttacttacaaacaaaaagcctaatccctctattttaagatttctgaaaaaacactccatgttatattctggggaaagcaaaaacaaaaaaaaaaaaaaaaaaaaaaaaaa

SEQ ID NO: 3117 - DNA, 3425 bp, Homo Sapiens
  NM_006912
gcgccatcttactcggttgcgggaggggtcacaggtcagtgccggagcctccgcgagtgaaggaagacgaagtgcgtgacccgaccggctgtggtgttccagtccccactgaccagtaggagcagcagggcgtcggcttgtgaggtggcttttcctcggggcaaccgaggaaggccccaagaggacaatggattctggaactcgcccagttggtagctgctgtagcagccccgctgggctctcacgggagtacaaactagtgatgctgggtgctggtggtgtagggaagagtgccatgaccatgcagttcatcagccaccgattcccagaagatcatgatcccaccattgaagatgcttataagatcaggatccgtattgatgatgagcctgccaatctggacattttggatacagctggacaggcagagtttacagccatgcgggaccagtatatgagggcaggagaagggtttatcatctgttactctatcacggatcgtcgaagtttccatgaagttcgtgagtttaaacagcttatttatcgagtccgacgtactgacgatacacctgtggttcttgtgggaaacaagtcagacctcaaacagctaagacaggtcaccaaggaagaaggattggccttggcccgagaattcagctgtcccttttttgagacatctgctgcataccgctactatattgatgatgttttccatgcccttgtacgggagatacgtaggaaagaaaaggaggcagtactggccatggagaaaaaatctaagcccaaaaacagtgtatggaagaggctaaaatcaccattccggaagaagaaagattcagtaacttgaagagaagatgtgaagtgtttatctgtgaactgcagtgctgtatcaaagcagtccagtaacctgcagtactgagtatggtgcttgctctttcacttaactgataagagggacatgcctactaggagtttttaatgatgtggtatttaaagtattgtctcttagttaagtatgatttattaacccagtggagcactgtctgcttttaaattgtcacattagaatttgttctaccaatgttttgggttctgttgcgctattaattaatgtaaatttgtttatacccaggagaatatgtataccatgtgtgtttgactaagttcacaagggaagtttttggctctgcactccacattatcctttaatttcaatttcctgggactatcccagagaaagacctcagtctcttctattcacactatgcttcctagagacagaacaaaaatcatgtagggaaattggggctaatgagatcagtgccaaatttcagcagatacctgtgaggctgacacctgttgcagactatggagtggtgagatttgggaaagttgggctatatgtttgcagggacttaaaaaggtaggttcagaacagtattctcagtacaagcttcgcttttctaagaagtacacatttggcccaaattcaccgggataagtgagaacagccagaagcataaaatgtgatgaaggtttctcctgggaaccttattttactcttcatttcagggttttctttttttttttaccttcaaaggtagacattttgggaatcataactgtattactaaacgtgtttaatcaaaattcatagttggatcagccattgccttgtacaggtttattttttccccacagacgcacacaccaacacatttatattcattgcttcctcccactttgtgctctgtaaaagagctacagctggcaagatgttttttcggcccttcatcactgattgcattttccatacagaagagacatcaggggtgtgggtaaaattgtgtgtgtgcctccttgacgtggacaatcactagactcagtgctctgagaaaatctgctatttctgttgaatgggtcagtcttaaagctttaaaattcacataggtggagtttcccatctgaagatttctttacaaggactttgctaagttcatctcagggttatctgagccttgaccaagtttatcctaagggaataccactttgctccctgtgcatagtttaggaactgtagtcctaggaggaaacagctttaaatattggtagtgagttgtctaagatcaggactgttttgatatctgaccttgttatatgcggagagtaaatgcaaaaatgctaagagtaatgcatcatgtattgaatattaagtgtcactgaagcaatgtttgtgttgactagaaacgtaagatgacttgtgtagcacctctttataagcacacagctcatcttaatattttccatttttattagaggaagtaggacagagttgtgtttttctttataaacaaatgataaactagcttttttaaaaagtgactgttagaacttttttagctctgagtagtggtccctttttaaactcctggaaacatttttgttaccaaataaatcatgttttatggtactcagccatccaaaagtgaaagacctagcatttgattctgtgcaggacacaaatctcacaggaactatagcactttggaaaagcatcaaagtagaaaagaaatacagtgcaattctattatgagaatgttttacatttaaactggtttagcaccttttaagtttaaagcccatagcttcttattactagtgacctagggaattgttattaacattaagagatatatatatatatatatatatatatttttttttttttttttttttttttttaaatagagatgaggtttcactatgttgcccaggctgatctcgaactcctaggctcaagcaatcctcccaatatgctgggattacaggcatgagccaccacctggcccaagcaagaaattgacactatatagttatttaaggtagtcaggcagtagaaacattgccagaaggatagaaaggaatttggattatatataaggaaaataacaaatcggtgtttttaagactatcactgtcatatattagatccttgtattagtccatccattaatattagttctattcgtggtgctaggtagcttgacaggtatgatatgcataagtcatagctctattcttagtgtcataaagtgtagctaatttataagctctaagtaatcagctttatctaatttgagggcattaaaattactgcctagaactttgagaagagaaaaattcagggataagttgaaaggcactggaactgttcatgtccataccagaccggtaaattataagatccagatgttagtgtctagaattagctgtttagaattcagaggggacatatgttttaactttgtcatatattagcaagaattggtctactgtgatgtttggggaggaggagggggggataatttttttaatgcacttgtatgtgaagacagtttgtatgacataatacaaaacttttaaac

SEQ ID NO: 3118 - DNA, 1075 bp, Homo Sapiens
  NM_006923
gttttcttcgaagatttggggctccgcgatacagttaggatggctgtagtacctctgctgttgttggggggtttgtggagcgctgtgggagcgtccagcctgggtgtcgttacttgcggctccgtggtgaagctactcaatacgcgccacaacgtccgactgcactcacacgacgtgcgctatgggtcaggtagtgggcagcagtcagtgacaggtgtaacctctgtggatgacagcaacagttactggaggatacgggggaagagtgccacagtgtgtgagaggggaacccccatcaagtgtggccagcccatccggctgacacatgtcaacactggccgaaacctccatagtcaccacttcacttcacctctttctggaaaccaggaagtgagtgcttttggtgaggaaggtgaaggtgattatctggatgactggacagtgctctgtaatggaccctactgggtgagagatggtgaggtgcggttcaaacactcttccactgaggtactgctgtctgtcacaggagaacaatatggtcgacctatcagtgggcaaaaagaggtgcatggcatggcccagccaagtcagaacaactactggaaagccatggaaggcatcttcatgaagcccagtgagttgttgaaggcagaagcccaccatgcagagctgtgaatctagaggctctgagccactgttaacgcacaatgttcacagacatctgttgctgcctcaccttgggatccctgccacaagttccttgggcagtggccatgtcaccattgagatgaagatatacaacagaaaatagtggctgtgtttggaagcttcagccctgcacatttgaactagtcactctcccagacttgcgtgggtcagttctttctgagtagaggacttgctggtaaaggggcagatgctttttattagtactgataaaacaaactgagggaaacatccctcttagctgggaaacttttactcttcaggagcttggcatcatggactgttaatgtatgtgattttccccctattttctctctccaaaatgataaaaacaataattttattatga

SEQ ID NO: 3119 - DNA, 1517 bp, Homo Sapiens
  NM_006925
gtggagcgccagagctgctaagtgcgtcagttgtggagtggcgtagacgagttaagtcctggtctgcgtggaggtcgacgactccgtcgcagactacggacctgtctgggtctcagccgccaaagaccccgtccggaagtactagccggacatcatgagtggctgtcgggtattcatcgggagactaaatccagcggccagggagaaggacgtggaaagattcttcaagggatatggacggataagagatattgatctgaaaagaggctttggttttgtggaatttgaggatccaagggatgcagatgatgctgtgtatgagcttgatggaaaagaactctgtagtgaaagggttactattgaacatgctagggctcggtcacgaggtggaagaggtagaggacgatactctgaccgttttagtagtcgcagacctcgaaatgatagacgaaatgctccacctgtaagaacagaaaatcgtcttatagttgagaatttatcctcaagagtcagctggcaggatctcaaagatttcatgagacaagctggggaagtaacgtttgcggatgcacaccgacctaaattaaatgaaggggtggttgagtttgcctcttatggtgacttaaagaatgctattgaaaaactttctggaaaggaaataaatgggagaaaaataaaattaattgaaggcagcaaaaggcacagtaggtcaagaagcaggtctcgatcccggaccagaagttcctctaggtctcgtagccgatcccgttcccgtagtcgcaaatcttacagccggtcaagaagcaggagcaggagccggagccggagcaagtcccgttctgttagtaggtctcccgtgcctgagaagagccagaaacgtggttcttcaagtagatctaagtctccagcatctgtggatcgccagaggtcccggtcccgatcaaggtccagatcagttgacagtggcaattaaactgtaaataacttgccctgggggcctttttttaaaaaacaaaaaccacaaaaattcccaaaccatacttgctaaaaattctggtaagtatgtgcttttctgtgggggtgggatttggaaggggggttgggttgggctggatatctttgtagatgtggaccaccaaggggttgttgaaaactaattgtattaaatgtcttttgataagccttctgctcacatttttgtgaatgtctgaagtatatagtttgtgtatattgacagagctcttttataactaaagcaaatttaatttttttgtactagaaaaaaatttgaacattttagttcttggttataaaaatgttaattcagaattagtttaatgccttaattaaactaattaatagctttggacacttaaaagagctctaaatttgcttgtacataaaggcttaatttgttttccttgttagggtcaagggtgtcctccactctttaacagctgctggacagacacattagagcagctgtttgttattgataataaaatattataaaacta

SEQ ID NO: 3120 - DNA, 4450 bp, Homo Sapiens
  NM_006927
cgggcggacgagagagctgcgagctaacgggtccggacgacggcggcggcggcggcggcggcggcgacggctttctgcgcgggcggcggcggcggccggagcggcgagcatggcccgcgcggcgccgggcgctgactgagggtcgtgctgcggcagcctggcgcccgacatgtgaaggggaacctgccaggggattactgtgagctcacagcaggataggctggccccgggggagtggggatgggcagaacctgggccaggagtattaggaaggagacctggaccctggtagggagctcagcacaagctcgcctgacccagatggtattggacacagtgccccgctgaacagcagctgttcccagcgccagaggaccccacagccacagtaggagctttgcgacccctacgcaactgcagctggggctggggccaccaggagaagggaccagcacctcagatgggaagcagaagggcaagacctactgcggaaaggatctcgatctctgcagcggagttttcccacactcacagagcttcctgtttttgtcctctcagggttggggtctggctcccctcctctggcagaggttttgggccaggaggtgggacaacacttgcatggaacccaagtcccctgaagcccctgtgctctctgttgtgattggagttctagggcttccccgctgccgggaacgaggggccgcctcattgtctgctcatgaaccacaaggaccccgactgctccagactggattatttcaagccgccaaagagggggacccctagagctggcagccagcaatcccaagggactagagggctgcaatggactgacctccccctcaccagggtggcaggagaggcagagcctctgtggcctagctagtgacggagagacccgatgaagccctaagcaggggccccgcctgactcagggacaggacagccactcctgccaacgtgtgttctccctacatgagggagggcgtggcaagggacccctgccactgtcccctgctgcagcacgtgcccctatgccctttgcatgtggtgccagaataggcaggctacgccgtggctggcccctcagcgggctgggaaaagagtggccacggtgaccgtcacccgcctgccggcaccatgaagtgctccctgcgggtgtggttcctctccgtggccttcctgctggtgttcatcatgtccctgctcttcacctactcgcaccacagcatggccacgctcccctacctggactcaggggccctggatgggacgcaccgggtgaagctggtgcccggctatgccggcctgcagcgcctcagcaaggagaggctctcgggcaagagctgtgcctgtcgccgctgcatgggcgatgccggtgcctccgactggtttgacagccactttgacggtaacatttcccccgtctggacccgagagaacatggatcttccaccggacgtccagaggtggtggatgatgctgcagccccagttcaagtcacacaacaccaatgaggtgctggagaagctgttccagatagtgcctggcgagaacccctaccgcttccgggacccccaccagtgccggcgctgtgccgtggtggggaactcgggcaacctgcggggctctggctatgggcaggacgtggacgggcacaacttcatcatgaggatgaatcaggcgccaaccgtgggctttgagcaggatgttggcagccgaaccacccaccatttcatgtaccctgagagtgccaagaacctgcccgccaacgtcagcttcgtgctggtgcccttcaaggtcctggaccttctgtggatcgccagcgccttgtccacggggcagatccgattcacctacgccccagtgaagtccttccttcgagtggataaagaaaaggtccagatctacaacccagccttcttcaagtatatccacgacaggtggacagagcatcacgggcggtacccttccacggggatgctggtgcttttctttgccctgcatgtgtgtgatgaggtgaacgtgtacgggttcggggccgacagccggggcaactggcaccactactgggagaacaaccggtacgcgggcgagttccggaagactggcgtgcacgacgcggacttcgaggcccacatcatcgacatgctggccaaggccagcaagatcgaagtctaccggggcaactgagccgggcctcgccgcgacccttccggcccatctatcgggcaccggggctccggcccgggacccaggaccagcaacccgcgaccaatcatgctgcagcccaggggcgtctgctgtgccccgccaatcacgagactgggggaccggccgggcctggcaccaatctgcgctgcggtcgggcggagcttctgtttctcccagccaatcatgtgactcaaggaaaacttccggcgctgtgtccagtctcctccaatcaatggccttcgggggcgggccagcggccgctcaatccccactccctcatgctttgggttagggttttctttcacgctttctgaggaggagagcatggcgcgggcctcggcgaagcacttccgtcagcctcgggcggaggatcgtcttagtagctggccagacctggaggagagcgggcggtctttgcgggcctcaggagataggtggccgcccggcccctttccccgcctgcccggataggtgcgtgcagacccaccaaagaaaagcggtcgctgcgggacccccagtcccacctcggccgcgctgtgggatggctgcgcccccagggcttcctgcgtctccaggaagccgggagtggcgccctctgcggggtggggtgctcccgggccgaactccggacaggtggaggggacagggcagagctcgaggaagccctgtccccttcagtgcaaggtgctgtcactcacgtgtgccctcgaccctcccgttcacccgcagccttctcagcgcctctccctgggccggaggcctcctcaccagcctacctgttgctctggaaaaaaatcccgtcccccgactccgtccctacccccagtcttcggccggctctggcccctggggagggggctgcacggcggaaggaggctggctatgggcccggctgcccgctgcatgtacctcctcctccacccatcgcctcttgcctgggggtaactttgcctggggctcattctttggttaagctgaagctgccgtgggtggccaaaccgcagattctttgcaaattctgagctggcagagctcgcagccgggagccggccggggaagaggagacttgcgcgccgcaagccgcctgcctccaccctgctctccatctcccgctctagaagggctgggaagctcgcggccggggttccacctggaagctgcttgcatggctgaacccagcttaggtccctgacggggctgctggtggaattctcccccttcgaagctggggaggtttaggagggggaaggcttctgtgaagctctcaaaccactaatagagccccctccccaacagtgacggcgcagatgctcccccttttcttagttgacaccaccaggcagcttcctggccgttggtaggttcctgcagctggctgagggaacagggaccggcaggggactttgttaggggagggttgggatgggcagtgggcccctgaaagttaatatattggaacctagctcgagtgtcgttctttccaattccgaaagtagaaagagtaaaaataggggtgattggggtggggttagtagaatgcctctctcagggcgctcccccctcccccaccgttttagagagctaggcctcagccagtcttgccactcccatctcagtgcttcctgaagaggctgttttgagtgttgatgaaaagcaatgcaattatgccaaacagtattgagcagaataatttatttcttttttttcttttgctttaaatcatgaatcccgccaggtacggtggctcacacctgtcatcccagcactttgggaggccaaggcgggcggattacttaatacttaaggtcaggagttcgagaccagcctggccaatatggtgaaacctcgtctctaccaaaaaaaaaaaaaaatacaaaaattagccaggcgcagtggtgcgcacctgtaatcccagctacttggaaggctgaggcaggagaatcccttgaaccgaggaggcgaaggttgcagtgagccgagattgtgccactgcactccagcctgggcgacagagcaagaccctgtctcaaaaaaattaaatcatgaatccccatcctggaagaggtaggtcccagcatccagccagattttctgcaatagtaatttaaacacacttttttatttccttccctttctgaattaaaaggaacaaaaaactgtctagtccttcattgttctgaaatgggcatgatggaagaaggcgggtctggtaggatagctgtgactgataatg

SEQ ID NO: 3121 - DNA, 4187 bp, Homo Sapiens
  NM_006929
cgtagcgcccgcagagcaacgcaaagaggaagaacagagaaacggctatgagaaaaagggccgaagagtgagaagcagagggccttacccgagggggcggcaaccgggggccccacggtctccggccgcgcccgcgctggccgctgatagcgggctcacaacgatgacgtagcgaggagcggaaaacgcggtaaccaaggcggccccaggcgcgcacttccgcccggccttccaccggtccaggtctgcccctccgcagcgatagttcacgctctcggcggggctgtaccggaagttgcctctacttccgcccgttccggggcggggcttacttcgcagcgactacttgccgcacttccgggctgccaggcagctgctgtggctccaggatgatggagacagagcgacttgtgctaccccctccagatcccctggacctaccccttcgggccgtggagctcggatgcacggggcactgggagctgctgaacttgcctggagctccagagagtagccttccccatggcctccctccttgtgccccagatctgcagcaagaagcagaacagttgtttctgtcatccccagcctggctgcctctgcatggtgtggagcactcagcccgaaaatggcagaggaagacggatccctggtctcttttggctgtcctgggagccccagtcccatccgacctacaggcccaaagacacccaaccacaggccagatactgggttacaaagaggtcttgctggagaacacaaatctctcggctacaacctccttgtctcttcgccggcctccagggccagcctcccagtccttatggggaaatccaactcagtatcccttctggccaggggggatggatgaacccaccataacagatctgaacacacgggaggaggctgaggaggagatagactttgagaaagatcttcttactattccacctggtttcaagaaaggcatggactttgcaccaaaagattgtccaactccagctcctggactactaagccttagctgtatgttggagcctctggatttgggtgggggtgacgaggatgagaatgaggcagtgggacagccaggaggtcccagaggggacactgtttcagcctctccctgcagtgctcccctggcccgagcaagcagcttggaagacctagtgttgaaggaagcgtccacagctgtatccaccccagaggccccagagcctccatctcaggagcagtgggccatccctgtggacgccacctcccctgttggtgatttctatcgcctcattccccagccagccttccagtgggcatttgagccagatgtgtttcagaaacaggccatcctgcacttggaacggcatgactctgtctttgtcgcagctcacacatctgcaggaaaaacagttgtggctgaatatgccattgccctggcccagaaacacatgacacgcaccatctacacttcgcccatcaaggccctgagcaaccagaagttccgggacttccgaaacacattcggggatgtggggctgctcaccggggatgtacagctgcatccggaggcctcctgcctcatcatgaccacagagatccttcgctccatgctgtacagtggctcagatgttattcgggacctggagtgggtcatctttgatgaggttcactatatcaacgatgtcgagcgtggggtcgtgtgggaggaggtgcttatcatgctacctgaccacgtttctatcatccttctgagtgccaccgtccccaacgcccttgagtttgctgactggattgggcggctgaagcgtcgtcagatctatgtgattagcactgtaacccgccccgtgcccctggagcactatcttttcacagggaacagctccaagacccagggggagctctttttgttgctggactcccgaggagccttccatacaaaagggtactatgcagctgtggaggccaagaaggagagaatgagcaaacacgcccagacctttggggccaagcagcccacacatcaggggggccctgcacaggaccgcggagtgtacctgtccctcctggcctccctccgcacacgtgcccagttgcccgtggtggtgttcaccttctcccggggccgctgtgatgagcaggcctcaggcctcacctcccttgacctcaccaccagttcggagaagagcgagatccacctcttcctgcagcgctgccttgctcgcctccgtggctctgaccgccagctgccccaggtcctgcacatgtcagagctcctgaatcgcggcctgggtgtgcaccatagcggcatcctgcccatcctcaaggagatcgtggagatgctcttcagccgtggcctggtcaaggtcttgtttgccacagagacctttgccatgggagtaaacatgcctgctcgtacagtagtgtttgactccatgcgcaaacacgatggctccaccttccgggacctgctccctggggagtatgtgcagatggcaggccgggcagggcggaggggcctggaccccacaggcaccgttatcctgctctgcaagggccgagtgcccgagatggcagacctgcaccgcatgatgatggggaagccgtcccagctgcagtcccagttccgcctcacgtacactatgatcctcaacttgctgcgagtggatgccctcagggtggaggacatgatgaagaggagcttctctgagtttccctcccgcaaagacagcaaggcccatgaacaggccctggctgaactgaccaagaggctgggagctttggaggagcctgacatgactggccaactggtcgacctgcctgaatattacagctggggggaggaactgacagagacccagcacatgatccagcgacgcatcatggagtctgtgaacgggctgaagtctctctcagcaggaagggtggtggttgtgaagaatcaggagcatcacaacgcattgggagtgatcctacaggtctcctcgaactccaccagcagagtattcacaaccctggtcttgtgtgataagcccttgtcccaggacccacaggacagggggccagccactgcagaggtgccctatccagatgacctcgtgggattcaagctgttcctgcctgaagggccttgtgaccacaccgtggtcaagctccagccaggagatatggctgccatcaccaccaaggtgctccgggtgaatggggagaagatcttggaggacttcagcaagaggcagcagccaaaattcaagaaggatcctccccttgcagccgtgaccactgctgtccaggaactgctgcgtctggctcaggcccacccagccggacctcccaccctcgaccctgtcaatgacctgcagctcaaagatatgtcagttgtagagggtgggctccgggcccggaagctggaggagctgatccagggggctcagtgtgtacacagcccccgttttcctgcccagtacctgaagctgcgggagcgaatgcagatacagaaggagatggagcggctgcgcttcctactgtcggatcagtcattgctgctgcttcctgagtaccatcagcgagtagaggtgctccgaaccctgggttatgtggacgaggcgggcactgtgaagctggcagggcgggtggcttgtgccatgagcagccatgagttgctcctcactgagctcatgtttgacaatgcactgagcaccctgcggcctgaggagattgctgccttgctctctggcctggtctgccagagccctggggacgctggggatcagctcccaaacaccctcaagcagggaatagaacgtgtccgggctgtggccaagcggattggtgaggtccaggtggcttgtggcctgaaccagacggtggaggaatttgtgggggagctgaattttgggctggttgaggttgtatatgagtgggcccggggcatgcccttctccgagttggcagggctctcagggacccctgagggcctggtggtccgctgcattcagcgcctggctgagatgtgtcgctcactgcggggggcagcccgcctggtaggagagcctgtgctgggtgccaagatggagacagcggctaccttgctacggcgggacatcgtatttgcggccagcctctacacccagtgaatgccccatgtaaaaacatgatgataaaacagcaaagcacaaaaaaaaaaaaaaaaa

SEQ ID NO: 3122 - DNA, 3938 bp, Homo Sapiens
  NM_006931
agattgcttcaggggggtggggtggggtggggtggggctgggggcttgtcgccctttcaggctccaccctttgcggagattataaatagtcatgatcccagcgagacccagagatgctgtaatggtaagactttggatccttcctgaggacgtggagaaaacttgctgctgagaaggacattttgaaggttttgttggctgaaaaagctgtttctggaatcacccctagatctttcttgaagacttgaattagattacagcgatggggacacagaaggtcaccccagctctgatatttgccatcacagttgctacaatcggctctttccaatttggctacaacactggggtcatcaatgctcctgagaagatcataaaggaatttatcaataaaactttgacggacaagggaaatgccccaccctctgaggtgctgctcacgtctctctggtccttgtctgtggccatattttccgtcgggggtatgatcggctccttttccgtcggactcttcgtcaaccgctttggcaggcgcaattcaatgctgattgtcaacctgttggctgtcactggtggctgctttatgggactgtgtaaagtagctaagtcggttgaaatgctgatcctgggtcgcttggttattggcctcttctgcggactctgcacaggttttgtgcccatgtacattggagagatctcgcctactgccctgcggggtgcctttggcactctcaaccagctgggcatcgttgttggaattctggtggcccagatctttggtctggaattcatccttgggtctgaagagctatggccgctgctactgggttttaccatccttcctgctatcctacaaagtgcagcccttccattttgccctgaaagtcccagatttttgctcattaacagaaaagaagaggagaatgctaagcagatcctccagcggttgtggggcacccaggatgtatcccaagacatccaggagatgaaagatgagagtgcaaggatgtcacaagaaaagcaagtcaccgtgctagagctctttagagtgtccagctaccgacagcccatcatcatttccattgtgctccagctctctcagcagctctctgggatcaatgctgtgttctattactcaacaggaatcttcaaggatgcaggtgttcaagagcccatctatgccaccatcggcgcgggtgtggttaatactatcttcactgtagtttctctatttctggtggaaagggcaggaagaaggactctgcatatgataggccttggagggatggctttttgttccacgctcatgactgtttctttgttattaaaggataactataatgggatgagctttgtctgtattggggctatcttggtctttgtagccttctttgaaattggaccaggccccattccctggtttattgtggccgaactcttcagccagggcccccgcccagctgcgatggcagtggccggctgctccaactggacctccaacttcctagtcggattgctcttcccctccgctgctcactatttaggagcctacgtttttattatcttcaccggcttcctcattaccttcttggcttttaccttcttcaaagtccctgagacccgtggcaggacttttgaggatatcacacgggcctttgaagggcaggcacacggtgcagatagatctggaaaggacggcgtcatggagatgaacagcatcgagcctgctaaggagaccaccaccaatgtctaagtcgtgcctccttccacctccctcccggcatgggaaagccacctctccctcaacaagggagagacctcatcaggatgaacccaggacgcttctgaatgctgctacttaattcctttctcatcccacgcactccatgagcaccccaaggctgcggtttgttggatcttcaatggctttttaaattttatttcctggacatcctcttctgcttaggagagaccgagtgaacctaccttcatttcaggagggattggccgcttggcacatgacaactttgccagcttttcctcccttgggttctgatattgccgcactaggggatataggagaggaaaagtaaggtgcagttcccccaacctcagacttaccaggaagcagatacatatgagtgtggaagccggagggtgtttatgtaagagcaccttcctcacttccatacagctctacgtggcaaattaacttgagttttatttattttatcctctggtttaattacataattttttttttttaactttaagtttcaggatacatgtgccgaatgtgcaggtttgttacataggtatatatatgccatgatggaaatatttatttttttaagcgtaattttgccaaataataaaaacagaaggaaattgagattagagggaggtgtttaaagagaggttatagagtagaagatttgatgctggagaggttaaggtgcaataagaatttagggagaaatgttgttcattattggagggtaaatgatgtggtgcctgaggtctgtacgttacctcttaacaatttctgtccttcagatggaaactctttaacttctcgtaaaagtcatatacctatataataaagctactgatttcctttggagcttttttctttaagataatagtttacatgtagtagtacttgaaatctaggattattaactaatatgggcattgtagttaatgatggttgatgggttctaattttggatggagtccagggaagagaaagtgatttctagaaagcctgttcccctcactggatgaaataactccttcttgtagtagtctcattacttttgaagtaatcccgccacctatctcgtgggagagccatccaaataagaaacctaaaataattggttcttggtagagattcattatttttccactttgttctttaggagattttaggtgttgattttctgttgtattttaactcatacctttaaaggaattccccaaagaatgtttatagcaaacttggaatttgtaacctcagctctgggagaggatttttttctgagcgattattatctaaagtgtgttgttgctttaggctcacggcacgcttgcgtatgtctgttaccatgtcactgtggtcctatgccgaatgccctcaggggacttgaatctttccaataaaccaggtttagacagtatgagtcaatgtgcagtgtagcccacacttgagaggatgaatgtatgtgcactgtcactttgctctgggtggaagtacgttattgttgacttattttctctgtgtttgttcctacagcccctttttcatatgttgctcagtctccctttcccttcttggtgcttacacatctcagaccctttagccaaacccttgtcagtgacagtattttggttcttagttctcactgttccctctgctcctggagcctttgaataaaaatgcacgtagctgaggccggatgcggtggctcacgcctgtaatcccagcactttgggaggcctaggcgggcggtcaggggttcgagaccagtctggccaacatcgtgaaaccctgtctctactaaaaatgcaaaaattagccgggcgtggtggcgggcgcctgtaatcccagctacttgggaagctgaggcgggagaatcatgtgaacccgggacgcaggggttgcagtgagcggagatcgcatcattgcactctagcctgggccacagggcgagactccgtctcaaaaaaaaaaaaatgcacatagctatcaagtgtgctttagcttgaaaaggtgaccttgcaacttcatgtcaacttctggctcctcaaacagtaggttggcagtaaggcagggtcccatttctcactgagaagattgtgaatatttccatatggattttctattgttactctggttctttgttttaaaataaaaattctgaatgtacacgaca

SEQ ID NO: 3123 - DNA, 3129 bp, Homo Sapiens
  NM_006932
cagaatccaggggacggttgctgagcgggcctgggacagcgggtcgcggcacctccggcctgcgcgtgtctaatccgtctgtcgggtcccgaaagagctaagccgagcctgcgccggacgggtgggctggactgagagaattctctgagctggtgacaggtgccacaggcactggggatctcaccagaaaggaaccgacggagctaggggccagcgagatggcggacgaggccttagctgggctggatgagggagcccttcggaagctgctggaggtcacagcagatctggcagagcggcggcgcatccgctcagccatccgggaactgcagcggcaggagctggagcgcgaggaggaggccctggcatccaagcgtttccgtgccgagcggcaggacaacaaggagaactggctgcactctcagcagcgggaagctgagcagcgggctgccctggcacggctggcagggcagctggagtccatgaacgatgtggaggaattgactgcactgttgcgaagcgctggtgagtatgaggagcgcaagctgatccgagctgccatccgccgtgtacgggctcaggagattgaggctgccaccttggctgggaggttgtacagcgggcgtcccaacagtggctcaagagaggacagcaaggggctagcggcacacaggctggaacagtgtgaggtgccagagcgagaggaacaggaacagcaggcagaggtttcaaagccaacccccacccctgaaggcaccagccaggatgtgaccacagtgacactcctgctgcgagccccacctgggagcacatccagctcacctgcctcacccagcagttcacccacccctgcctctcctgagcctccattggagcctgccgaggcccagtgccttacagctgaggttccaggcagcccagagccaccccccagcccacccaagaccaccagccctgagcctcaggagtctccaacgctccccagcactgagggccaggtggtcaacaagcttctgtctggccccaaagagacccctgctgcccagagccccaccagaggcccctctgacaccaagagagcagacgtggctggaccccgaccctgccaacgctccctgtcggtgctcagcccccgccaaccagcccagaaccgagagtccaccccccttgccagcggaccttcctcattccagcgggctggctctgtgcgggatcgtgtccacaagttcacatctgattctcctatggctgctaggctccaggatggcacaccccaggctgccctaagtcccctgacccccgcaaggctcctgggcccctccctcaccagcaccacccctgcctcctcctccagcggctcctcctctcggggccccagtgatacctcctcccggttcagcaaggagcaacgaggagtagcccagcccctggcccagcttcgaagctgcccccaggaggagggccccagggggcggggcttggctgctaggccccttgaaaacagagcaggggggcctgtggcacgttcagaggagcctggtgccccgctgcccgtggccgtcggcactgccgagccagggggcagtatgaagaccacattcaccatcgagatcaaggacggccgtggccaggcctccacaggccgggtgctgctgcccacaggcaaccagagggcagaactgacactggggctgcgggcgcccccgaccctactcagcaccagtagtgggggcaagagcaccatcacccgtgtcaacagccctgggaccctggctcggctgggcagtgtcactcatgtcaccagcttcagccatgccccccccagtagccgaggaggctgcagcatcaagatggaagcagagccagcagagcctctcgctgcagcagtggaagcggccaatggggctgagcagacccgagtgaacaaagcaccagaagggcggagccctctgagcgctgaggagctgatgactattgaggatgaaggagtcttggacaagatgctggatcagagcacggactttgaagagcggaagctcatccgggctgcacttcgtgagctccgacaaaggaagagagaccagcgggacaaggagcgggaacggcggctgcaggaggcacggggccggccaggggaggggcgcggcaacacagccactgagaccaccacgaggcacagccagcgggcagctgatggctctgctgtcagcactgttaccaagactgagcggctcgtccactccaatgatggcacacggacggcccgcaccaccacagtggagtcgagtttcgtgaggcgctcggagaatggcagtggcagcaccatgatgcaaaccaagaccttctcctcttcctcctcatccaagaagatgggcagcatcttcgaccgcgaggaccaggccagcccacgggccggcagcctggcggcgctcgagaaacggcaggccgagaagaagaaagagctgatgaaggcgcagagtctgcccaagacctcagcctcccaggcgcgcaaggccatgattgagaagctggagaaggagggcgcggccggcagccctggcggaccccgcgcagccgtgcagcgatccaccagcttcggggtccccaacgccaacagcatcaagcagatgctgctggactggtgtcgagccaagactcgcggctacgagcacgtcgacatccagaacttctcctccagctggagtgatgggatggccttctgtgccctggtgcacaacttcttccctgaggccttcgactatgggcagcttagccctcagaaccgacgccagaacttcgaggtggccttctcatctgcggagatgctggtggactgtgtgcccctggtggaggtggacgacatgatgatcatgggcaagaagcctgaccccaagtgtgtcttcacctatgtgcagtcgctctacaaccacctgcgacgccacgaactgcgcctgcgcggcaagaatgtctagcctgcccgcccgcatggccagccagtggcaagctgccgcccccactctccgggcaccgtctcctgcctgtgcgtccgcccaccgctgccctgtctgttgcgacaccctcccccccacatacacacgcagcgttttgataaattattggttttcaacg

SEQ ID NO: 3124 - DNA, 5313 bp, Homo Sapiens
  NM_006939
gcggccgccggcgaggcgaggcggcccgcgccctgcctgtcaggccaccggcccggcccgcgggctgcccccgatgcggaggcgctgtcgccggggccatgcagcaggcgccgcagccttacgagttcttcagcgaggagaacagtccgaaatggcggggactgttggtctcggccctgcggaaggttcaggaacaagtgcatcccactctctcagctaatgaagagtctctctattatattgaagagctgatttttcagctgcttaataaattatgcatggcccagccaaggactgttcaagatgtagaggagcgagttcagaagacctttcctcacccaattgataaatgggccattgctgatgcacaatctgctatagaaaaacgaaaacgaagaaatcctcttttactgcctgtggacaaaatccatccttcgttgaaggaagtattagggtacaaagtggactaccatgtatccctatatattgtggctgtactagagtatatctcagctgatattttaaaattggctggtaattatgtttttaatatccggcattatgaaatatctcagcaggacattaaagtgtcaatgtgtgcggataaggttttgatggacatgtttgatcaggatgacataggtttggtttctctctgtgaagatgaacctagttcttctggtgaattaaactactatgatcttgtcagaactgaaatcgcagaagaaagacagtatctacgggaattaaatatgatcataaaagtgtttcgagaagcctttctttctgatagaaagctgtttaaaccttctgatatcgaaaagatttttagtaacatttcagatatacatgaattgactgtgaaacttttaggtttgattgaagacacagttgaaatgactgatgaaagcagtcctcatcccttagctggcagctgttttgaagatttggcagaagagcaagcatttgatccttatgaaacattatcacaggacattctttcaccagagtttcatgaacatttcaataaattgatggccagacctgcagttgctctacactttcagtccattgctgatggttttaaagaggcagttcgttatgtccttccacgtcttatgctggtgccagtgtatcactgttggcactactttgagttactaaagcaattgaaagcatgtagtgaagaacaagaagacagagaatgtttgaaccaagctattactgctctcatgaatctccaaggtagcatggaccgaatttacaagcagtattcacctagacgtcgacctggagatcctgtttgccctttttatagtcaccaattaagaagcaaacacctggctatcaaaaaaatgaatgaaattcagaaaaatatcgatggatgggaaggcaaagatattggacagtgttgtaatgaattcattatggagggaccattgacaagaatcggtgccaaacatgaacggcatatttttctgtttgatggcttaatgatcagttgtaaacctaatcatggccagactcggcttccaggttacagtagtgcagaatacaggttaaaagaaaaatttgtcatgaggaaaatacaaatttgtgataaagaagatacttgtgagcacaagcatgcatttgaattagtatccaaagatgagaacagcataatatttgctgctaagtctgctgaagaaaaaaacaactggatggcagcccttatttctcttcattatcgtagtactctagatcgaatgttagattcagtattattgaaagaagaaaatgagcaaccactgagattaccaagtcctgaagtatatcgttttgtagtaaaagactctgaggaaaacattgtttttgaagacaacttgcaaagtagaagtggcatccccattattaaaggaggaactgtagtgaaattaattgaaaggttaacatatcatatgtatgcagatcccaattttgttcgtacttttcttaccacatatcgttcattttgtaaaccacaggaattgctgagcttactgattgaacggtttgaaattccagagccagaacctactgacgcagacaaattggcaatagagaaaggcgagcagccaatcagtgcagaccttaaaagatttcgcaaggaatatgtccaaccagtacaacttaggatcttaaatgtatttcggcattgggttgaacatcatttttatgactttgaaagagacttggaattgcttgaaagactagaatccttcatttcaagtgtaagagggaaagctatgaaaaaatgggtagagtcaattgctaagatcatcaggaggaagaagcaagctcaggcaaacggagtaagccataatattacctttgaaagtccacctccaccaattgaatggcatatcagcaaaccaggacagtttgaaacatttgatctcatgacacttcatccaatagaaattgcacgtcagctgacacttttggagtctgatctttacaggaaagttcaaccgtctgaacttgtagggagtgtgtggaccaaagaagataaagaaataaattctccaaatttattaaaaatgattcgccataccacaaatctcaccctctggtttgaaaaatgcattgtggaagcagaaaattttgaagaacgggtggcagtactaagtagaattatagaaattctgcaagtttttcaagatttgaataatttcaatggcgtattggagatagtcagtgcagtaaattcagtgtcagtatacagactagaccatacctttgaggcactgcaggaaaggaaaaggaaaattttggacgaagctgtggaattaagtcaagatcactttaaaaaatacctagtaaaacttaagtcaatcaatccaccttgtgtgcctttttttggaatatatttaacaaatattctgaagaccgaagaagggaataatgattttttaaaaaagaaagggaaagatttaatcaatttcagtaagaggaggaaagtagctgaaattactggagaaattcagcagtatcagaatcagccttactgtttacggatagaaccagatatgaggagattctttgaaaaccttaaccccatgggaagtgcatctgaaaaagagtttacagattatttgttcaacaagtcactagaaattgaacctcgaaactgcaaacagccacctcgatttcctaggaaatcaactttttccttaaaatctcctggaataaggcctaacacaggccgacatggctctacctcaggtactttacgaggtcacccaacaccattagaaagagaaccatgtaaaataagctttagtcggattgctgaaactgagctggaatcaacagtgtcagcaccaacctctccaaatacaccatctactccaccagtatctgcttcttcagaccttagtgtatttttagatgtggatctcaacagctcctgtggcagcaatagcatctttgctccagtgcttttgccacattcaaagtctttctttagttcatgtggtagtttacataaactaagtgaagagcccctgattcctcctcctcttcctcctcgaaaaaagtttgatcatgatgcttcaaattccaagggaaatatgaaatctgatgatgatcctcctgctattccaccgagacagcctcctcctccaaaggtaaaacccagagttcctgttcctactggtgcatttgatgggcctctgcatagtccacctccgccaccaccaagagatcctcttcctgatacccctccaccagttccccttcggcctccagaacactttataaactgtccatttaatcttcagccacctccactggggcatcttcacagagattcagactggctcagagacattagtacgtgtccaaattcgccaagcactcctcctagcacaccctctccaagggtaccgcgtcgatgctatgtgctcagttctagtcagaataatcttgctcatcctccagctccccctgttccaccaaggcagaattcaagccctcatctgccaaaactgccaccaaagacttacaaacgggagctttcgcaccccccattgtacagactgcctttgctagaaaatgcagaaactccccaatgaccttagccatatgtagtcattgacactggaatggtatttgtaaagttttttttttaatttattcaaaaaaagacatagtattttagtactttttacaaataatgctcttacaaaaatgctactgatcaaataagcttttaagaattggaaaaataaaaatacaaaagtccttcaccattatcctcaggtgatcagtagcattgccttgtcttggatcctcagtgctgccaaaaggccagtataaagaatttatatttgcactgtaaactctgcaaaaatatggtttaaagtgacatgattgcactgaaaagggatagtgcttttgtgaaatttttcaaatttgagtaatagatgcctttttaaggcagtgaatttacacaaatatgggaggggtatatggtgttactgatttttaaacctctttgaccatcttctagtttttacttctagtttttacatctaggagaattgtgaataacaccaactgttcttaaactctttaatgccatgtcttaaatgccggtatttgctgctgaagacaaaaatgaaaagtaggatgaaaataatagaatggcactgtaagtgtttattattttgtcaaaatgtaaacaaagactacataacccaatgatggagggaaaaagggcatgtatctcattcagatgtgccttttgtttttgcagactatgacgtctttagctaatgaattgcctattgttatggaaaacagttaatatgccatgtatgtacagttttgtttatattgtatatttaaagatactgctaataacctatataaatttaagtgacttgaggcctataatacaatctgctactttactaattcataaattcaaaaaaaattctatggcataggaaccaactgccttgccttcaagacctagtaactttctctataaatctcgtgttaactgaaattttttttaaatatattttttagattggtaatatttaaaccagcaaatacttaaagctttattaaacattttaatcagataagtgagtaaagcttttatttgccatttggatgccttcgttcaaagtgatagagtgttttgctgatagtgctgtagcagcagttgtaaagtagccaaaagccacgttgtttatttactggtttgtggccttttactgtgctttgtatcagagttcttaacaagattaataaatcaccccagtcttaatttttaaaaga

SEQ ID NO: 3125 - DNA, 3893 bp, Homo Sapiens
  NM_006947
gggcagaggtctccccgccccgcccctcgtctcctccaagatggcgagcggcggcagcgggggggtgtcagtacctgcgctgtggagtgaagtgaaccggtatggccagaacggcgacttcacgcgcgctctcaagaccgtcaataagatactacagatcaacaaagatgacgtaactgccctgcattgtaaagtggtatgccttatccagaatggaagtttcaaggaagctttgaatgtcatcaatactcacaccaaagtgttagccaataactctctctcctttgaaaaggcatattgcgagtacaggctgaacagaattgagaatgccttgaagacaatagaaagtgccaaccagcagacagacaaactgaaggagctttatggacaagtgttataccgtttggaacgctatgatgaatgcttagcagtgtatagagatctcgtccgaaactcccaagatgattatgatgaggagaggaaaacaaacctttcagcagttgttgcagctcaaagcaattgggaaaaagtggttccagagaacctgggcctccaagaaggcacacatgagctgtgctacaacactgcatgtgcactgataggccaaggccagctgaaccaggccatgaaaatcctacaaaaagctgaagatctttgccgccgttcattatcagaagacactgatgggactgaggaagacccacaggcagaactggccatcattcatggtcagatggcttatattctgcagcttcagggtcgaacagaggaggctttgcaactttacaatcaaataataaaactaaaaccaacagatgtgggattactagctgtaattgcaaataacatcattaccattaacaaggaccaaaatgtctttgactccaagaagaaagtgaaattaaccaatgcggaaggagtagagtttaagctttccaagaaacaactacaagctatagaatttaacaaagctttacttgctatgtacacaaaccaggctgaacaatgccgcaaaatatctgccagtttacagtcccaaagtcccgagcatctcttacctgtgttaatccaagctgcccagctctgccgtgaaaagcagcacacaaaagcaatagagctgcttcaggaattttcagatcagcatccagaaaatgcagctgaaattaagctgaccatggcacagttgaaaatttctcaaggtaatatttctaaagcatgtctaatattgagaagcatagaggagttaaagcataaaccaggcatggtatctgcattagttaccatgtatagccatgaagaagatattgatagtgccattgaggtcttcacacaagctatccagtggtatcaaaaccatcagccaaaatctcctgctcatttgtccttgataagagaagctgcaaacttcaaactcaaatatgggcggaagaaggaggcaattagtgacctacaacagctgtggaaacaaaatccaaaagatattcacaccctggcacagcttatttctgcttactcacttgtagatccagagaaagccaaagctcttagtaaacacttgccatcgtcagatagtatgtctctaaaagtagatgttgaggctcttgaaaattctgctggtgctacatacattcggaagaagggtggaaaagttactggagatagtcaaccaaaggaacaaggacagggagatttgaaaaagaagaaaaagaaaaagaagggaaaattgcctaagaattatgacccaaaagttaccccagatccagaaagatggctgccaatgcgagaacgttcttactaccggggaagaaagaagggtaaaaagaaggatcagattggaaaagggacccagggagcaactgcaggagcttcatctgaactggatgccagtaaaactgtgagcagcccacccacctccccaagacctggcagtgctgcaacagtatctgcctctacaagtaacatcatacccccaagacaccagaaacctgcaggggctccagcaacaaaaaagaaacagcaacagaaaaagaagaaaggtggaaaaggtggctggtgatgagaatattcttgttgcaggctgtttttaaactagtgtcagtgacactaggaatataataaaggtaacacagcaagaagcacagaactactccctcttcatctccatattttcataatttcttgtgtttcaaatagggaaacatcttcctcaaagtctgcctagtgagatatggcctactggttgcctcatagctttgtacagattatgaggactgaaaataattgggcatttacccatcttggtatctgttgtatcctttatctgtgtgtgctgatttgatcttttttcagtttcacataccttatctaaggtttcccaggatttaaacagaaactacttctatgatttcagctggagtctgaagatacttgtttctgttcaagtcccactttaaattatgtcttaggagactgaaagtggaatcttctgagcattcctaaatatctgcttagaaatatcatgtgataaagagggaccttcttaatacactgatgttcttcactaaatggatggccacaagaaaaataaagtaaatgtcttaaataatttaaccataaattttctgtcatgtgatactggaatatgggatacttttcatgtttatatatatatatatatgtatatatatatacatatatatatatatataaacatgaaatatatatatatggctcctttgtgccccatgtcattttcagattatggtagcatgctgatacagcaccatgaaagaactcaaggaaaatatatcaatgtaagaagttcactcttagacccagtgttctgaggtcacatgggtttggactgtctcaatcagaaagattaatgactgttatcaagaacatgaacattggcttcctccatagagaagaaatcagtatctgagttgcataccaggcagtattaaaatctaacaggtctgtttggcccattgatagatactcaaatggtgtctccttctggttatggattttgaccattgattacctttctcaatgtaatgaagtattttacagtcaatttgtggtgtaaatgttgctcttgtctttccttgcttacaaactactttcacattgaacagctgtgagacagacatattgagatgcctgcccttgttagtattcattttatgctgcccaagatatcatttaatttagacttaacaagtatttccttgtgattatattactctgtccttgttaataaagtgctgctgtgtttgactctgaacatactaccaaaacttcttcaaagagttttttatgaaagactttcctcctttacaagaaagaaatggggtgctgcctttctgtttagtaaaagcagaatttgcagtggcatctaaagagatcttttttaaataaaaattatgtattgtggcataatcctttttttgagctctacagagaacagtcttttggtaatagtggcaggtatttattccttctgaatatataccccattataggaataactgttacttatttaggattccatcattgaaaattttgacccaaggcacagcagtgaaatttatagttctcaatttagttgtcattattgacaggcattggtattattagtcattgctaagcaactaaaacttcatcagttcaaataagttttaattgtcaaatgaagtataaacacatgaactttctagaaatatttcctcttttggataggtctttaaccagttcatatatatactttgtcaaatatatggatgtgtatgtgtacatttataagaaccagtatggatacatccattcactgtggtacattttaaaataaaatattttagcagtgaatatggaaaaaaaaaaaaaaaaaa

SEQ ID NO: 3126 - DNA, 1910 bp, Homo Sapiens
  NM_006949
accttgggacacacccggaagcggcggcggcgcccctcggggaagatggcgccctcggggctgaaggcggtggtgggggaaaaaattctgagcggagttattcggagtgtcaagaaggatggggagtggaaggtgcttatcatggatcacccaagcatgcgcatcttgtcttcctgctgcaaaatgtcagatatcctggctgagggcatcaccattgttgaagacatcaacaaacggcgggaacccattcccagtctggaggccatttatttgctgagccccacggagaagtcggttcaggccctgatcaaagacttccaggggaccccgactttcacctacaaagcggcccatatcttcttcaccgacacctgccccgagcccctgttcagtgagctaggccgctctcgtctggcaaaggtggtgaagacgttgaaggagattcaccttgccttcctcccctacgaggcccaggtgttctccctcgatgctccccacagcacctacaacctctactgccccttccgggcagaggagcgcacgcggcagctcgaggtgctggcccagcagattgccacgctgtgcgccaccctgcaggagtacccggccatccgctaccgcaagggcccagaggacacagcccagttggcccacgccgtcctggccaagctgaacgccttcaaggcagacactcccagtctgggcgagggcccagagaaaacccgctcccagctgctgataatggaccgggcagctgaccccgtgtccccactactgcatgagctcacgttccaggccatggcgtatgatctgctggacatagagcaggacacatacaggtatgagaccaccgggctgagcgaggcgcgggagaaggccgtcttgctggacgaggacgatgacttgtgggtggagcttcgccacatgcatatcgcagatgtgtccaagaaggtcacggagctcctgaggaccttctgtgagagcaagaggctgaccacggacaaggcgaacatcaaagacctatcccagatcctgaaaaagatgccgcagtaccagaaggagctgaataagtattctacgcacctgcatctagcagatgattgtatgaagcacttcaagggctcggtggagaagctgtgtagtgtggagcaggacctggccatgggctccgacgcagagggggagaagatcaaggactccatgaagctgatcgttccggtgctgctggacgcggcggtgcccgcctacgacaagatccgggtcctgctgctctacatcctccttcggaatggtgtgagtgaggagaacctggccaagctgatccagcatgccaatgtacaggcgcacagcagcctcatccgtaacctggagcagctgggaggcactgtcaccaaccccgggggctcggggacctccagccggctggagccgagagaacgcatggagcccacctatcagctgtcccgctggaccccggtcatcaaggatgtaatggaggacgccgtggaggaccggctggacaggaacctgtggcccttcgtatccgaccccgcccccacggccagctcccaggccgctgtcagtgcccgcttcggtcactggcacaagaacaaggctggcatagaagcccgggcgggcccccggctcatcgtgtatgtcatgggcggtgtggccatgtcagagatgagggccgcctacgaggtgaccagggccaccgagggcaagtgggaggtgctcattggctcctcacacatcctcaccccgacccgcttcctggatgacctgaaggcactggacaagaagctggaggacattgccctgccctgacccctggccccgccccctacccctccctttccagagaaataaactcttcccgtcgctctgccaaaaaaaaaaaaaaaaaaaaa

SEQ ID NO: 3127 - DNA, 3210 bp, Homo Sapiens
  NM_006950
agtctgcggtgggcagcggaggagtcgtgtcgtgcctgagagcgcagctgtgctcctgggcaccgcgcagtccgcccccgcggctcctggccagaccacccctaggaccccctgccccaagtcgcagccatgaactacctgcggcgccgcctgtcggacagcaactttatggccaatctgccaaatgggtacatgacagacctgcagcgtccgcagccgcccccaccgccgcccggtgcccacagccccggagccacgcccggtcccgggaccgccactgccgagaggtcctccggggtcgccccagcggcctctccggccgcccctagccccgggtcctcggggggcggtggcttcttctcgtcgctgtccaacgcggtcaagcagaccacggcggcggcagctgccaccttcagcgagcaggtgggcggcggctctgggggcgcaggccgcgggggagccgcctccagggtgctgctggtcatcgacgagccgcacaccgactgggcaaaatacttcaaagggaaaaagatccatggagaaattgacattaaagtagaacaggccgaattctctgatctcaaccttgtggcccatgccaatggtggattctctgtggatatggaagttcttcggaatggggtgaaggtcgtgcggtctctgaagccggattttgtgctgatccgccagcacgccttcagcatggcacgcaacggagactaccgcagtttggtcattgggctgcagtatgctggaatccccagtgttaactccttgcattctgtctacaacttctgtgacaagccctgggtgtttgcccagatggttcgactgcataagaaactggggacagaagaattccctctaattgatcagaccttctaccccaatcacaaagaaatgctcagcagtacaacgtaccccgtggttgtgaagatggggcacgcacactctgggatgggcaaggtcaaggttgacaaccagcatgacttccaggacatcgcaagtgtcgtggcactgaccaagacgtatgccactgccgagcccttcatcgatgccaaatatgacgtgcgtgtccagaagattgggcagaactacaaggcctacatgaggacgtcagtgtcagggaactggaagaccaatactggctctgcgatgctggagcaaattgccatgtctgacagatacaagctgtgggtggacacgtgctcagagatttttgggggactggacatctgcgcagtggaagcgctacatggcaaggacggaagggatcacatcattgaggtggtgggttcctccatgccgctcattggtgaccaccaggatgaagacaaacagctcatcgtagagctcgtggtcaacaagatggctcaggccctgccccggcagcgacagcgggatgcctcccctggcaggggctcccatggccagactccgtccccaggggccctgcccttgggccgccagacctcccagcagcccgcagggcccccggctcagcagcgacccccaccacagggcggccctccacagccgggtccaggcccccagcgccagggacccccattgcagcagcgcccgcccccgcagggccagcagcacctttcaggccttggacccccagctggcagccccctgccccagcgccttccaagtcccacctcagcgccccagcagcccgcgtcccaggccgcgccgccgacccagggtcaaggccgccaatcccggccagtggcgggaggccccggggcgcctccagcagcccgcccgcccgcctctccgtctccccagcgccaggcgggccccccacaggctacccgtcagacatccgtctctggcccggctccgccaaaggcctctggggccccaccgggcgggcagcagcgccagggcccgccccagaaacccccaggcccagccggccccacacgccaggccagccaggcgggtcccgtgccccgcactgggccacccaccacgcagcagcctcggcccagcggcccgggccccgctggacgtcccaaaccacagctggcccagaaacccagccaggacgtgccgccacccgccaccgccgctgcagggggacctccgcacccccagctcaacaaatcccagtctctgaccaatgccttcaaccttccagagccagccccgcccaggcccagccttagccaggacgaggtgaaagctgagaccatccgcagcctgaggaagtctttcgccagcctcttctccgactgataccccactctgagaaccccaaaatccctgggcaacccttctctgggccctgaatccatttctcacttttggagtctccaaatcccttgagaacccatctcccggttctccaagattccacctctcattcctcaagatccccgagtaccttgagaaacctgactcctcctggccctaaatccggttctcacatgtggaatccccaagtccttttagaaccccactcgtggtcacttcaggatctacttctgttttagaacctccacattcctgaagacctccgcccctggtttccccagagggcgttttccttcctggaagtgcccaaataccaggcaacccattgcagaatcccttcctggagccctgaagttcctggaaaaccctatttttggtcccaaatctctccagcacacctatttcccatcataattttccaaatcctcaagaaacccctactgttgagccccttcccatggatcttccatccctctgaagatccacatcttcaaatgccacccaacacctagccccacaaggatttcccttcaccagctcccctcaacctcattcaataccttgggagcccctcccacttccaggacccctcggttcccccagggaccccctccccagtttcctgcctctgacagctgtctttaaatatgcaaactccacccatcttcccagaatcctttgcacacggaaggccagtggtctccgcttccccacctttgctgtggtgtctgtgtctgtgactgacgtggcctccttttgtgccgtgcttggcatatgtggtcctcgttcatcgtgccgcctgtggtgatgcgtgcagtgacgctgtttatgtggtccgcacctccccctgaccttcactccttgcctggactcaccccacccctcagcggctctgaaccccaagagaagagtcgggaaacaaaataaacaagcaaaggcccagca

SEQ ID NO: 3128 - DNA, 3283 bp, Homo Sapiens
  NM_006951
gcgcgaggtggctcagccgcaagatggcggcgctggcggaggagcagacggaggtggcggtcaagctagagcctgagggaccgccaacgctgctacctccgcaggcgggggacggcgcaggcgagggtagcggcggcactaccaacaacggccccaacggcggcggcgggaacgttgcggcgtcgtcgtccactggcggggatggcgggacccccaagcccacggtggctgtctccgccgctgccccggcgggggcggccccggtgcccgccgctgctccggacgccggcgctccgcatgaccgacagactctactggccgtgctgcagttcctacggcagagcaaactccgcgaggccgaagaggcgctgcgccgtgaggccgggctgctggaggaggcagtggcgggctccggagccccgggagaggtggacagcgccggcgctgaggtgaccagcgcgcttctcagccgggtgaccgcctcggcccctggccctgcggcccccgaccctccgggcactggcgcttcgggggccacggtcgtctcaggttcagcctcaggtcctgcggctccgggtaaagttggaagtgttgctgtggaagaccagccagatgtcagtgccgtgttgtcagcctacaaccaacaaggagatcccacaatgtatgaagaatactatagtggactgaaacacttcattgaatgttccctggactgccatcgggcagagttgtcccaacttttttatcctctgtttgtgcacatgtacttggagctagtctacaatcaacatgagaatgaagcaaagtcattctttgagaagttccatggagatcaggaatgttattaccaggatgacctacgagtattatctagtcttaccaaaaaggaacacatgaaagggaatgagaccatgttggattttcgaacaagtaaatttgttctgcgtatttcccgtgactcgtaccaactcttgaagaggcatcttcaggagaaacagaacaatcagatatggaacatagttcaggagcacctctacattgacatctttgatgggatgccgcgtagtaagcaacagatagatgcgatggtgggaagtttggcaggagaggctaaacgagaggcaaacaaatcaaaggtattttttggtttattaaaagaaccagaaattgaggtacctttggatgacgaggatgaagagggagaaaatgaagaaggaaaacctaaaaagaagaagcctaaaaaagatagtattggatccaaaagcaaaaaacaagatcccaatgctccacctcagaacagaatccctcttcctgagttgaaagattcagataagttggataagataatgaatatgaaagaaaccaccaaacgagtgcgccttgggccggactgcttaccctccatttgtttctatacatttctcaatgcttaccagggtctcactgcagtggatgtcactgatgattctagtctgattgctggaggttttgcagattcaactgtcagagtgtggtcggtaacacccaaaaagcttcgtagtgtcaaacaagcatcagatcttagtcttatagacaaagaatcagatgatgtcttagaaagaatcatggatgagaaaacagcaagtgagttgaagattttgtatggtcacagtgggcctgtctacggagccagcttcagtccggataggaactatctgctttcctcttcagaggacggaactgttagattgtggagccttcaaacatttacttgtttggtgggatataaaggacacaactatccagtatgggacacacaattttctccatatggatattattttgtgtcagggggccatgaccgagtagctcggctctgggctacagaccactatcagcctttaagaatatttgccggccatcttgctgatgtgaattgtaccagattccatccaaattctaattatgttgctacgggctctgcagacagaactgtgcggctctgggacgtcctgaatggtaactgtgtaaggatcttcactggacacaagggaccaattcattccttgacattttctcccaatgggagattcctggctacaggagcaacagatggcagagtgcttctttgggatattggacatggtttgatggttggagaattaaaaggccacactgatacagtctgttcacttaggtttagtagagatggtgaaattttggcatcaggttcaatggataatacagttcgattatgggatgctatcaaagcctttgaagatttagagaccgatgactttactacagccactgggcatataaatttacctgagaattcacaggagttattgttgggaacatatatgaccaaatcaacaccagttgtacaccttcattttactcgaagaaacctggttctagctgcaggagcttatagtccacaataaaccatcggtattaaagaccttttggaagctactgtttttaaaaagggagactaaaagcaaatacctcagtgattaatatttaagctacagagaatgtttttgtctatatggatctggaagtatgctgcttggaaaaatctgaacaggacagttccacgtttctatagcaaccacatttgactaatttccgttagttgaataagaggtattatgatcatggaggggacatttatggtgctttggattgtgtggaaactatgcattttctgttcaaatgctattttaatttattacatttagaaaaaaagttgatttcaataattcatcctgcttcaagattcaaattcagaaatatactatcatcttgaattttagctgaagaatcctatgagcatgtatgtttctgctgtaaaaacgtagttactgtatggcactcaaaaactatgttaaatgatccactaactttttttttcttggcccatgattaatggaatgtatgtaactaggtagggttcctttcttagatctagaggaagtacagccacccactgacatctgaatttatatacctgttgagttttgagtgcacccaaacactcgataaaccaggtgaagaaatttagcttccatgttctacttcagctaaaacagctacatacaacctagtacacttgaagtcagacagacatttcagttgcttacctccagtactgagccttgctttgggaaactaaaagatttagaccaagtcactgccagtttttgcctttgttgcattttgtacagtttttatatttttgatatcttgtaaataaagacaaccagcttttccaggttcataaaaaaaaaaaaaaaaa

SEQ ID NO: 3129 - DNA, 5958 bp, Homo Sapiens
  NM_006955
gggaggcggtcccgggatttcaggggtctaccggctctcttatggcgaatgcaacccgaagagagagtgagctgtatcttcagagttgtctccgtctttccaagaacagaacaaaatgaacaaggtagatcagaagttccaggggtcagtatcatttaaagatgtgactgtgggcttcacccaggaggagtggcagcacctggaccctagtcagagggctctgtatagagatgtgatgctggagaactacagcaaccttgtctcagtggggtattgtgctcacaaaccagaggtgatcttcaggctggaacaaggagaagaaccatggagactggaggaagaattcccaagccagagctttccagaagtctggacagctgatcacctgaaagagaggagccaagaaaatcaatctaaacatttgtgggaagttgtattcatcaataatgaaatgctgactaaggaacaaggtaatgtaataggaataccatttaacatggacgtaagttcttttccttccagaaaaatgttctgtcagtatgactcacgtggaatgagtttcaacactgtttcagaattggttatcagtaagataaactatttaggaaaaaagtctgacgaatttaatgcatgtgggaaattgttactcaatattaagcatgatgaaactcatactcgagagaaaaatgaagttttgaaaaataggaacactctgagtcatcgtgagaacactttgcagcatgagaagattcaaactttagaccacaattttgaatacagtatatgtcaggaaaccctccttgaaaaggcagtattcaatacacggaagagagagaatgcagaagagaataactgtgactataatgaatttgggagaactttctgtgatagttcatccctcttgttccatcagatacctccatcaaaggacagtcactatgaatttagtgattgtgagaagttcttatgtgtgaagtccaccctttctaaacatgatggggtacctgtgaaacactatgattgtggtgaaagtgggaataatttcaggaggaaattgtgtctgtcacagcttcagaaaggtgataaaggagagaaacactttgaatgtaatgaatgtgggaaagctttctgggagaagtcacatctcactcgacatcagagggtgcacacaggagagaaacactttcaatgtaatcaatgtggaaaaactttctgggagaagtcaaacctcactaaacatcagagatcacacacaggggagaaaccttttgaatgcaatgaatgtgggaaagcctttagccataagtcagccctcacattacaccagagaacacatacaggggagaaaccctatcagtgtaatgcatgtgggaaaactttttaccagaaatctgacctcactaaacatcagagaacacacacagggcagaaaccctatgaatgttatgaatgtggaaaatccttctgtatgaattcacaccttacagtacaccagagaactcacacaggtgagaaaccttttgaatgtcttgagtgtgggaaatccttttgtcaaaagtcacatcttacacagcatcagagaactcacataggagataaaccttatgaatgtaatgcatgtgggaaaactttctaccacaagtcagtactcaccaggcatcagataattcatacagggttgaaaccttatgaatgttatgaatgtgggaaaaccttctgcttgaagtcagacctcacaatacatcagagaacgcacacaggggagaaaccctttgcatgtcctgaatgtgggaaattctttagccataagtcaaccctctctcaacattatagaacacacacgggggagaaaccctatgaatgtcatgaatgtggaaaaatcttttacaataaatcatacctaacaaaacataatagaacacatacaggggagaaaccctatgaatgtaatgaatgtggaaaaaccttctgccagaagtcacaactcactcagcatcagagaattcacataggggagaaaccctatgaatgtaatgagtgtggaaaagctttctgccataagtcagctctaattgtacatcagagaacccatacacaagaaaagccttataaatgtaacgaatgtggaaaatctttctgtgtgaagtcaggacttattttacatgagagaaagcacacgggggagaaaccctatgaatgcaatgaatgtgggaaatccttcagtcacaaatcatcactcacagtacatcacagggctcacacaggagagaaatcttgtcagtgtaatgaatgtggaaaaatcttttaccgtaaatcagaccttgctaaacatcagagatcacatacaggggaaaagccctatgaatgtaacacatgcaggaaaaccttctctcaaaagtcaaatctcattgtacatcagagaacacacataggagaaaaaccttatgaatgaattggatattagaaatttccagccacaagtcagcctccataatgcctcagagtcttcacactgtggagaagggcctgttgacatcctgaatgttcaataactatccacaaactcgccttatgttactccaaagtaacagtaggggataaacccatagactacaacaactataggatggcttttgttaggaagtgatattctgttgaatatcagatggttaatactggcataaaacctcacagatttttttgaatttgtgaaagtttttggcaaaactacaaataggattatgttagcatttacactgaggagaaaattgtcaatttaagaaatctaaagtgaaaattttgcttagaaataaaatatgacaagttctgttttgagtttgatgccataatagtttttaaggtatctaacaataatttatagatgtacattgtggaatgtaaagctttaagaattttttaagaagtaataattaaaataacctcacaagaagttgtaatgagtacagagaattcccgtgtacccttcaccaagcttcctctaaggataatatataatcatagtatatggtcaagtccaagaaatcgatgttaccttgctagtagatgcagacttactcagattttgctatggtttgcgtgcactctgtgtgtgtacgtgtatgtgtgtgtgtgtggttataacaaactggtacttttacatttgagtaaccatcaacacaattagtttacagaatggaaaaggagtctgagatctgtactgtttcaggattacaaaggaatcaggatttagcctcaagtagttcccttgttgtattaataaccacaccctttctgcatccctgtccctggcatccacttgactatgaagctttttgtaaagcatagataaattgaataatcagggcaacagcattaagcacatctgtgaattatccctgaagttcataggacttacatatgtacaagtggtatgtgatataaatcgtgtgtttcatatgcataatggtatttaacgtaattgtgaataggaagtaggtatcctaatttagtagtggttacttcatcaggcccatcccaggtgtttgtcgtgtcctgaaacaatttaaatagagacccacagagctaatgtttatccatttaaaagttataaatcaaaataacagattatctgaaaaaaaatctatcctgtacgtgtgaagatctaggcctgcctccatgttactccctttctcttactacctgtggctcatcccatgccatgaactgcctggggtacatatgtgaacactccagccttcagcgtaagtgatagtccaaattttctttaagcagctgctctccaagacagggccctggaaagaggcccacacatacagcccagttgctgcccagggctgttggactgtcatttcattgctcattgtacccagacagggatctgggccttcagagacttttgagaatatgaagaggagggttgaggctggagaagagccagaatcaagctggcatggggcttttattgacagtgtgaagattgtacactacattacatgatcagatcatacaaataatctaagattttacagtctggtgaccctagattacacaagtaatctaagcttccactttggaaaactagaaaaagaagagcaaattaaatccaaagtaacctggaaaaaaattagagtaaaaatcagtgaaattgaaaagagaaaatcaataaaacccaaaactgttctttgaaaaggtgggtaaaattgataaacctctagctagattaagaaaaaacagaagacaaatactgctaataccaaaagtgaaagaggccatcatagctgatcctatggtcaccaaaaggattagaaagaaatatggacaactctgtccataaatttgataacttagctaaaatggatcaattccttgcaagatgcattctctcaaagctcataaaaggtagatctcagtaggcatatatatctattaaataaattgaagcagtaattaataaccttccaagaccaggcgcggtggctaaaaatacaaaaagttagccgggcgtggtggcatgcgtgtatagtccaagctactcaggaggctgaggcagaagaatcacttgaacctgggaggtggaggttgcagtgagccaagattgtgccactgtactccagcctgggtgacagagtgagactccatctcaataaaattaataataataaaaccttccaaaaaaagtgccgggaccaaatggattcactgatgtgcatttttcgagatacttaaggtagaaatgataccaagtctgtactgtctctttcagaaaataaaagcagggataacacttcccaaatcattttgtgaggccaggattaccctaataccaaagccaggcaaaaacattacaagaaaggaaaactacagatcaatatttccagtgaacacagatgcagaaatccttaaaatgttagcaaatcaggaatgcaagccttgttcaacatttgatattcagtgcaatccattgcatgcattagcagttcaaagattaaatatgatcatatcaataggtacagaaaaagcatttgacaaaatccaatatccattcatgataaaacctctcaacacagaaggaatacaggagaacttactcaatttgataaagaactactacaaaaaaccctacatctagcatcatccttgatgtttccaactaaatgctttcctactaagatcaggaacatggcaaggaacaccactgcttttcagcattgtactggaagtgctatctaatgcagtgataccaaaaaaaaaggaaataaaatgcacataaatttggaaggaggaaatacaactgtctttgttctcaaataacatgattgtctttgtagaaaattctaaataacaaaaacctgctgacattaataagcaattatagcagggttgtagaatgtagtcctcaggtatatgataaaaaagaattagacatcaagtcattaaaagacatataggaaccctaaatgcttattgttaagtgaaaaccaatctgaaaaggctttctatgttgtatgattgcaattatatgacattctgggagaggcaaaactatcgagcgagtcaaaggaccagtggttgctgagagttgaggggaaaggagggatggcaggtaggtgatttttaggacagtgaaagtactctgtagggtactgtaatttgtcaaaatgcagagaatggaaaacagtgaacggaaaacacagagtaaaccctagtgtcaactctggacttcagttaataacagtgtaccactattggctcatcaattgtaacaaatgaaccataatgatgcaagatgttaataattggggagcctgtggaggatgggagggttaaaggtttatatgagaattctctgtactttttgctcaatttttctgtaaccctaaagctgctctaaaaaatgaagtgtattaagtaaataaataagtaaataaccaaccaacc

SEQ ID NO: 3130 - DNA, 2546 bp, Homo Sapiens
  NM_006958
aattcggggcgggacttccgggggtcagccggcgttggctgagacgtcttcgtgccacggtgctgcctcctttccaagcgcgacccgttgaggtccttgtcatgcccagcctcagaactcgccgtgaggaggcagagatggagctctcagttccaggaccatccccctggacccctgcagcccaggcccgtgtgagagatgctcctgctgtgacccaccctggatctgcagcctgtggtaccccctgctgtagtgatactgagctggaagccatctgccctcactatcagcagccagattgtgacaccaggactgaagacaaggagtttcttcacaaggaagacattcatgaagatttggaatcacaggcagaaatatcagaaaactatgctggtgatgtttcccaggtacccgagcttggagatctgtgtgatgatgtatcagaaagagactggggagtccccgaaggcaggaggctgccacagtccctctcccaggagggggacttcacaccagctgccatggggctccttaggggccccttaggggagaaagatctggactgtaatggttttgacagtcgcttcagtctgagcccaaacctgatggcatgtcaggaaatccctacagaagagaggccacatccatatgacatgggtggccagagtttccagcacagtgtggacctaactggtcatgagggggttcccacagctgaaagtccactcatatgtaatgagtgtgggaaaaccttccaaggaaatcctgaccttattcagcgtcaaatagtccacactggggaggcttcctttatgtgtgatgattgtgggaaaaccttcagccagaactcagttcttaaaaaccgtcatcgatctcatatgagtgagaaagcttaccagtgcagcgaatgtgggaaagccttccgagggcactcagacttttctaggcatcagagtcaccacagcagtgagaggccttatatgtgtaatgaatgtggaaaagccttcagccagaactcgagccttaaaaagcaccaaaagtctcacatgagtgagaagccctatgaatgcaatgaatgtgggaaggcttttaggcggagctcaaacctcatccaacatcaaagaatccattctggggagaaaccgtatgtgtgcagtgagtgtgggaaggccttcaggcgaagctcaaacctcatcaaacaccacaggactcacacaggagagaagccttttgagtgtggcgagtgtgggaaagccttcagccagagtgcacacctgaggaagcaccagagggtccacactggagagaagccttatgagtgtaatgattgtggcaagcccttcagtcgggtctccaacctcattaagcaccacagggttcacactggagagaagccctataagtgcagtgactgtgggaaagcatttagtcagagctccagccttattcagcatcggagaattcacactggagaaaagcctcacgtgtgtaatgtatgtggaaaagcctttagttatagctcagtgctccgaaagcaccagatcatccacacgggagagaagccgtacagatgcagtgtctgtgggaaggccttcagccacagctcagccctcattcagcaccagggcgtgcacacaggcgacaagccctacgcctgccacgagtgtgggaagacctttggtcgcagctccaacctcatccttcaccagcgagtccacactggagagaagccctatgaatgtactgaatgtggaaaaaccttcagccagagctcaaccctcattcagcatcagaggattcataatgggctgaagccccatgaatgtaaccagtgtggtaaagccttcaaccgaagctcaaatctcattcaccaccagaaagttcatactggggaaaaaccctacacctgtgttgaatgtggtaagggcttcagccagagctcacacctcattcagcatcagataatccacacgggcgagcgcccctacaaatgcagtgagtgtgggaaagccttcagtcagcgttcggtcctcatccagcaccagaggattcacactggggtgaagccctatgactgtgctgcttgtgggaaagccttcagccagcgatcaaagttgatcaaacaccagttgattcacaccagggaataggctgttgggctggcaggagtgaaaccgagcatagtttcctctccaactcctctttggccattgtctcagcctctgccacttcccagaccgaaagcctggactcagctcactgcctacatccagtggccacatagcctgggaccctcctttgaaacatcctttacaggctcccttctcactgccactgctcttgcctcttgtgatgtcttgggtttgggcttgtttttacagcttgtgaacggactgcacgtttgttacaagggagaagattatggaggctgcatattcatgaatagagtttattattataatgaaaagttaccaaaaaagtaaagtgacgtttggtttgagataaccatagtagtttgtttgattggtaaaaaaaaaaaaaaaaaa

SEQ ID NO: 3131 - DNA, 2678 bp, Homo Sapiens
  NM_006959
gcaacgcctcctggggttgtcaatatggctgcgttgggatctgttcaccttcaggctgagtcgagactgaggtgaaaaagcggaaaaacgcgagaaaaggtttccccgttgtacagaggctagagtgaggctcggttgaatcggttgcaggcgttggtgcctctgtcagcgtccaggtcactgccgctcccgccccgctcttccctggctgtgctggcggaggctgcgccgatgaacctgactgaggattatatggtttttgaggacgtggccatacatttctcccaggaggagtggggaattcttaatgacgttcagagacacctgcacagcgatgtgatgctggagaactttgcacttttgtcctcagtaggttgttggcatggagccaaggatgaggaggcaccttccaagcaatgtgtttctgtaggagtgtcacaggtcacaactttaaagccagctttgtccacccagaaggcccagccctgtgagacatgtagctcacttctgaaggacattctacacctggctgagcatgacggaacacaccccaagcgtacagccaagctttacctgcaccaaaaggagcatcttagagagaagctcaccagaagtgatgaagggaggccttcgtttgtgaatgacagtgttcacctggcaaagaggaacctcacatgcatgcagggtggcaaggattttactggtgattcagatcttcaacaacaggctcttcacagtgggtggaagccacacagggacactcatggtgtggaggcctttcaaagtggacagaataattacagctgcacccaatgtgggaaagacttttgccaccaacatacactgtttgagcaccagaaaatccacacagaggaaaggccttatgagtgcagtgaatgtggcaaattgtttaggtacaactccgaccttattaaacatcagcgaaatcatactggagaaaggccttataagtgtagtgaatgtggaaaagccttcagcctcaaatacaatgttgttcaacaccagaaaattcacactggagaaaggccttatgagtgcagtgaatgtgggaaagcttttcttagaaagtctcacctacttcagcaccagaggattcacaccaggccaaggccttatgtgtgtagtgaatgtgggaaggccttccttacacaggctcaccttgttggtcaccagaaaattcatactggagaacggccttatggatgcaatgaatgtgggaaatactttatgtacagttcagcactcattagacatcagaaagttcacactggagaaaggcctttttattgctgtgaatgtgggaaattctttatggacagctgcacactcattattcaccagagagttcatactggagaaaaaccttatgaatgcaacgaatgtgggaaattctttagataccgttccacactcattagacatcagaaagttcacactggagaaaagccttatgagtgtagtgaatgtgggaagttctttatggacacttccacactcattattcatcagagagttcatactggagaaaagccttatgaatgcaacaaatgtgggaaattctttaggtattgcttcacactgaatagacatcagagagttcactctggagagaggccttatgaatgcagtgaatgtggcaaattctttgtggacagctgtacactgaagagtcatcagagagttcacactggagaaagaccttttgaatgcagcatttgtgggaaatcctttagatgtcgctccacacttgatacacatcagagaattcacactggtgaaaggccttatgagtgtagtgaatgtgggaaattctttaggcacaactcaaatcatattagacatcggagaaatcactttggagaaaggtcttttgagtgcactgagtgtgggagagtttttagccaaaattcccacctcattcggcaccaaaaagttcacactagggaaagaacttacaaatgcagcaaatgtgggaaattttttatggacagctccacactcattagtcatgagagagttcatactggagaaaagccttatgagtgcagtgaatgtgggaaagtctttagatacaactccagcctcattaaacatcggagaattcacactggagagagaccttatcagtgcagtgaatgtggaagagtctttaaccaaaattctcatctcattcagcaccagaaagttcacaccagataaagaatgtatatataaagcagatggggaaagacttcacacagaaatctactctgatttagcactgggacctacgttttaaaaaaagtattcttgtagaatacagataacataaaatctaacatcttaaccatgttaaagtgtatagttcagtactgttaagtcattcacattgtgcaatgaatatctagaagtcttttcaacttatgaaactaagtctataccttttaaaaccttattcctcactccatccagcctcttgacaagcaccgctctgtatgaattttactagtccgggtacctcatataagaaaacttaagttttggtcttcttgtggtttattttgtggcttattttgcttaacgttatatttttaaggtttcatgttctaatccattagaatttccatcctttttaaaggctgaataaaattctgttagtcatgtgttgcttaacagtg

SEQ ID NO: 3132 - DNA, 2204 bp, Homo Sapiens
  NM_006963
aaacgaacaacgctttcgggtgggcccgggaccatagagggtcgctccgccactttcctagagcgaccgcggcggcgccagagcgcggcgaggccctcacttccggcggcgcgggaggcgcccagcgagccagagtggtggctggtcccgcgcgaaaattctgagctgtacacctctaggaaatgaaacactagttcagaagaagcctgtaaactctcttacaaatacatttggttattcaccatgaggttagcaaagcctaaagcgggtatttctcggagctcaagccaaggaaaggcctatgagaacaagcgcaaaacaggccggcagcggcagaagtggggcatgactattcgatttgactcaagcttcagtagactcagaagaagcttggatgacaaaccctataaatgtactgaatgtgaaaagagtttcagtcagagttcaactctttttcaacaccagaagatccatactggaaagaaatcccataaatgtgctgattgtgggaaaagtttctttcagagttctaatctcattcagcatcgacggatccatacgggggaaaagccctacaaatgtgatgagtgtggagaaagcttcaaacagagctcaaatctcattcagcaccagagaattcatactggagaaaaaccctatcagtgtgatgagtgtggccggtgtttcagccagagctcccaccttattcaacatcagagaacccacactggggagaaaccctaccagtgcagtgaatgtggcaaatgtttcagtcagagctctcatctgaggcagcacatgaaggtgcataaagaagagaagcctcgtaaaacccggggcaaaaatatcagggtgaagactcacttaccctcttggaaagctggtacaggaaggaagtctgtggctggtctccgttaagtatagggctttttgacagctttttgagacctcttaagaaaaaataaaaagtaaaaaatgaaaggaatcttttttagaaatagagatgctttatagtagatcacttaaatactggatcttttgctagtgtgaaaacattgggaatttaatgacattattgagctgaaagaaattacatgagtccagctaccctcatttcttttttatgtgacatggagcacaaagaactgaaaatatgttttgagggagcatgacatccttgacctcatttgaaattacttccattttcaaaaaccatcatgttttgtagatacattttgagaaaaaccatcatgttttgaggatacatttgtgaaagtgcaggcatgccaatgactactcagttttaggactttctgtggaagaaaaaagggagaagaaatcaattccactacttttgaagttctgcaacagatgagattttgtttgtaaagttttgtagtatattaaccattggtttatcactctagattcaacatattaaaatgtattcaagctcacagatttttaatcagtaaggcctatctatattagttgtcttttatttcttctccttgtggacagttgttaatgaaaggagtaaggatttccctttttttgttttgtttgttttgttttttttaaccaaattcttagagatactatagaatccaaatgagaactgaattggacctcaagtcttctattcctactaatagagttctttgtgatggtaactgctgtgtcgtttgttttccacaagttgggatggattcatgtcgatacatccccatgcccttgacctcttctggcattctcctgtgctctgacaaactgagccagccttttagatctacatgaataaacaaactattttaccaagaaaaatctcagcttgcttactgcttaattaaaaacctacaatttacacacctccctgccttcaagactgtgagctttggatagccctgcttaaatgtttgtcaacaacaagagtcgtaatgtgtcagtacattgtagctcctttgaaatttaactctttctgtgttacatgaattgttttaaggagtccggcaaacatgtttcttcacttccatgagaatggtgccaagtgtcagactctaatgagccctcagctcaggttttaatttctattgaatgctaacattcttctgattttttggtatcttttataatcatatcggtttctgctgtattaatgacaattattcatgaaaataaaaaatgaaatattttgtatactacta

SEQ ID NO: 3133 - DNA, 1176 bp, Homo Sapiens
  NM_006973
gtccattccgccggcgccggcgctggcgctgctgcgggctcggcgccggcctttgtctgcgggcacgcgccgctgcggtgctcaggaacagcccatggaagaatcatatgaagaggtggtgactgaggtcgtaagcaggagtggacatgtttggatttccaacagctaccctgctggactgtcatggaagatatgcccagaatgtagcgttcttcaatgtgatgactgaagcccaccacaaatatgaccactctgaggctacaggatcctcaagctgggatatccaaaattctttcagaagagagaagctggaacaaaaatccccagattcgaagacactacaggaagattcacctggagtgagacaaagggtctatgagtgccaggagtgtggaaaatccttccggcaaaaaggtagtctaacgttacatgagagaatccacactggtcaaaagccttttgagtgcacccactgtggaaaaagcttcagggccaaaggcaatcttgttacacatcaacggatacacacgggagagaagccttatcagtgcaaggagtgtgggaaaagcttcagtcaacgaggtagtctcgctgtccacgagagactccacactggacagaaaccctacgagtgtgctatttgtcagagaagcttcaggaatcagagtaaccttgctgttcacaggagagttcacagtggtgagaagccctatagatgtgatcagtgtggaaaagccttcagtcagaaaggaagcttaattgttcacatcagagtccacacaggcctgaagccctatgcctgtacccagtgcaggaagagtttccacaccagggggaattgtattctgcatggcaaaatccacacaggagagacaccctatctgtgcggccagtgtggaaaaagcttcacccagagagggagtctggctgtgcaccagcgaagctgctcacagaggctcaccctttgaccactttcctgaagagaagttctctttatgaattaagagtacaaaatcctctgagatgaagcaacctatccagttctatggaatgaatggagaatctttcagaaagaccatcattgggtagggcaaactgatttttttcctttcccccaaaagagtatgaaaaataaatgtcttgtttattatcattatcaaaaaaaaaaaaaaaaaa

SEQ ID NO: 3134 - DNA, 1609 bp, Homo Sapiens
  NM_006977
ctttcccctgctaccagacacgcggtcacgtggggccatcgcgggctgccggcgcgggaagccgcgcgagaggcggccgaggggtgcgtgagtcggcgccactgcttgcagtgcgcggcttgggagcccgcccctcctgcacggaggagtcggcctgccgccgcggcggcatctggaaccacaatggacactgccagccatagccttgttcttctccagcagctgaacatgcagcgagaatttggttttctgtgtgattgcacagttgcaattggagatgtttacttcaaagcccacagagcagtgcttgctgctttttctaactatttcaagatgatatttattcaccaaacaagtgaatgcataaaaatacaaccaactgacatccaacctgacatattcagctatttgttgcacattatgtacacggggaaagggccaaaacagattgtggatcatagtcgtttggaggaagggattcgatttcttcacgccgactacctttctcacattgcaactgaaatgaatcaagtgttctcaccagagactgtgcagtcctcaaatttatatggcattcagatctcaacaacccaaaaaacagttgtcaaacaaggactggaggtcaaagaagctccttccagtaacagtggaaacagagctgctgtccagggtgaccacccccagttgcagttgtctcttgctattggtctggatgatggcactgcagaccagcagagggcctgtcctgccacccaggccctggaggagcaccagaagcccccagtttccatcaagcaggagagatgtgacccagaatctgtgatctcccagagccacccctcaccctcatcagaggtgacaggccccacttttactgaaaacagtgtcaaaatacacttatgccattactgtggggaacgttttgattcccgtagtaacctaaggcaacatctccatacacatgtgtctggatccctgccattcggtgtccctgcttccattctggaaagtaatgaccttggtgaagtgcatccccttaatgaaaacagcgaggcccttgaatgccgcaggctcagctccttcattgttaaggagaatgaacagcagccagaccacaccaaccggggtaccacagagcctttgcagatcagtcaagtatctttgatctccaaagacacagagccagtagaattaaactgtaatttttctttttcaaggaaaagaaaaatgagctgtaccatctgtggtcataaattccctcgaaagagccaattgttggaacacatgtatacacacaaaggtaaatcttacagatataaccgatgccaaaggtttggtaatgcattggcccagagatttcagccatactgtgacagctggtctgatgtctccctgaaaagttctcgcttgtcacaagaacacttagacttgccttgtgccttagagtcagagctcacacaagaaaatgtggatactatcctagttgagtagcagcttctctttcagaatttttataccaattctgaaaaagaaaatttgcgtggcatttttaattcataaattattttcctcctcaaaaaaaaaaaaaaaaaaaaaaaaaaaaaaaaaa

SEQ ID NO: 3135 - DNA, 1312 bp, Homo Sapiens
  NM_006978
gcggccgcccgcgagcggggcggtgccacgtacggctccggaagaagcgacggaatctgctagggcacaagagagacgggcgctcgggctctcgcagtcctcttccgtcagtgtcttttgcttcgactcccggcggagcgcgcaacgtggagtgacgtgcaggggccaagtgcaacccaggcagccacggctgtttcggagctcaggactctaaaatggcagagcagctttctccaggaaaggcggtggatcaggtgtgcaccttccttttcaaaaagcctgggcggaaaggggctgctggacgcagaaagcgcccggcctgcgacccagagcccggagaaagcggcagcagtagcgacgaaggctgcactgtggttcgaccggaaaagaagcgggtgacccacaatccaatgatacagaagacccgtgacagtggtaaacagaaggcggcttacggcgacttgagcagcgaagaggaagaggaaaatgagcccgagagtctcggcgtggtttataaatccacccgttcggcgaaacccgtgggaccagaggatatgggagcgacagctgtctatgagctggacacagagaaagagcgcgatgcacaagccatctttgagcgcagccagaagatccaggaggagctgaggggcaaggaggatgacaagatctatcggggaatcaacaattatcagaaatacatgaagcccaaggatacgtctatgggcaatgcctcttccgggatggtgaggaagggccccatccgagcgcccgagcatctacgtgccaccgtgcgctgggattaccagcccgacatctgtaaggactacaaagagactggcttctgcggcttcggagacagctgcaaattcctccatgaccgttcagattacaagcatgggtggcagatcgaacgtgagcttgatgagggtcgctatggtgtctatgaggatgaaaactatgaagtgggaagcgatgatgaggaaataccattcaagtgtttcatctgtcgccagagcttccaaaacccagttgtcaccaagtgcaggcattatttctgcgagagctgtgcactgcagcatttccgcaccaccccgcgctgctatgtctgtgaccagcagaccaatggcgtcttcaatccagcgaaagaattgattgctaaactagagaagcatcgagctacaggagagggtggtgcttccgacttgccagaagaccccgatgaggatgcaattcccattacttaggtttcccataattcttaaatttaaaaaataaacgttttgttcttttggaaaaaaaaaaaaaaaaa

SEQ ID NO: 3136 - DNA, 2163 bp, Homo Sapiens
  NM_006980
agaggcggaagtaaaagcgaactacagtggatgggtgcagttcaggagatagctgttctccagcctttctggagggatgcagagcctttccttaggacaaacaagcatttcaaaaggtttgaactacctaaccattatggcaccaggaaacctctggcatatgagaaataactttctctttggttcaagatgttggatgactcgattttcagcagaaaacatcttcaaatcagtttcatttaggctttttggtgtgaagtgtcataatacagacagtgagcctttgaaaaatgaggacctactgaaaaacttacttactatgggagtagatattgacatggcaaggaaacgacagcctggagtttttcataggatgattaccaatgagcaggacctgaagatgttccttctttccaaaggagctagcaaagaagtgatcgctagcatcatatcaagatatccacgagcaataacacgtactcccgagaatctttcaaaacggtgggatctgtggagaaagattgtgacatcagaccttgaaattgtaaatattttggaacgttctcctgaatccttttttcggtccaataacaacctaaacttagagaataatataaagttcctctactcagttggattgacccgtaaatgcctttgtcgattgttgaccaatgcccctcgtaccttctccaatagtcttgatctgaataaacagatggttgaatttttgcaggcagccggtttgtcattgggtcacaatgatcccgcagattttgtcagaaagataatttttaaaaacccttttatcttaattcagagcaccaagcgggtgaaagctaacattgaattcttacggtcaactttcaatttgaacagtgaggaactgctggttctgatatgtggtccaggagctgaaatcctagacctttccaatgactatgccagaagaagctacgcaaacatcaaagagaagctgttttctcttggatgtactgaagaagaggtacagaagtttgtcttaagctatccagatgtgatcttcttggcagagaaaaagtttaatgataaaatagactgcctcatggaagaaaacattagcatttcacaaataatcgaaaatcctcgggttctggattcaagcataagtactttaaaaagtcgaatcaaagaattggtaaatgctggctgtaacttgagtactttaaacatcactcttctatcttggagtaaaaaaagatatgaagctaaattgaaaaagttaagcagatttgcctaaggatgccaatgtttttaattctcaggaactgtgaatatgttatgccacattgcaaaagaattttgcagaagtgattaatttaaaatgttattaagggccttgagatggggagattatcctgaattactttggagggcctaatataattgtagggatctttaaaagttgaagagggaggcaaaagaggaggtcagagtgatcctgtataagaaagacaactacttttgaaggaagttaaaaggtggctttgaaggaggaagacaccttgagccaaggaatgaagggggcctgtaaaaaaagattgaaaaggcaaggaaacagattctccattagagtccccagaaaggaatgcagccttgctggcacctttttagcccagtgagatcaatgtcaaacttctgacccacagaaccataagatggtaaatttgtgttgttttaaaccactgagtcagtgataatttgctgaagaagcaaatagattaacatagcaactaagtagatgattagttgcattataggtgaagtcaaaaatacagtcctttagtaaagtctctatttcttccttttataagagtaattatatttaaaaaatctacctacccttctggaattgctaatgttagtgtttataaagtcttaaatgtgtgcataaaaaactaaatgtgaatataaaatctaaataaaggaatatgtttgcctaatatagtttaaggaaatgataatcatttctgtgcattttgttggcatttcagctaatattaaagagtaattttcagaggcattgacttaaaaaatggcaaatcagataatgtcggtattttcaagatacaatctagctctgacataaactgaaagacgtgagacaaattatatgaccttaatttt

SEQ ID NO: 3137 - DNA, 1246 bp, Homo Sapiens
  NM_006983
ctgccccatgcagccctgagccccacagcaagtctgccatgggccgcggggcccgtgtcccctcggaggccccgggggcaggcgtcgagcgccgctggcttggagccgcgctggtcgccctgtgcctcctccccgcgctggtgctgctggcccggctgggggccccggcggtgccggcctggagcgcagcgcagggagacgtcgctgcgctgggcctctcggcggtcccccccacccgggtcccgggcccactggccccccgcagacgccgctacacgctgactccagccaggctgcgctgggaccacttcaacctcacctacaggatcctctccttcccgcggaacctgctgagcccgcgggagacgcggcgggccctagctgccgccttccgcatgtggagcgacgtgtcccccttcagcttccgcgaggtggcccccgagcagcccagcgacctccggataggcttctacccgatcaaccacacggactgcctggtctccgcgctgcaccactgcttcgacggccccacgggggagctggcccacgccttcttccccccgcacggcggcatccacttcgacgacagcgagtactgggtcctgggccccacgcgctacagctggaagaaaggcgtgtggctcacggacctggtgcacgtggcggcccacgagatcggccacgcgctgggcctgatgcactcacaacacggccgggcgctcatgcacctgaacgccacgctgcgcggctggaaggcgttgtcccaggacgagctgtgggggctgcaccggctctacggatgcctcgacaggctgttcgtgtgcgcgtcctgggcgcggaggggcttctgcgacgctcgccggcggctcatgaagaggctctgccccagcagctgcgacttctgctacgaattccccttccccacggtggccaccaccccaccgccccccaggaccaaaaccaggctggtgcccgagggcaggaacgtgaccttccgctgcggccagaagatcctccacaagaaagggaaagtgtactggtacaaggaccaggagcccctggagttctcctaccccggctacctggccctgggcgaggcgcacctgagcatcatcgccaacgccgtcaatgagggcacctacacctgcgtggtgcgccgccagcagcgcgtgctgaccacctactcctggcgagtccgtgtgcggggctgagcccggctgataaagcactttctctctgaaaaaaa

SEQ ID NO: 3138 - DNA, 1102 bp, Homo Sapiens
  NM_006985
atgttttgttgcttaggatatgaatggctgagcggaggctgtaaaacctggcactctgcttgggttatcaatactctggctgaccatcgtcatcgtgggactgactttggtggaagtccttggttacttatcattactgtgtttctgagaagttataaatttgccatctccctctgcacaagttacctttgtgtgtctttcctgaagactatcttcccgtctcaaaatggacatgatggatccacggatgtacagcagagagccaggaggtccaaccgccgtagacaggaaggaattaaaattgtcctggaagacatctttactttatggagacaggtggaaaccaaagttcgagctaaaatccgtaagatgaaggtgacaacaaaagtcaaccgtcatgacaaaatcaatggaaagaggaagaccgccaaagaacatctgaggaaactaagcatgaaagaacgtgagcacggagaaaaggagaggcaggtgtcagaggcagaggaaaatgggaaattggatatgaaagaaatacacacctacatggaaatgtttcaacgtgcgcaagcgttgcggcggcgggcagaggactactacagatgcaaaatcaccccttctgcaagaaagcctctttgcaaccgggtcagaatggcggcagtggagcatcgtcattcttcaggattgccctactggccctacctcacagctgaaactttaaaaaacaggatgggccaccagccacctcctccaactcaacaacattctataattgataactccctgagcctcaagacaccttccgagtgtctgctcactccccttccaccctcagctctaccctcagcggatgataatctcaagacacctgcggagtgtctgctctatccccttccaccctcagcggatgataatctcaagacacctcccgagtgtctgctcactccccttccaccctcagctccaccctcagtggatgataatctcaagacacctcccgagtgtgtctgctcactccccttccaccctcagcggatgataatctcaagaaactaaggaagaataaataaataatataaaaataaaatgaatactgcagtcctta

SEQ ID NO: 3139 - DNA, 2760 bp, Homo Sapiens
  NM_006986
ggcgaagaggcggggtcgcccaagctgccgcgctggcattttctcctggacaaggagagagtgcggctgctgagagccgagcccagcaatcccgatcctctgagtcgtgaagaagggaggcagcgagggggttggggttggggcctgaggcaagcccccaggctccgctcttgccagagggacaggagccatggctcagaaaatggactgtggtgcgggcctcctcggcttccaggctgaggcctccgtagaagacagcgccttgcttatgcagaccttgatggaggccatccagatctcagaggctccacctactaaccaggccaccgcagctgctagtccccagagttcacagcccccaactgccaatgagatggctgacattcaggtttcagcagctgccgctaggcctaagtcagcctttaaagtccagaatgccaccacaaaaggcccaaatggtgtctatgatttctctcaggctcataatgccaaggatgtgcccaacacgcagcccaaggcagcctttaagtcccaaaatgctaccccaaagggtccaaatgctgcctatgatttttcccaggcagcaaccactggtgagttagctgctaacaagtctgagatggccttcaaggcccagaatgccactactaaagtgggcccaaatgccacctacaatttctctcagtctctcaatgccaatgacctggccaacagcaggcctaagacccctttcaaggcttggaatgataccactaaggccccaacagctgatacccagacccagaatgtaaatcaggccaaaatggccacttcccaggctgacatagagaccgacccaggtatctctgaacctgacggtgcaactgcacagacatcagcagatggttcccaggctcagaatctggagtcccggacaataattcggggcaagaggacccgcaagattaataacttgaatgttgaagagaacagcagtggggatcagaggcgggccccactggctgcagggacctggaggtctgcaccagttccagtgaccactcagaacccacctggcgcaccccccaatgtgctctggcagacgccattggcttggcagaacccctcaggctggcaaaaccagacagccaggcagaccccaccagcacgtcagagccctccagctaggcagaccccaccagcctggcagaacccagtcgcttggcagaacccagtgatttggccaaacccagtaatctggcagaacccagtgatctggccaaaccccattgtctggcccggccctgttgtctggccgaatccactggcctggcagaatccacctggatggcagactccacctggatggcagaccccaccgggctggcagggtcctccagactggcaaggtcctcctgactggccgctaccacccgactggccactgccacctgattggccacttcccactgactggccactaccacctgactggatccccgctgattggccaattccacctgactggcagaacctgcgcccctcgcctaacctgcgcccttctcccaactcgcgtgcctcacagaacccaggtgctgcacagccccgagatgtggcccttcttcaggaaagagcaaataagttggtcaagtacttgatgcttaaggactacacaaaggtgcccatcaagcgctcagaaatgctgagagatatcatccgtgaatacactgatgtttatccagaaatcattgaacgtgcatgctttgtcctagagaagaaatttgggattcaactgaaagaaattgacaaagaagaacacctgtatattctcatcagtacccccgagtccctggctggcatactgggaacgaccaaagacacacccaagctcggtctcctcttggtgattctgggtgtcatcttcatgaatggcaaccgtgccagtgaggctgtcctctgggaggcactacgcaagatgggactgcgtcctggggtgagacatcccctccttggagatctaaggaaacttctcacctatgagtttgtaaagcagaaatacctggactacagacgagtgcccaacagcaaccccccggagtatgagttcctctggggcctccgttcctaccatgagactagcaagatgaaagtgctgagattcattgcagaggttcagaaaagagaccctcgtgactggactgcacagttcatggaggctgcagatgaggccttggatgctctggatgctgctgcagctgaggccgaagcccgggctgaagcaagaacccgcatgggaattggagatgaggctgtgtctgggccctggagctgggatgacattgagtttgagctgctgacctgggatgaggaaggagattttggagatccctggtccagaattccatttaccttctgggccagataccaccagaatgcccgctccagattccctcagacctttgccggtcccattattggtcctggtggtacagccagtgccaacttcgctgccaactttggtgccattggtttcttctgggttgagtgagatgttggatattgctatcaatcgcagtagtctttcccctgtgtgaggctgaagcctcagattccttctaaacacagctatctagagagccacatcctgttgactgaaagtggcatgcaagataaatttatttgctgttccttgtctactgctttttttccccttgtgtgctgtcaagttttggtatcagaaataaacattgaaattgcaaagtgaaaaaaaaaaaaaaaaaa

SEQ ID NO: 3140 - DNA, 3602 bp, Homo Sapiens
  NM_006995
aaatcttgggactttttggacacccagagaacaggtcccagataccgagtccgcaactccaaacatcgcgattaataggaggcctctggtctctgcctgccctgggtgctcatggaaccagctgctgctctgcacttctccctgccagcctccctcctcctcctcctgctcctcctccttctcagcctgtgtgcactggtctcagcccagtttactgtcgtggggccagctaatcccatcctggccatggtgggagaaaacactacattacgctgccatctgtcacccgagaaaaatgctgaggacatggaggtgcggtggttccggtctcagttctcccccgcagtgtttgtgtataagggtgggagagagagaacagaggagcagatggaggagtaccggggaagaatcacctttgtgagcaaagacatcaacaggggcagcgtggccctggtcatacataacgtcacagcccaggagaatgggatctaccgctgttacttccaagaaggcaggtcctacgatgaggccatcctacgcctcgtggtggcaggccttgggtctaagcccctcattgaaatcaaggcccaagaggatgggagcatctggctggagtgcatatctggagggtggtacccagagcccctcacagtgtggagggacccctacggtgaggttgtgcccgccctgaaggaggtttccatcgctgatgctgacggcctcttcatggtcaccacagctgtgatcatcagagacaagtatgtgaggaatgtgtcctgctctgtcaacaacaccctgctcggccaggagaaggaaactgtcatttttattccagaatcctttatgcccagcgcatctccctggatggtggccctagctgtcatcctgaccgcatctccctggatggtgtccatgactgtcatcctggctgttttcatcatcttcatggctgtcagcatctgttgcatcaagaaacttcaaagggaaaaaaagattctgtcaggggaaaagaaagttgaacaagaggaaaaagaaattgcacagcaacttcaagaagaattgcgatggagaagaacattcttacatgctgctgatgtggtcctggatccagacaccgctcatcccgagctcttcctgtcagaggaccggagaagtgtgaggcggggcccctacaggcagagagtgcctgacaacccagagagattcgacagtcagccttgtgtcctgggatgggagagcttcgcctcagggaaacattactgggaggtggaggtggaaaacgtgatggtgtggactgtgggggtctgcagacacagtgttgagaggaaaggggaggtcctgctgattcctcagaatggcttctggaccctggagatgtttggaaaccaataccgggccctgtcctcccctgagaggattctccctttgaaggagtccctttgccgggtgggcgtcttcctggactatgaagctggagatgtctccttctacaacatgagggacagatcgcacatctacacatgtccccgttcagcctttactgtgcctgtgaggcccttcttcaggttagggtctgatgacagccccatcttcatctgccctgcactcacaggagccagtggggtcatggtgcctgaagagggcctgaaacttcacagagtggggacccaccagagcctatagaatcaattccttggactcacagccatgcagataagccctggccatctcagcagccaccgcacaacccccctaatgaaagacacgccctcctcccctctggtcacgtaagagaacatcttccagctgcctttttcacacccactccagccctctgccccagttttctcctcctcactagtctgtggctttagtagttcctttgcttgtaattatgggatgggatccaggcatagggaactagttgtttcatagctcccagtcaaaaagaaagtgagagaagctgttgggcagcgaacctactgtttaaaatcaggataaccacattaagcccaatatgccagttggcaccagatgctgtggacttggaatgaggccaacagggttcaccaggatgagagaggagagaggaatccacaggaccaccagaagggagagggaaccagatatgcagatcagagatagaggaagtggaaccagagagctgggagggaccaaggttgtaaggatggctaagtcccaccataagagctaaagggtcctgggagatgatggctcatttccacccaaccccaggatttccacagcacacacccacaggcctggacctgggatgaagatgaatgaagaacatggactcatgtggatgtggtttggctcagatgtccctgcaataaacaaggggtcagtacttagtccctgagtgtggttgaggtttgaggtcctggtcgagcagggcagtactggaccaggtctacgtcagcattcaggttcaatggggacaccagtggcttcaaacttcctgatctaattatgtttttagacacttagaagttattgaggactttaaagagcttttgtttatttgggttaatatttatgacatttgacattgaaacaaaaatttaaaatgttatcttttaatttatgttaaaatagcattaataaatcagttataggttaatgtagataggatgttttgtgaaaaagcaatctattgtgtccaaataaaaaaacaaaaagtgtgacactggttaactttttccagatctcatgtctggcttaataagagatatttgtattatcatatctgcctttgtattaaacctattggtatatcataggtcatgttagctcaaaaaaactttactgcacactactgagagaatgagatgaaaaacgattaatgtttcattattattattgtgaaaatattattaacactggggactccttaagagtacatcagagttctctctaggaatcccaaaaccacattttgaaactagaatagtggatcctggaagttaatccatgtgctggttaattttagatgtcaacctgactggattaaggaatacctagacagctggtacaacattatttctgggtgtgtctgtgagtgtgtttccagaagagattggcaagtgagtcagtgggaaattctctccttctgttggctgggtgcccaatacaacaaaaaggcagaggaaaggcaaattcttctctcctctggagctgagacactcttcttcttctgcccttggacatcagaactcctggctctccggcctttgaacttcaggacttgtaccaggaggccctgggttctcaggcctttggctttggactgagagttacacaatcagcttccctggttctgaggctttcagacttaaactgagccatgctaccagcatcccagggtctccagcctacagatgagctgttgtgcgatttcttagcctccataatcacatgagccaatctccttaataaatgcctgctcatagatctgtatctacatctatatctgtatgtgcatctatatctatgcctatatctatatctatatcatattgattttgtctctctggagaaccctgactaataaaatgaggcatctaaaaaaaaaaaaaaaa

SEQ ID NO: 3141 - DNA, 3871 bp, Homo Sapiens
  NM_006999
gcggccgctctcagcggagggggcggccccggggcccaggcgccgcggcccggcaccccgtggaagagccgcgcgtacagcccgggcatccagggactacatgaggaaataattgacttttataacttcatgtccccttgtcctgaagaagcagctatgagaagagaggtggtgaaacggatcgaaactgtggtgaaagacctttggccgacggctgatgtacagatatttggcagctttagtacaggtctttatcttccaactagcgacatagacctggtggtcttcgggaaatgggagcgtcctcctttacagctgctggagcaagccctgcggaagcacaacgtggctgagccgtgttccatcaaagtccttgacaaggctacggtaccaataataaagctcacagatcaggagactgaagtgaaagttgacatcagctttaacatggagacgggcgtccgggcagcggagttcatcaagaattacatgaagaaatattcattgctgccttacttgattttagtattgaaacagttccttctgcagagggacctgaatgaagtttttacaggtggaattagctcatacagcctaattttaatggccattagctttctacagttgcatccaagaattgatgcccggagagctgatgaaaaccttggaatgcttcttgtagaattttttgaactctatgggagaaattttaattacttgaaaaccggtattagaatcaaagaaggaggtgcctatatcgccaaagaggagatcatgaaagccatgaccagcgggtacagaccgtcgatgctgtgcattgaggaccccctgctgccagggaatgacgttggccggagctcctatggcgccatgcaggtgaagcaggtcttcgattatgcctacatagtgctcagccatgctgtgtcaccgctggccaggtcctatccaaacagagacgccgaaagtactttaggaagaatcatcaaagtaactcaggaggtgattgactaccggaggtggatcaaagagaagtggggcagcaaagcccacccgtcgccaggcatggacagcaggatcaagatcaaagagcgaatagccacatgcaatggggagcagacgcagaaccgagagcccgagtctccctatggccagcgcttgactttgtcgctgtccagcccccagctcctgtcttcaggctcctcggcctcttctgtgtcttcactttctgggagtgacgttgattcagacacaccgccctgcacaacgcccagtgtttaccagttcagtctgcaagcgccagctcctctcatggccggcttacccaccgccttgccaatgcccagtggcaaacctcagcccaccacttccagaacactgatcatgacaaccaacaatcagaccaggtttactatacctccaccgaccctaggggttgctcctgttccttgcagacaagctggtgtagaaggaactgcgtctttgaaagccgtccaccacatgtcttccccggccattccctcagcgtcccccaacccgctctcgagccctcatctgtatcataagcagcacaacggcatgaaactgtccatgaagggctctcacggccacacccaaggcggcggctacagctctgtgggtagcggaggtgtgcggccccctgtgggcaacaggggacaccaccagtataaccgcaccggctggaggaggaaaaaacacacacacacacgggacagtctgcccgtgagcctcagcagataatggctcctggctgcgtcagcctcccccacccctctgcagactgccccgcggcctcggccaccggcaggggaaccgagaccagcaccccgcacgtcagccgggctcgcggcacgcccgccgctgatcactctgcatgtttcttcgtgtggtggtcgcgtccatcttcaagaacagctcgttgtgctcatctgtgaagccttattaaacgtggacgttgttttctgccttcccaggattcttccttcagtgctgaggcaggtcgggctcaggaactgcagggacgtgaacatgcgcttgcggtttgaggtagccgtgtctgttccttcgcggtttgctattttcatttcctgttcgtcaaagcagcagaggagatcaaaccccgttcgtgtgtctttcctccacggataagcttgggaggtcattgttttactgccctcacattttgtttgaaatttcagaactgtttttctatgtaaatattgaaaacttatgatttgtgcaataactcagatattttttatttaatttcctattttcacataagttatatttaagggaggagggaattttttttaaacaagcttaggtcctttcccgagctgcattttctaagttgggtcatcgtgtcggctggttgtctgacgagcatcgttacaaacaccatgatgaggggtttggggttttattttgatgtcttttcttttggtcggaagtgagtgaaggagccaggtcgccctgaaggttttccaaagggcttggctccagagccacctggcagactgcccgtggccctgctgtcgggccccaggccgttgtcctgctctgaccacagagttttaatgttttggttttcacttcttttaaactggacaacaaatccagcatttcaagtgccagaagtataactttctaaggagagaagggttgtcacattataaaatctttaggaaaatgtgaactggaaaacgcttcggtcagttttagtgacatagcctgtgatgatgggtctggtgactattattgcggaccgtggtacccagttttaggaatgtggagaaaggaattctgttgattccgttgaggaatctgtagcgtatgcattcgttctgttaagagcaaatctaggagaagtgcttcagctgcccagtgcgccgtggggagtgttttaacggatcgtgtcgcaggagagcacagcccagcgttggggccgggaccgctggcgcccgacgtcggaagcatacaggtatactatgcaagtgtattctgccacaacaaccactgtctttgttacctttttttgaacaagaatatatccatcctgcctaaccctgagtttttggagcaccacagttgtcctgggagttggttgcatcttgtaggccatctgacttcctgtttttaaaacgggggtctggtcttgctaaacactacaggtaggttggtctttgaagtccactagtggagaatgtcaagacaagatacttattaccatgacatctgatgcatgtgcagcagtggggagttctagattgatctctgaatgtgatcgacgcccagcaaggacaagctttaaaatgtctgcggtctgcccttttgaagcaggactggctcactctgtcattgggagctgtcagctgcgactgcaggttctctaggaggcattccagaatagagtagcacactgtgtctgcagttctcgatgaccgaaagttatcaaaaatatttaaaatatttaaattgtgaacctattgataaagaatatttataaaaactgatctgtaggcctgtactaatctctacgcattagcaatattgactgtaaacccacattaaggaaaccactacgggtctggcagtgcgtgtcccgtggggtgtgcattttaaaactcgattcatagacacaggtaccatgttccatttccgtcatggtgaagcaaatgaattggcctggctaccactgtggtcgcgtgctacaggtttgacaaaaagatatcatgtttcgatttttttgtgtgtggacaacaatatggaagctaaaattgacatatttttatgtaaagtttttctattctttgatttttaataaactttggaaaccagtttaaaaaaaaaa

SEQ ID NO: 3142 - DNA, 4407 bp, Homo Sapiens
  NM_007006
ttccggcgtgcctacgcctcctcttgcgctgtcctgttaatggcgggcagtagccgctgaggggattgcagataaccgcttcccgcacggggaaagtctaccctgcctgccactttctgctcgccgtcagcgccggagctcgccagcatgtctgtggtaccgcccaatcgctcgcagaccggctggccccggggggtcactcagttcggcaacaagtacatccagcagacgaagcccctcaccctggagcgcaccatcaacctgtaccctcttaccaattatacttttggtacaaaagagcccctctacgagaaggacagctctgttgcagccagatttcagcgcatgagggaagaatttgataaaattggaatgaggaggactgtagaaggggttctgattgtacatgagcaccggctaccccatgtgttactgctgcagctgggaacaactttcttcaaactacctggtggtgaacttaacccaggagaagatgaagttgaaggactaaaacgcttaatgacagagatactgggtcgtcaggatggagttttgcaagactgggtcattgacgattgcattggtaactggtggagaccaaattttgaacctcctcagtatccatatattcctgcacatattacaaagcctaaggaacataagaagttgtttctggttcagcttcaagaaaaagccttgtttgcagtccctaaaaattacaagctggtagctgcaccattgtttgaattgtatgacaatgcaccaggatatggacccatcatttctagtctccctcagctgttgagcaggttcaattttatttacaactgaattcctgcgcagtggagaagtaaaagaagccgcttgtctctgtgagcacagctatatacagtgtagaataaatgtggtagaaaagtttttttggttttatctcttttgcgatccctaaattgccacctttctattgtttgaatagtaaaattaatatgaagaactagatagtggtgtaaacaaatgtgataatgtttatttactttcggttctgctcatacttttttgtacaacattaaagaaaatggactttttttattttaatttctcattaaacttctaaaattcttataggtgaggatcatttttccccccaccttaggatggtgaatgttgcaacacaatgacaggtttaagtcagtcaagtttattggacccttgctttgataccattcttgggcacatactccaagattgtattagatttttgtgatgaagagcttccattacttctgaaaactatatttatctgagtgagtccaaggtgcaactcctaaatgaattgtgttgcagagaactcccagtataattcactgaccagtacattttataaccatccaggccttggtttgcaagcaacagaccttaaacatacaggaaactattaaaattggctcgatcagtagtcataggaattggtataagaagagactcatttagagctcagagttttcttcacataatgggggtattaattatttgtgctgttgcgaaattatgtgtcttattcttaaagccatggtaaaaatagggatctgtgaaggaaatttctaaaattggatgtattaggttttgaactctgagattgcacaaatattcaattaacttgaagttgtgtacatagagaagaaaatttggttttagcaaatgacagagccttcaaaaatatttttggaataatgtgaatcaaccgaaaactgggggcaaggcagaggacaggttttctcaggttaagagaaaaacgaaattttaaaaactttaaaaaatactgataaattcggatcaaatttgggggaataaaaaatattagagcaaaggagtttgctggttgtgtcattatttaatgatcaaagtatagcatgtatgccttattacagacttgttgactataggcttaatgtaaaaaggaatcttgccagatgtagctacttaaggaaaaaagggtttttaatagaaatgaacttttgattagtatggtgccagtcacagggctattttcctgaatattgggtgatgtcaaaggtatatgatacttgaggaaatcaggccaagtgtagctgagcaattaataaacactcaagtttttttagttggggtcatgtcaaaccctcacatggtggttaagtagtgactaactgtgcatgtccttcatggtaggtgagcaccagtctccatgatcaaaaatgccccagtttcctttgaaaaagccactagttctgtgaattgtccttttccctcctgcccctaacagtcctacccctctagcctacattagcatatttctcatgtaatgtattttgctggtaagctcatccattagctgcgtccttcagctattcctttagattggaggaagtggatatgaagatggattgattcagctcaccttccatgattgcttttgagggaaaagctacagtggccacatttcagatgttcacttttgcaatttgtggagggtggagagaggtagacttttgttgtgtgttttataaagtactctcagtaaggagtgtttgagttgaagagtcatctgattcgaggccactcatgttctttgtaacttaaactttgaccaagaaattcttcacttctcacttcttcacttcttcccaatatacagtaagtacgtgagccagtcatccatacactaaggcctagttgagaaaaacctttgattcaggatggctgggttactaaccttgaaatgtaagagatctggttttgaatgtaaaagttgcaacacacaaacggaagtcttaaaaactttttgctctggtcagttacaggtggatccccaataatctgtttttggttttctgatggaaataatagaattaggggaaatcaaatctggttggtaggtgtctacagtattagaagagggtataagggcactgtttaacactaagttctaatacttccagaaactgtgcattccagatctacatactaaatgctcttatcattttgaaatgggctcttgattaatagacccatattttttagtggcttctatgttgtatatttgtctaaaatgaaagctcttttgcgttctaaaactacaatatatgtcatcttattttccctgagtatccaagtatagtgcagattctatgtaaaactactaaatgacactggaatatgtttagtagattagggggaaaaactataaaggtttatacaattgtttgtagttacatttaggatggacttatccctttggagaagagtgaagtttgttttttcgccatgtgatgaagaccactgtgattttttaaaaaagtagataatacttaaaatggcgtaataattctgcacttgaatttgtactgttaacagcacatttggaagattttaaaactttttattgtcttataaatagcattcacttattattttggatatttaagggttccattaagttaacactgtatttggacaaagtgtgaccaaattagccagtctgttttcttccatgtttaattagaagtgagaggtagaagtacttcaaattcaacaggccagcaagcaatcggcttaaaattccctttcttaaatgttgtgctcttatgttctcggctttttaatgactttatttttacagtacttgttcagtcacttgagatgaaatgcttggggtagcttttccatcctcaaacttaatgtttttactagttcatagtgtttggaacagtatatgccaatcactgagactgcatcagagtttgcaattttgtatgtttcattgccaaagaaggcttagtggttgttgactgtagtataagtcagctttctgtagcataagatttgattttcccatacttacttcacttgttatacatcactgattatttgggttaaactggactcatttcaagcagtttgcttttgttcaaatcgtgatgagaaacctaatactgtaatttgatttgagccataaaacacattttaatattagcttgtattatagttattaagcttgtttttgtggaaaaaaacttactaaaacctaggtaactctagattaggccagttcaggtgtattttgtatcttagtaatggatcatatcgtaaaaatagagataagttgggaagatatattgattatgctgttctgttgagggaaaggtcatgtatttagaaatttaaacttttggttattgtgttcacatcatagtattcaagcatcatttatagtttggttttgagaacttttctggtattacgtttatggcaaatgtataaaagaaacaagttttggttatatttttatatttgtaaagtaagtttggttaaagtgatcactgttctttttttattttattgtcatttcaataaaaaatatttgaaaga

SEQ ID NO: 3143 - DNA, 1808 bp, Homo Sapiens
  NM_007008
agcctagttacagattgcactgcgtcagactgttccacacccagaagacgtcaggtgacttcagtcctgctgcagttgtgcagcagaggagactgcagacttcggttgaggaaacgggtatttcatgtctcagggagtaggtttgtgcagttacagcttttctgttggtatgcataattaataattggagctgcaaagcagatcgtgacaagagatggacggtcagaagaaaaattggaaggacaaggttgttgacctcctgtactggagagacattaagaagactggagtggtgtttggtgccagcctattcctgctgctttcattgacagtattcagcattgtgagcgtaacagcctacattgccttggccctgctctctgtgaccatcagctttaggatatacaagggtgtgatccaagctatccagaaatcagatgaaggccacccattcagggcatatctggaatctgaagttgctatatctgaggagttggttcagaagtacagtaattctgctcttggtcatgtgaactgcacgataaaggaactcaggcgcctcttcttagttgatgatttagttgattctctgaagtttgcagtgttgatgtgggtatttacctatgttggtgccttgtttaatggtctgacactactgattttggctctcatttcactcttcagtgttcctgttatttatgaacggcatcaggcacagatagatcattatctaggacttgcaaataagaatgttaaagatgctatggctaaaatccaagcaaaaatccctggattgaagcgcaaagctgaatgaaaacgcccaaaataattagtaggagttcatctttaaaggggatattcatttgattatacgggggagggtcagggaagaacgaaccttgacgttgcagtgcagtttcacagatcgttgttagatctttatttttagccatgcactgttgtgaggaaaaattacctgtcttgactgccatgtgttcatcatcttaagtattgtaagctgctatgtatggatttaaaccgtaatcatatctttttcctatctatctgaggcactggtggaataaaaaacctgtatattttactttgttgcagatagtcttgccgcatcttggcaagttgcagagatggtggagctagaaaaaaaaaaaaaaaagcccttttcagtttgtgcactgtgtatggtccgtgtagattgatgcagattttctgaaatgaaatgtttgtttagacgagatcataccggtaaagcaggaatgacaaagcttgcttttctggtatgttctaggtgtattgtgacttttactgttatattaattgccaatataagtaaatatagattatatatgtatagtgtttcacaaagcttagacctttaccttccagccaccccacagtgcttgatatttcagagtcagtcattggttatacatgtgtagttccaaagcacataagctagaagaagaaatatttctaggagcactaccatctgttttcaacatgaaatgccacacacatagaactccaacatcaatttcattgcacagactgactgtagttaattttgtcacagaatctatggactgaatctaatgcttccaaaaatgttgtttgtttgcaaatatcaaacattgttatgcaagaaattattaattacaaaatgaagatttataccattgtggtttaagctgtactgaactaaatctgtggaatgcattgtgaactgtaaaagcaaagtatcaataaagcttatagacttaaaaaaaaaaaaaaaaaaaaaaaaaaaaaaa

SEQ ID NO: 3144 - DNA, 3822 bp, Homo Sapiens
  NM_007010
agtctgcgcaggcgccgtagaactgtggcgctttctgggtaaagatggacgtccacgatctctttcgccggctcggcgcgggggccaaattcgacacgagacgcttctcggcagacgcagctcgattccagataggaaaaaggaaatatgactttgattcttcggaggtgcttcagggactggacttttttggaaacaagaagtctgtcccaggtgtgtgtggagcatcacaaacacatcagaagccccaaaatggagagaaaaaagaagagagcctaactgaaaggaagagggagcagagcaagaaaaaaaggaagacgatgacttcagaaattgcttcccaagaagaaggtgctactatacagtggatgtcatctgtagaagcaaagattgaagacaaaaaagttcagagagaaagtaaactaacttccggaaagttggagaatctcagaaaagaaaagataaacttcttgcggaataaacacaaaattcacgtccaaggaaccgatcttcctgacccaattgctacatttcagcaacttgaccaggaatataaaatcaattctcgactacttcagaacattctagatgcaggtttccaaatgcctacgccaatccaaatgcaagccatcccagttatgctgcatggtcgggaacttctggcttctgctccaactggatctggaaaaacattagcttttagcattcctattttaatgcagctgaaacaacccgcaaataaaggcttcagagccctgattatatcaccaacacgagaacttgccagccagattcacagagagttaataaaaatttctgagggaacaggattcaggatacacatgatccacaaagcagcagtggcagccaagaaatttggacctaaatcatctaaaaagtttgatattcttgtgactactccaaatcgactaatctatttattaaagcaagatccccccggaatcgacctagcaagtgttgagtggcttgtagtagacgaatcagataaactgtttgaagatggcaaaactgggttcagagaccagctggcttccattttcctggcctgcacatcccacaaggtccgaagagctatgttcagtgcaacttttgcatatgatgttgaacagtggtgcaaactcaacctggacaatgtcatcagtgtgtccattggagcaaggaattctgcagtagaaactgtagaacaagagcttctctttgttggatctgagaccggaaaacttctggccatgagagaacttgttaaaaagggtttcaatccacctgttcttgtttttgttcagtccattgaaagggctaaagaactttttcatgagctcatatatgaaggtattaatgtggatgttattcatgcagagagaacacaacaacagagagataacacagtccacagtttcagagcaggaaaaatctgggttctgatttgtacagccttgctagcaagagggattgattttaaaggtgtgaacttggtgatcaactatgactttccaactagctcagtggaatatatccacaggataggtcgaactggaagagcagggaataagggaaaagcaattacatttttcactgaggatgataagccattattaagaagcgttgctaatgttatacagcaggctgggtgtcctgtaccagaatacataaaaggttttcagaaactactaagcaaacaaaagaaaaagatgattaagaaaccattggaaagggagagcattagtacaactccaaaatgtttcttagaaaaagctaaggataaacagaaaaaggtcactggtcagaacagcaagaagaaagtagctcttgaagacaaaagttaaaaacagactttaaaaatactgtcccagaaatgtaattttatgatcccagcatgaatgttattttcatggaatacttgaagtcttacagtcacctgtaccaaacatttgaaatcaactacaagtacatgggactggtgataaatgatcctaaactatcaagtcagtttcaatttgtaggtgccttttttttttcctgtagagatgagggtcttgccatgttgtccaggctggtcttgaactcctgacctcacacaatcctcctgccttagcctcctgagtaactgagattacaggcacaagctgctgcacccagctctgtaggtgacttttaaatgattatacaatggaaataacattcattgacatttctgtggtttgaatccagagagatacttcttatagaaaaacaaatgtttatgctaaaaataacaccaaaatgtggtgaactcttaaggacttttcccttcaagtgtgaaggaaggtgtgatgaatgctgtggagaggcatctggaacagaaattcaaaataaagccttgacattaaataccccttccactgctcactttgtggatggtagcatgagctgtctaccaagaagaaacctgctgctctcttaattttaatatttcctaatttgttgatggccttttgtgttgtgaaccacaacaaagagaggcctcttttgtggctggttattccagttccctgggattttaaattctttggtctattaagtatccttgtattggatacgtaataccttagtgctgtcataatgttgtacaagatcatgatcagcttctccctttcttcattttctgtgatttaaccatgttctttcctgtctctttccatttaagatattttatttgaatactgataaacattttatcctgataaggaagaatgttcttgttacttgatatacctctgtcttcattctcttacagcttatctttccttaggttgatggtgcctcatttaataagtagatctctacttaagctaaaggattatgatcatatggtgttggagactattagctattagatttttctcaaaatatgagttttgtacaatggaatgaaaaagtgacttcatatacgtaagactggtgcctaagaatgacttgaatgttatcagtactaccacagaactataatatacattgccttttctcagcagcatttgaattcaacttatttatttcctctatttgtagctttttgttctagagtcagaacaggtggactttgctttgaatattttagatgggacaaaaattgttcatcttcggaatttatttaaagaaagatctactggtacagggtgtaaaaatacttacaagaatatgatttttttgtttgttcatgcaaacagatcctttacccaatatatattctggaggtaggtatactggtgcaacccatttgccagctgtgtgactttgagtaagttcttaatttctcagagtttcagtgttctcatctataaaattatgtctccaattgtgagtacctagcactgtacctgatacatagtaaactcacaataaatatttcttaaacatagattttgttaggaatacaggcttgataacacagtccttacccttacaatgtaatgttagagataaaggagcaaatagagtcacgcatcacttaatgacagagatatgttctgagaaatgcatcgttaggtgatattgtcattgtgtaaacatcatgttgtttacttccacaaacctagatggtatagcctaccagtacacctaggctatatggtatagtctgttgctcctaggctacaaacccgtatagcatgttactgtcctgcatgctatagacagttggaacatgtagacttgtataaacactgcacacttaacctatactaaatttattgaaaatatttttcttggccaggcgtagtggctcatgcctgtaatcctaacacttcgggaggcctaggcgggcag

SEQ ID NO: 3145 - DNA, 4120 bp, Homo Sapiens
  NM_007013
ggctgctggcggcctgggctgccggggccgacgcctgggtggctgctgccgccgcgcctgctgcgagatggcgatcttgggcgcggaagggtgagggcgcccgccgcaggaggaggtgccgctgccgtggccgcccggctgccgggagccgacagcttcgcgccggggttgtctcctcacagactatgagctccttgaaagagggaatcgtgtcttactcatctttgtatccccagtgtctagcagttcctgatacatagttttagctgaattttgggacatggccactgcttcaccaaggtctgatactagtaataaccacagtggaaggttgcagttacaggtaactgtttctagtgccaaacttaaaagaaaaaagaactggttcggaacagcaatatatacagaagtagttgtagatggagaaattacgaaaacagcaaaatccagtagttcttctaatccaaaatgggatgaacagctaactgtaaatgttacgccacagactacattggaatttcaagtttggagccatcgcactttaaaagcagatgctttattaggaaaagcaacgatagatttgaaacaagctctgttgatacacaatagaaaattggaaagagtgaaagaacaattaaaactttccttggaaaacaagaatggcatagcacaaactggtgaattgacagttgtgcttgatggattggtgattgagcaagaaaatataacaaactgcagctcatctccaaccatagaaatacaggaaaatggtgatgccttacatgaaaatggagagccttcagcaaggacaactgccaggttggctgttgaaggcacgaatggaatagataatcatgtacctacaagcactctagtccaaaactcatgctgctcgtatgtagttaatggagacaacacaccttcatctccgtctcaggttgctgccagacccaaaaatacaccagctccaaaaccactcgcatctgagcctgccgatgacactgttaatggagaatcatcctcatttgcaccaactgataatgcgtctgtcacgggtactccagtagtgtctgaagaaaatgccttgtctccaaattgcactagtactactgttgaagatcctccagttcaagaaatactgacttcctcagaaaacaatgaatgtattccttctaccagtgcagaattggaatctgaagctagaagtatattagagcctgacacctctaattctagaagtagttctgcttttgaagcagccaaatcaagacagccagatgggtgtatggatcctgtacggcagcagtctgggaatgccaacacagaaaccttgccatcagggtgggaacaaagaaaagatcctcatggtagaacctattatgtggatcataatactcgaactaccacatgggagagaccacaacctttacctccaggttgggaaagaagagttgatgatcgtagaagagtttattatgtggatcataacaccagaacaacaacgtggcagcggcctaccatggaatctgtccgaaattttgaacagtggcaatctcagcggaaccaattgcagggagctatgcaacagtttaaccaacgatacctctattcggcttcaatgttagctgcagaaaatgacccttatggacctttgccaccaggctgggaaaaaagagtggattcaacagacagggtttactttgtgaatcataacacaaaaacaacccagtgggaagatccaagaactcaaggcttacagaatgaagaacccctgccagaaggctgggaaattagatatactcgtgaaggtgtaaggtactttgttgatcataacacaagaacaacaacattcaaagatcctcgcaatgggaagtcatctgtaactaaaggtggtccacaaattgcttatgaacgcggctttaggtggaagcttgctcacttccgttatttgtgccagtctaatgcactacctagtcatgtaaagatcaatgtgtcccggcagacattgtttgaagattccttccaacagattatggcattaaaaccctatgacttgaggaggcgcttatatgtaatatttagaggagaagaaggacttgattatggtggcctagcgagagaatggtttttcttgctttcacatgaagttttgaacccaatgtattgcttatttgagtatgcgggcaagaacaactattgtctgcagataaatccagcatcaaccattaatccagaccatctttcatacttctgtttcattggtcgttttattgccatggcactatttcatggaaagtttatcgatactggtttctctttaccattctacaagcgtatgttaagtaaaaaacttactattaaggatttggaatctattgatactgaattttataactcccttatctggataagagataacaacattgaagaatgtggcttagaaatgtacttttctgttgacatggagattttgggaaaagttacttcacatgacctgaagttgggaggttccaatattctggtgactgaggagaacaaagatgaatatattggtttaatgacagaatggcgtttttctcgaggagtacaagaacagaccaaagctttccttgatggttttaatgaagttgttcctcttcagtggctacagtacttcgatgaaaaagaattagaggttatgttgtgtggcatgcaggaggttgacttggcagattggcagagaaatactgtttatcgacattatacaagaaacagcaagcaaatcatttggttttggcagtttgtgaaagagacagacaatgaagtaagaatgcgactattgcagttcgtcactggaacctgccgtttacctctaggaggatttgctgagctcatgggaagtaatgggcctcaaaagttttgcattgaaaaagttggcaaagacacttggttaccaagaagccatacatgttttaatcgcttggatctaccaccatataagagttatgaacaactaaaggaaaaacttctttttgcaatagaagagacagagggatttggacaagaatgaatgtggcttcttattttggaggagctcttgcatttaaataccccagccaagaaaaattgcacagatagtgtatataagctgttcattctgtacagtgaattttccgaacctctcaaagtatgttttccgttcttccacagaaatatgcaaaacagttcatccttttctactttatttattgttcccttgaaatgactgaccaggaaaaagatcatccttaaattttgaagcaagtgagagactttattaaaaatacatatatatctatataaacatatatgatagtggctctagttttatagagctccaagtgtattaaacatgacagccattcattcataaagatctggatttgctttaccttgttaatattatctaggggaaaaagtgcaaattgctccatgttcttctctcccttatgtaacatctcctgagggtgtttagttgcatggctgttcagaaaggtattaagggcttaggccaaatcttactttgagtatgttaaaaaaaaaaaaatgctgctggcttttctgaagacaggtgcttgaacttgtcagtttgttttaaataaatacaatagttgaaaatttttctctgttacatcagtaatattgttaaagtaatggatagaaccataacttacacatgaaagtcatatactagatccaatactatttagtttattatcgaaattggaaggattcattgagcagcatagaagtttgtttacatgttactttgagatgctaggtatttgtggaattaaaaagaatcaggctcttttgtactttgtttttaaatctgtgatgcttttcaaatttaattcataataaattgatgcaatttcatacttaggaacatacaaaaggtaatgtaaactctgccacttttttgtgttcaaaattttggtttttatgaagccagatggattgaagagttacataagcatttgaatgctctaatataaggctaatgattttctgttagtgtttgaatatcttcattcctctcaaattcataacagttctatttaactgaattaaataaccatatgaaaaaaaaaaaaaaaaa

SEQ ID NO: 3146 - DNA, 7431 bp, Homo Sapiens
  NM_007018
gttttgatgaacacctggctttattcttgcaatgaagaaaggttctcaacaaaaaatattctccaaagcaaagataccatcatcatctcactctcctatcccatcatctatgtccaatatgagatctaggtcactttcacctttgattggatcagagactctaccttttcattctggaggacagtggtgtgagcaagttgagattgcagatgaaaacaatatgcttttggactatcaagaccataaaggagctgattcacatgcaggagttagatatattacagaggccctcattaaaaaacttactaaacaggataatttggctttgataaaatctctgaacctttcactttctaaagacggtggcaagaaatttaagtatattgagaatttggaaaaatgtgttaaacttgaagtactgaatctcagctataatctaatagggaagattgaaaagttggacaagctgttaaaattacgtgaactcaacttatcatataacaaaatcagcaaaattgaaggcatagaaaatatgtgtaatctgcaaaagcttaaccttgcaggaaatgaaattgagcatattccagtatggttagggaagaagttaaaatctttgcgagtcctcaatttgaaaggcaacaagatatcatcgctccaagatataagcaagttgaaaccgcttcaagatttgatttctctgatcctagttgaaaatccagttgtgacccttcctcattacctccagtttaccattttccacctccgttcattggaaagtttggaaggtcagccagtaaccactcaggatagacaggaggcttttgagagattcagtttagaagaggtagaaagactggaaagagacctagaaaaaaagatgatagaaactgaagagcttaagagcaaacaaacaaggttccttgaggaaattaaaaatcaagataaattgaataaatcattaaaagaggaggccatgttacagaaacagagctgtgaggaactcaagagtgacttaaacacaaaaaatgaattgctaaaacagaagaccatagaattaacacgagcatgtcagaagcaatatgagctggaacaggaattggccttttataaaattgatgctaaatttgagccactaaattattatccatcagagtatgctgaaattgataaagccccagatgaaagcccttacattggcaaatccagatacaagagaaatatgtttgccacagagagttatattattgacagtgctcaggcagtacagatcaagaagatggagccagatgaacaacttagaaatgatcacatgaacttgagaggccacacaccactggacacgcaactggaagacaaagaaaaaaaaataagtgcagcacaaactcgactatcagaactgcatgatgaaatagaaaaggcagaacaacaaattttgagagctactgaagaatttaaacaactggaagaagctatacaactaaaaaagatttcagaagcagggaaagaccttctttacaagcagttgagtggtagactacaacttgtaaataaattacgccaggaagctctggatctagaactgcagatggaaaagcaaaagcaggaaattgccggaaagcagaaggagattaaggacctgcaaatagccatagatagcctggattccaaagacccaaaacattcccatatgaaggctcaaaagagcggtaaagaacaacagcttgacattatgaacaagcagtaccaacaacttgaaagtcgtttggatgagatactttctagaattgctaaggaaacggaagagattaaggaccttgaagaacagcttactgaaggccagatagcagcaaatgaagccctgaagaaggatttagaaggtgttatcagtgggttgcaagaatacctggggaccattaaaggccaggcaactcaggcccagaatgagtgcaggaagctgcgggatgagaaagagacattgttgcagagattgacagaagtcgagcaggagagagaccagctggaaatagttgccatggatgcagaaaatatgaggaaggagcttgcagagctagaaagtgccctccaagagcagcatgaggtgaatgcatctttgcagcagacccagggagatctcagtgcctatgaagctgagctagaggctcggctaaacctaagggatgctgaagccaaccagctcaaggaagagttggaaaaagtaacaagacttacccagttagaacaatcagcccttcaagcagaacttgagaaggaaaggcaagccctcaagaatgcccttggaaaagcccagttctcagaagaaaaggagcaagagaacagtgagctccatgcaaaacttaaacacttgcaggatgacaataatctgttaaaacagcaacttaaagatttccagaatcaccttaaccatgtggttgatggtttggttcgtccagaagaagtggcagctcgtgtggatgagctaagaagaaaactgaaattaggaactggggaaatgaacatccatagtccttcagatgtcttagggaaaagtcttgctgatttacagaaacaattcagtgaaattcttgcacgctccaagtgggaaagagatgaagcacaagttagagagagaaaactccaagaagaaatggctctgcagcaagagaaactggcaactggacaagaagagttcaggcaggcctgtgagagagccctggaagcaagaatgaattttgataagaggcaacatgaagcaagaatccagcaaatggagaatgaaattcactatttgcaagaaaatctaaaaagtatggaggaaatccaaggccttacagatctccaacttcaggaagctgatgaagagaaggagagaattctggcccaactccgagagttagagaaaaagaagaaacttgaagatgccaaatctcaggagcaagtttttggtttagataaagaactgaagaaactaaagaaagccgtggccacctctgataagctagccacagctgagctcaccattgccaaagaccagctgaagtcccttcatggaactgttatgaaaattaaccaggagcgagcagaggagttgcaggaagcagagaggttcagcagaaaggcagcacaagcagccagagatctcacccgagcagaagctgagatcgaactcctgcagaatctcctcaggcagaagggggagcagtttcgacttgagatggagaaaacaggtgtaggtactggagcaaactcacaggtcctagaaattgagaaactgaatgagacaatggaacgacaaaggacagagattgcaaggctgcagaatgtactagacctcactggaagtgacaacaaaggaggctttgaaaatgttttagaagaaattgctgaacttcgacgtgaagtttcttatcagaatgattacataagcagcatggcagatcctttcaaaagacgaggctattggtactttatgccaccaccaccatcatcaaaagtttccagccatagttcccaggccaccaaggactctggtgttggccttaagtactcagcctcaactcctgttagaaaaccacgccctgggcagcaggatgggaaggaaggcagtcaacctccccctgcctcaggatactgggtttattctcccatcaggagtgggttacataaactgtttccaagtagagatgcagacagtggaggagatagtcaggaagagagtgagctggatgaccaagaagaacccccatttgtgcctcctcctggatacatgatgtatactgtgcttcctgatggttctcctgtaccccagggcatggccctgtatgcaccacctcctcccttgccaaacaatagccgacctctcacccctggcactgttgtttatggcccacctcctgctggggcccccatggtgtatgggcctccaccccccaacttctccatccccttcatccctatgggtgtgctgcattgcaacgtccctgaacaccataacttagagaatgaagtttctagattagaagacataatgcagcatttaaaatcaaagaagcgggaagaaaggtggatgagagcatccaagcggcagtcggagaaagaaatggaagaactgcatcataatattgatgatcttttgcaagagaagaaaagcttagagtgtgaagtagaagaattacatagaactgtccagaaacgtcaacagcaaaaggacttcattgatggaaatgttgagagtcttatgactgaactagaaatagaaaaatcactcaaacatcatgaagatattgtagatgaaattgagtgcattgagaagactcttctgaaacgtcgctcagagctcagggaagctgaccgactcctggcagaggctgagagtgaactttcatgcactaaagaaaagacaaaaaatgctgttgaaaagttcactgatgccaagagaagtttattgcaaactgagtcagatgctgaggaattagaaaggagagctcaggaaactgctgttaacctcgtcaaagctgatcagcagctaagatcgctccaggctgatgcaaaggatttggagcagcacaaaatcaagcaagaagaaatcttgaaagaaataaacaaaattgtagcagcaaaagactcagacttccaatgtttaagcaagaagaaggaaaaactgacagaagagcttcagaaactacagaaagacatagagatggcagaacgcaatgaggatcaccacctgcaggtccttaaagaatctgaggtgcttcttcaggccaaaagagccgagctggaaaagctgaaaagccaggtgacaagtcagcagcaggagatggctgtcttggacaggcagttagggcataaaaaggaggagctgcatctactccaaggaagcatggtccaggcaaaagctgacctccaggaagctctgagactgggagagactgaagtaactgagaagtgcaatcacattagggaagtaaaatctcttctggaagaactgagttttcagaaaggagaactaaatgttcagattagtgaaagaaaaactcaacttacacttataaagcaggaaattgaaaaagaggaagaaaatcttcaggttgttttaaggcagatgtctaaacataaaaccgaactaaagaatattctggacatgttgcaacttgaaaaccatgagctacaaggtttgaagctacaacatgaccaaagggtatctgaattagagaagactcaggtggcagtgctagaggagaaactggagttagagaatttgcagcagatatcccagcagcagaaaggggaaatagagtggcagaagcagctccttgagagggataaacgagaaatagaacgaatgactgctgagtcccgagctttacaatcgtgtgttgagtgtttgagcaaagaaaaggaagatctccaagagaaatgtgacatttgggaaaaaaagttggcacaaaccaaaagggttttagcagcagcagaagaaaatagcaaaatggagcaatcaaacttagaaaagttggaattgaatgtcagaaaactgcagcaggaactagaccaactaaacagagacaagttgtcactgcataacgacatttcagcaatgcaacagcagctccaagaaaaacgagaagcagtaaactcactgcaggaggaactagctaatgtccaagaccatttgaacctagcaaaacaggacctgcttcacaccaccaagcatcaggatgtgttgctcagtgagcagacccgactccagaaggacatcagtgaatgggcaaataggtttgaagactgtcagaaagaagaggagacaaaacaacaacaacttcaagtgcttcagaatgagattgaagaaaacaagctcaaactagtccaacaagaaatgatgtttcagagactccagaaagagagagaaagtgaagaaagcaaattagaaaccagtaaagtgacactgaaggagcaacagcaccagctggaaaaggaattaacagaccagaaaagcaaactggaccaagtgctctcaaaggtgctggcagctgaagagcgtgttaggactctgcaggaagaggagaggtggtgtgagagcctggagaagacactctcccaaactaaacggcagctttcagaaagggagcagcaattggtggagaaatcaggtgagctgttggccctccagaaagaggcagattctatgagggcagacttcagccttctgcggaaccagttcttgacagaaagaaagaaagctgagaagcaggtggccagcctgaaggaagcacttaagatccagcggagccagctggagaaaaaccttcttgagcaaaaacaggagaacagctgcatacaaaaggaaatggcaacaattgaactggtagcccaggacaaccatgagcgggccaggcgcctgatgaaggagctcaaccagatgcagtatgagtacacggagctcaagaaacagatggcaaaccaaaaagatttggagagaagacaaatggaaatcagtgatgcaatgaggacacttaaatctgaggtgaaggatgaaatcagaaccagcttgaagaatcttaatcagtttcttccagaactaccagcagatctagaagctattttggaaagaaacgaaaacctagaaggagaattggaaagcttgaaagagaaccttccatttaccatgaatgagggaccttttgaagaaaaactgaacttttcccaagttcacataatggatgaacactggcgtggagaagcactccgggagaaactgcgtcaccgggaagaccgactcaaggcccaactccgacactgtatgtccaagcaagcagaagtattaattaaaggaaagcggcagacagagggcactttacacagtttgaggagacaagtagatgctttaggggaattggtcaccagcacctctgcagattcagcgtcatcacccagtctgtctcagctggagtcttccctcacagaggactctcaacttggacaaaatcaggaaaagaatgcctcagccagatgaggaatactgtcttgtgtaaatatattcaaggaaaacacctccactacctcactgacttcataattggaatgtcacatggtttttttaatcaagatgcagtgaactgagattctgaaactccactgtagtttactttgcctgtaccattaatgccaatgtttttataaatcacttgtacatagtacatatgggaatagttgcatatgggaatttaaaccaacatgtggctgagcctttttttttttaatcttcgtaacatgtttaaaaaaaaacagtgattttaactgcatatttgaacctacaaactggtaaatcttattaacaaaaagaatgtacttaaggccctctttatttatagtgtcgagttatttttgaattttgcttaaaatctatttttcatatgaaaataaaagataacaatc

SEQ ID NO: 3147 - DNA, 1243 bp, Homo Sapiens
  NM_007022
gtcgcacccggaagtaaagcggctccgtgacggagcggcggtgcgcgcggcagggcccggagtatcccgctttctttggaggaaaccaccgcatcagatctgcgctgcggcagaggcagccttttctccagtgaggagtgaacagtgggcacctgagatcctggcccacgctactatgctttcaggctacaaccactagcacggctgacgatggccctttctgcggagaccgagtcacacatctaccgagctctgcgtactgcttctggcgctgccgcccaccttgtggccctgggctttaccatctttgtggctgtgcttgccaggcctggctccagcctgttctcctggcacccggtgcttatgtctttggctttctccttcctgatgaccgaggcactactggtgttttctcctgagagttcgctgctgcactccctctcacggaaaggccgagcacgctgccactgggtgctgcagctgctggccctgctgtgtgcactgctgggcctcggccttgtcatcctccacaaagagcagcttggcaaagcccacctggttacgcggcatgggcaggcagggctgctggctgtgctgtgggcagggctgcagtgctcaggtggggtggggctgctctaccccaagctgctgccccgatggcccctggcgaagctcaagctataccatgctacttctgggctggtgggctacctgctgggtagtgccagcctcttgctgggcatgtgctcactctggttcactgcctctgtcactggtgcagcctggtacctggctgtattatgccctgtcctcaccagcttggtcattatgaaccaggtgagcaatgcctacctataccgcaagaggatccaaccatgagctcttcccagcctaggggaagcctggatttgcccctccatgtaggagctgggcctagggacctgttgaactctctcagctgagtcaggggacacctcaggcactgggacagttgggcatttggaggcccgtgtgtgaattcctgctcctcatgctggagtgcctcccatttccttcccctttctctgtcatcccagaggaacataggcatcatgtgtctggatgaagctggggctgcaagactgcctctcctgcaaggcagctcatacttgtactgtatgttcagaaattttaggagagaaaaaagtaaaaaatttgtaaaaaaaaaaaaaaaaaaaaaaaaaaaaaaaaaaaaaaaaaaaaa

SEQ ID NO: 3148 - DNA, 1508 bp, Homo Sapiens
  NM_007026
ggcgcgggcggagggaggaggaggcggcgcgcgcggcgcccagcccgcagaagccggtggccgcgcaggaggacggagccctaaccgcaacccgcgccgcgccgcgccgcgccgatttgatttgtatccactgtcaccagcactgctcacttaggactttctggatccggacccaggcagcgcacactggactcttgaggaagaaggagactctaattttggattccttggtggaggaaaataaaacactctggtcttgccgccaacgatgcaagtgtgactgctggcgtcttcatgagctccagaggtcacagcacgctaccaaggactctcatggcccctcggatgatttccgagggagacataggaggcattgctcaaatcacctcctctctattcctgggcagaggcagtgtggcctccaatcggcacctcctccaggctcgtggcatcacctgcattgttaatgctaccattgagatccctaatttcaactggccccaatttgagtatgttaaagtgcctctggctgacatgccgcatgcccccattggactgtactttgacaccgtggctgacaagatccacagtgtgagcaggaagcacggggccaccttggtgcactgtgctgcaggggtgagccgctcagccacgctgtgtatcgcgtacctgatgaaattccacaacgtgtgcctgctggaggcgtacaactgggtgaaagcccggcgacctgtcatcaggcccaacgtaggcttctggaggcaactgatagactacgagcgccagctctttgggaagtcgacagttaaaatggtacagacaccttatggcatagttcccgacgtctatgagaaggagtcccgacacctgatgccttactgggggatttagtgccactgaagcctgcgtcagcagcccgagcggggccggcatctgctccccgccgtctgctccctctccactctcttctcaaatggctgacttctggttctccctcaagtgttttttacactgggtgttcaaatttattttaagagatagggagggaggggacataaagggaatgcatacattgctagtcacatttttaaaattaacattttggaatagtgtttatggaaatctttagcttttaatcatttttaccaatttgaacagtttaataaactggttctgctctcttctgaatctcatgcctttggcaccttggtaggtgcaggaggagctcagtgcaaaaatcactttggggcctcattaaccctttagagacaagctttgccccaggctgcggaccagacagatgcttagggaaggttgataaccagcttcagtctctactggattagccctactctttcctttcccctccattatttagtgactctgtaagtaagttaaatacacccttattatttagctgttaagtaactataatgaaatctgctgcaaaatctctcttggaatccatgtgcccaggattatattagcattatttttaataaatctat

SEQ ID NO: 3149 - DNA, 3118 bp, Homo Sapiens
  NM_007033
agcccttggccccgccctcgcgccatcttgggggccctggaggcggcgccgcggaggacggagcggaagtgctcgctgcagcttcccggagccggagcgcagcgcctgcggccgcccgtgccccgccgtcctccttcccgcggccgtgagggagaccgcggctcggccgtagcggagctgcgagttacagaatgtctgaaggggacagtgtgggagaatccgtccatgggaaaccttcggtggtgtacagatttttcacaagacttggacagatttatcagtcctggctagacaagtccacaccctacacggctgtgcgatgggtcgtgacactgggcctgagctttgtctacatgattcgagtttacctgctgcagggttggtacattgtgacctatgccttggggatctaccatctaaatcttttcatagcttttctttctcccaaagtggatccttccttaatggaagactcagatgacggtccttcgctacccaccaaacagaacgaggaattccgccccttcattcgaaggctcccagagtttaaattttggcatgcggctaccaagggcatccttgtggctatggtctgtactttcttcgacgctttcaacgtcccggtgttctggccgattctggtgatgtacttcatcatgctcttctgtatcacgatgaagaggcaaatcaagcacatgattaagtaccggtacatcccgttcacacatgggaagagaaggtacagaggcaaggaggatgccggcaaggccttcgccagctagaagcgggactgaggctgcctcacgtgttgcaagaacagttttgagccattgttaacaatgccttttttcttcacataaagtagttgattacgagggagtcaaattttctttttaaaaaggagcttcaatgatttgtaactgaaatatcaggttctagaagaaactggcgcttaaaccaaatcgcatggatttctttttcagtgacgttcaagtgtttctcacggatggaattctagtcagctgcaggcgggaagccaggcgggtggagcccatgggagcaagggcgagtggccggtccccgctgtgccaggtgggcaggcaggagcaaggcctgcgagggaggaacgggccgctccccgccagccgccttccccagcagccgcaggtggtgccagccactccacagagcccgagggatgatctagcctgattcctgcgtgtccgaaagaacttaacgttttaaaggtgattgtcaagtaactgtgtggggttctaatgccagtttcctaattccatctcactggagatgtttaaagttggcctctatcctaatgactcaaaacttggttcttaactaccatgattgcttttgagggcccggaattataaatatatattatattttaattgtttgagattattttgacacatttctttgatacgtagagtgttttgtttttaatttaaatctgtcctcatgcaaccctccatgaggggcagcgaagctggcagggagcagactggctttgtaggttcagcactcggccccccactgcgggagaggcggaacccacttgcatgtcagcgtttttgattcgagaaaagaaatactctcaacgttttaccaagtgattttacctccacctttactaaagtctttacctaaaacatggcagtcgctggacacaggaaagcccaccttttgtttggccttttcgaaaggtgacccatattgcacagcagaacatcacagctgtggtcccagatgagacactgacatgcgagtgaaggcctctcctcctgggccccgggctgcgcaggctcctcactctgggcggtgtttcctgtctcagaattgacacggtgaatgcttagtgtctggattttcttgtaccagtgtttacatatctgacatcgagctcctctaagaggccacgttcaagcttgtgtgtccctgacccaagatagccagtgctgctcccaggtggtacttctggtaccgtgttgagacacttgggattctcagactgtggacaggagtgtttgtcatttttcatactgttttcttaataagcgctcaggcctaaggtgtgacaggaagtcgcacgcgcttggccagagcacagtgaagcaaaggactgggtgctgatggatggagccacggcggcatctgcccacccggccgcagcccccagtgcctctcctggtggtcctcccagtctagagggtcacggcccccccgccctcctccgtctctggcaagctgaccttgactaacccaggaatacagggtcatcctcattcctaagtaagtcaaacagcaagacatggtttgcgcgggtctttgccggaagccggtcctgctggccaggtgttttacgtcagcagggaaatgtggcacacgccctcgaggcattttaacactgcgcttcaggaaatctcaagttccatcttgtgttagtaacgtacccacattttgctggagttagtttattaaagatgcctacggtgaactctctggcgcaggttaaatgcagttttgaaaacctggaaacatcaaatggaggcgggaaataggctggggccgagctgaggggctgaacacagcagtgaccgtgggtcagcaggtcgcctgcccagcaggccccccaggagagggctcgggcgcccctggcagcccccatacccccaggacctggctcgtgagtgcgtctgggtcaggaagagacctctctgtgcgtctcaggctgagatgcagatttctgttttctaaaactggaagcgaccttgacgtgtattgaaggtgtgtgtgccaaatgcttccgacggaggtgctggccttggttggtttctctctgccccgtgtggtcatcaagtcctgggggatgtgctctgcccagccgccctcggggagagcagcgccgcctcccatggggccgtggggctgctgttctcactgcactggctgaagcaacccgccagcctccgtgccccaccccacccagcacgcactcattcagtccattgccttaacacaagcctgatggggctgttttctcacaatataaacgaataaagtgtcttctggcctacttctgaaaaaaaaaaaaaaaaaa

SEQ ID NO: 3150 - DNA, 2224 bp, Homo Sapiens
  NM_007041
ggcgcgctgcattgtggggtggcggcggcggccgcgctagcgacgcggggccgggcggctgagcgttcgcggggccgaggccatggctttctgggcggggggttcgcccagcgtcgtggactatttccctagcgaggacttctaccgctgcggctactgcaagaacgagtcgggcagccgctccaatggcatgtgggcacattccatgacagtacaggattatcaggatctcatagaccgaggatggcgaagaagtggaaaatatgtgtacaaacctgtcatgaatcaaacatgttgtcctcagtacacaataaggtgccgacctttacaatttcagccttcaaaatctcacaagaaggttttgaaaaaaatgttgaaatttctggctaaaggggaggttcccaaaggaagttgtgaggatgagcccatggattccacaatggatgatgctgttgcgggtgactttgcattgataaataaactggatatacagtgtgatcttaaaacactcagtgatgacatcaaagagagtttagagagtgaaggaaaaaattcaaagaaagaagaacctcaggaattacttcagtcacaagatttcgtaggagagaagttgggctctggtgaaccgtcacattcagttaaagttcacacagttcctaagccaggcaaaggggctgatttgagtaagcctccatgtcgaaaagcaaaggaaatccggaaagaaaggaaaaggttaaaactaatgcagcagaacccagctggagaacttgagggtttccaggctcaaggtcacccaccatctttgtttccaccaaaggctaaatccaaccagccaaaatcactcgaagatttaatttttgagtctttaccagagaatgcatcacacaagttagaggtgaggttagtacctgtctcctttgaggacccagagttcaagtcgtctttcagccagtccttttctttgtatgtcaagtatcaagtggccatacaccaggatccacccgatgaatgtgggaagactgagttcacaagattcctttgcagttcacccttggaggcagagactccccctaatgggccagattgtggctatggctcctttcaccagcagtactggcttgacggaaagatcattgctgtgggggtgattgacatcctcccaaactgtgtatcatctgtgtatttgtactacgatcctgattattcgtttttgtctttgggcgtctactctgcactacgagaaattgcttttactaggcagcttcatgagaaaacttctcaactcagctattattatatgggtttctacattcattcatgtcccaagatgaaatataagggtcagtatagaccttctgatttgctgtgccctgagacatatgtttgggtacccattgagcaatgcctgccttcacttgaaaactccaagtactgccgtttcaaccaggacccagaagcagtggatgaggatcgcagtacggaacctgaccgattgcaggtgtttcacaagagagccatcatgccttacggtgtttataagaaacagcagaaagacccaagtgaggaggctgctgttctgcagtacgccagcctggtggggcagaagtgctccgagcggatgctgctgttcagaaactgacctgttcacctctgccgggaagttcctgtgttgtgctgatgatttgtgccaggatacatattcagtacctgtggggaaataactgtcaccacccacaaattagacattttttattttgactatctatggcttttaaaaaatattttgtggcaatgtatctgtgagaatctcatagttaatataaagattttaaaactgcattatgacctagcccccataattgggatttatcattttggaggattctttctagagcaagatatgctcaaattctcctgtttgtattttgtaaaatgaagaagtgaatctaagtaacttaatcacagttgtgcattttttttggttctgttagagaaattaaaacagactgtttcctcaggcccattttaaactgaacttatgctaggaaaccttaagtatggggaaggtagaaagttcatttcatcacttagaaaatatgtcttctcaagaacaaaactgtgctgttacaactcagtgttcaatgtgaaattgctgccaaatgttatgtagtttaatagagaacttgaaaaaataaaacattaaaatggaaaaaaaaaaaaaaaa

SEQ ID NO: 3151 - DNA, 3357 bp, Homo Sapiens
  NM_007043
agaacagtttcatttccggagccaccggaagcagcttgcaaatggcgtctccctcgctggagcggccagaaaaaggcgctggaaaaagtgaatttcgtaaccagaagccgaagccggagaaccaagatgaatcagaactccttacggttcctgatggttggaaggaaccagctttttccaaagaggacaatcccagaggacttttggaggagagcagtttcgcaactttgttcccaaaatacagggaagcttacttgaaagagtgttggccattggtgcagaaagccttaaatgaacatcatgttaatgcaaccctggacctgatcgaaggcagcatgactgtttgtactacaaagaagacttttgatccatatatcatcattagggccagagatctgataaaactgttagcaaggagtgtttcatttgaacaggcagtacgaattcttcaggatgatgttgcatgtgacatcattaaaataggttctttagtaaggaataaagagagatttgtaaaacgaagacaacggcttattggtcccaaaggatctacattgaaggcattggaactcttaactaattgttacattatggttcagggaaacacagtttcagccattggaccttttagtggcttaaaagaggttagaaaagtagtccttgatactatgaagaatattcatccaatttataacattaaaagcttaatgattaagagagagttggcaaaagattctgaattacgatcacaaagttgggagagatttttgccacagttcaaacacaaaaatgtgaataaacgcaaggaaccaaagaaaaaaactgttaagaaagaatatacgccattcccaccaccacaaccagaaagtcagatcgataaagaattggctagtggtgaatactttttgaaggcaaatcagaagaagcggcagaaaatggaagcaataaaggctaaacaagcagaagccatcagtaagagacaagaggaaagaaacaaagcatttattccacctaaggaaaaaccaattgtgaaacctaaggaagcttctactgaaactaaaattgatgtggccagcatcaaggaaaaggttaagaaagcaaagaataagaaactgggagctcttacagctgaagaaattgcacttaagatggaggcagatgaaaagaaaaagaagaaaaaaaagtaacatacccaaaactccttgactagaactatctccttttgtaaaggattttgagatatcaggcattagttgccttatttgtgagaaattttctgagggctttttttttttttggtggtggtggttgttcatagaagagtgttctttataaattatattattattgtattttttgaaaaatttatacgagaaagtggtatataagtctttgtatacattacgaccattgtgattatccattaaatccagtgtctgatgctattggttagtaatgatgtcccagcatttgatgttccctctctaatgataacaagtaaatatttaggtttatcccttttgaaagtttggttttacttttaacagtccatgaacagaaaattaaggcctctaaaatcagatcccctagttactcctctgttctgaatctggggaagtagtaaaccaaaaagacagggaaaaccagatatttagagtcgaagcagcatgcaaaaaataataatgtttttaactaatgaaggctactggagttactaagaatcacctaaaaatgtgctactgtaccttgctcattttgcagatttagaagctgaaacatgggttaggttacttactaaaagtccacctgtggcaacctgcaaataatgcttatttatactaaagatgagtttatctgatagagttaggaaatttcttcttttgagtaagagtattgctataacatatatttttttctgaaatgttttaaaatagaagtacacctaattgttattggttaaaaaaaaagccatatgtgaatgaggttggtttttgggttttttctttcctgaattgtattagtccaaaagaactaaattagggtacttgtgctgtaccaaaatggtaattataacagacagtattagaattactgaattaacaatgagaaagagagaagtgtatctgttacgtggatatatgggccagcctggatatacaacagagtagtaacctgtgaaacaaacatagaatatcctcttagacattgttcctcataatgcactgacagaattcacatagctcttaatgaaacaatttaagattgatgtacgtacgtttgacttggtctcgctgtcggttaactgtaaagttagggggaagaaagaaaaaaaattaaaagggtagacacagttgagagttttattttaaaaagctaagtcttataattatgaccattaacttgctttggctttattgcagtgactttccaagtttaattattcaaaactttttgaactgactgaattaacttggtatttttaagttgactttttacataaactttataaaccttttataaaaaggaaactataccattactataaatggaaaatcattttacacatcatacctagcaggtaataaaatttaaaaaataaaaattaaatattagaatgtgagaaatttattaaaatatagttctaaaaataagtttcttcctgagaagaatgatactgtttatgatgaatccatagtgaaaagacagtgacctctctttcatccagtctagtatatcactaaatcatcattacgatgtttggctatcaagtcattaattactgtcctcctttcactgagctttattcaaattttgacaatcagagcactgggaagaaataaattccacaactgcctttagccttctggatactttcttttataaaatagaaaccttttccacaccagttctgcagcagtcgctattagatgctcgtggtagaacccatcaatcatctggtcctctgggtactggtgagcatccctggtcttcatacctgtgagtgggctttgtggtgaattactgtaaatatgctaccctcacttttcttggcagttatgtcgatgaaatcaagagtgtgatgttctagttatttttttttatatatatttttaaatgttcaatattcaactattgaaacaaatgtacatctgtgaactagctaaaatcatcttatgtaccactaatatgcccagcacattttgtaaaacagtcctgatttggcctccaagggtatttattgaactaccagcagtatctaggagaccacgaaggaataccacgaaggaatttatgctccagtgcttgccataatttgtctgagaaggaatctgttaaataaaagcttttatcctctaa

SEQ ID NO: 3152 - DNA, 3812 bp, Homo Sapiens
  NM_007047
aatcaaaaaactaattcttccaaagagcgactcttactgtttctcatggtgagaagacaatatttgctttctctttttcctttcttccggatgagaggctaagccataatagaaagaatggagaattattgattgaccgtctttattctgtgggctctgattctccaatgggaataccaagggatggttttccatactggaacccaaaggtaaagacactcaaggacagacatttttggcagagcatagatgaaaatggcaagttccctggctttccttctgctcaactttcatgtctccctcctcttggtccagctgctcactccttgctcagctcagttttctgtgcttggaccctctgggcccatcctggccatggtgggtgaagacgctgatctgccctgtcacctgttcccgaccatgagtgcagagaccatggagctgaagtgggtaagttccagcctaaggcaggtggtgaacgtgtatgcagatggaaaggaagtggaagacaggcagagtgcaccgtatcgagggagaacttcgattctgcgggatggcatcactgcagggaaggctgctctccgaatacacaacgtcacagcctctgacagtggaaagtacttgtgttatttccaagatggtgacttctatgaaaaagccctggtggagctgaaggttgcagcactgggttctaatcttcacgtcgaagtgaagggttatgaggatggagggatccatctggagtgcaggtccaccggctggtacccccaaccccaaatacagtggagcaacgccaagggagagaacatcccagctgtggaagcacctgtggttgcagatggagtgggcctatatgaagtagcagcatctgtgatcatgagaggcggctccggggagggtgtatcctgcatcatcagaaattccctcctcggcctggaaaagacagccagcatttccatcgcagaccccttcttcaggagcgcccagccctggatcgcagccctggcagggaccctgcctatcttgctgctgcttctcgccggagccagttacttcttgtggagacaacagaaggaaataactgctctgtccagtgagatagaaagtgagcaagagatgaaagaaatgggatatgctgcaacagagcgggaaataagcctaagagagagcctccaggaggaactcaagaggaaaaaaatccagtacttgactcgtggagaggagtcttcgtccgataccaataagtcagcctgatgctctaatggaaaaatggccctcttcaagcctggtgaggaaatgcttcagatgaggctccaccttgttaaataaattggatgtatggaaaaatagactgcagaaaaggggaactcatttagctcacgagtggtcgagtgaagattgaaaattaacctctgagggccagcacagcagctcatgcctgtaatcctagcactttggaaggctgaggagggcggatcacaaggtcaggagatcaagaccatcctggctaacacggtgaaaccccgtctctactaaaaatacaaaaaataaaaaattagccgggcatggtgacgggcacctgtagtcccagctactcgggaggctgaggcaggagaatggcatgaacccggaaggcagagcttgcagtgagccgagatcacgccactgcactccagcctgggagacagagcgagactctgtctcaagaaaaaaaaaaaaaaaaaaaaagaaaagaaaattaacctctgagtataaagcatcagtgggcagaatcaatgtggggagggaaacaacaaaaatgtagaaagaggatccttgttgcttcttggggccgcatcagggtattgggttaggcagatactgaccttactttcatttcccctctggtcactagacccctggggctttcaccaatgacattgatgagagaatcacattcagggcaggctagggacacggggttctggaaggacctcctcagcatggcccaagccttgcatgctgtggctcttaaatccaggaaaaatggctgaccccatggacacctcctcaaactctctgcagcagatgtaattctgtatccagacatggcaaatgccatcctccttgtttctgaggaccagaggagtgtacagcgtgctgaggagccccatgacctaccagacaaccctgagagatttgaatggcgttactgtgtgcttggctgtgaaagcttcatgtcagagagacactactgggaggtggaagtgggggacagaaaagagtggcatattggggtatgtagtaagaacgtggagaggaaaaaagtttgggtcaaaatgacaccggagaacggatactggactatgggcctgactgatgggaataagtatcgggctctcactgagcccagaaccaacctgaaacttcctgagcctcctaggaaagtgggggtcatcctggactatgagactggacatatctcgttctacaatgccacggatggatctcatatctacacatttctgcacgcctcttcctctgagcctctgtatcctgtattcagaattttgaccttggagcccactgccctgaccgtttgcccaataccaaaagtagagagttcccccgatcccgacctagtgcctgatcattccctggagataccactgaccccaggcttagctaatgaaagtggggagcctcaggctgaagtaacatctctgcttctccctgcccagcctggagctaagggtctcaccctccacaacagccagtcagaaccataaagctacaggcacacactgaagcactttactgatattcattcaattattccataggacagttgtttgagtttggtgccaccttattggcccctttatacagataaggaaactggggtgtagaaaagtgtattgactttacaaagcagacaggaatagtgaacaacagagctgggatctgaacaacaatgactaacattaatggagaatttaaaacgttctgagtgctgtgttatgagctttggtgggtgtcactcctttaatcctcacaacaccctgtcaggtagtctcatttggcaagtatggaagcagaggcagggcaacattaagtagcttacataactcacacggtaatttgtgcagttgggagatgttcagcttcagtccctggccaattgcccgttcttttccagcctgatttttcctgcatgggaagagcccacatgtagccctgaggttcccttcccaggacagctccaggatcgagatcactgtgagtggttgtggagttaagacccctatggactccttcccagctgattatcagagccttagacccagcactccttggattggctctgcagagtgtcttggttgagagaataacgttgcagttcccacagggcatgtgactttgaaagagactagaggccacactcagttaataatggggcacagatgtgttcccacccaacaaatgtgataagtgatcgtgcagccagagccagccttccttcagtcaaggtttccaggcagagcaaataccctagagattctctgtaatattggtaatttggatgaaggaagctagaagaattacagggatgtttttaatcccactatggactcagtctcctggaaaaggatctgtccactcctggtcattggtggatgttaaacccatattcctttcaactgctgcctgctagggaaaactgctcctcattatcatcactattattgctcaccactgtatcccctctactgggcaagtgcttgtcaagttctagttgttcaataaatttgttaataatgctgactcttcaa

SEQ ID NO: 3153 - DNA, 3434 bp, Homo Sapiens
  NM_007048
aatcaaaaaacttattcttccaaagagagattgttattattcctcacgatgacccgacagtctctgctttctttttcctttcttccagaaggagatttaaccatagtagaaagaatggagaactattaactgcctttcttctgtgggctgtgattttcagaggggaatgctaagaggtgattttcaatgttgggactcaaaggtgaagacactgaaggacagaatttttggcagaggaaagatcttcttcggtcaccatacttgagttagctctagggaagtggaggtttccatttggaattctatagcttcttccaggtcatagtgtctgccccccaccttccagtatctcctgatatgcagcatgaatgaaaatggcaagtttcctggccttccttctgctcaactttcgtgtctgcctccttttgcttcagctgctcatgcctcactcagctcagttttctgtgcttggaccctctgggcccatcctggccatggtgggtgaagacgctgatctgccctgtcacctgttcccgaccatgagtgcagagaccatggagctgaagtgggtgagttccagcctaaggcaggtggtgaacgtgtatgcagatggaaaggaagtggaagacaggcagagtgcaccgtatcgagggagaacttcgattctgcgggatggcatcactgcagggaaggctgctctccgaatacacaacgtcacagcctctgacagtggaaagtacttgtgttatttccaagatggtgacttctatgaaaaagccctggtggagctgaaggttgcagcactgggttctgatcttcacgttgatgtgaagggttacaaggatggagggatccatctggagtgcaggtccactggctggtacccccaaccccaaatacagtggagcaacaacaagggagagaacatcccgactgtggaagcacctgtggttgcagacggagtgggcctgtatgcagtagcagcatctgtgatcatgagaggcagctctggggagggtgtatcctgtaccatcagaagttccctcctcggcctggaaaagacagccagcatttccatcgcagaccccttcttcaggagcgcccagaggtggatcgccgccctggcagggaccctgcctgtcttgctgctgcttcttgggggagccggttacttcctgtggcaacagcaggaggaaaaaaagactcagttcagaaagaaaaagagagagcaagagttgagagaaatggcatggagcacaatgaagcaagaacaaagcacaagagtgaagctcctggaggaactcagatggagaagtatccagtatgcatctcggggagagagacattcagcctataatgaatggaaaaaggccctcttcaagcctgcggatgtgattctggatccaaaaacagcaaaccccatcctccttgtttctgaggaccagaggagtgtgcagcgtgccaaggagccccaggatctgccagacaaccctgagagatttaattggcattattgtgttctcggctgtgagagcttcatatcagggagacattactgggaggtggaggtaggggacaggaaagagtggcatataggggtgtgcagtaagaatgtgcagagaaaaggctgggtcaaaatgacacctgagaatggattctggactatggggctgactgatgggaataagtatcggactctaactgagcccagaaccaacctgaaacttcctaagccccctaagaaagtgggggtcttcctggactatgagactggagatatctcattctacaatgctgtggatggatcgcatattcatactttcctggacgtctccttctctgaggctctatatcctgttttcagaattttgaccttggagcccacggccctgactatttgtccagcgtgaaaagaagaagagagttcctccaattctgaccgagtgctgatcattccctagagacaccagtaaccccgggcttagctaacgaaagtggggagcctcaggctgaagtaacttttctctgcttctccctgcccagctcagagctgagggcctccccctccacagcaaccaatcacaaccataaagctacaagcacgcactgaagcactttactgatactcattcaattattcatatgacagttgtttgagtttggtaccatcttattttccccttatacagataaggaaactggggtgcagaaaagtgaattgactacaaagtagacatgactagttaacaacacagctgggatctaaacagcaataactaacattaatggagaacttaaaatgctctgagtgctgtgttatgagctttggtggatgtcactcctttaatcctcgcaacaccctgtcgggtagtctcatttagcaagtatggaagttgaggcagggcaacattaagcaacttacataactcatgcagtaatttctgcagttgggagatgttcagcttcagtccccggccctatggccgttcttttccaccctgtttcttcccccataggaagaacccacctgtagccctgaggttcttttcccaggatggctccaggataaggatcactgtaggtggttgtggagttgacacccctgttgactccttcccagctgattgtcagagccttagacccagcacgccttggattagctctgcagagtgtcttggttgagagaataacctcaccgtacccacatgacacgtgatttggaaagagactagaggccacacttgataaatcatggggaacagatgtgttccacccaacaaatgtgataagtgatcatgcagccagagccagccttccttcaatcaaggtttccaggcagagcaaataccctagagattctctgtgatataggaaatttggatgaagggagctagaagaaatacagggatttttttttttttttaagatggagtcttactctgttgctaggctggagtgcagtggtgcgatctcagctccctgcaacctccacctcctgggttcaaacaattctcctgcctcagcctcccgagtactgggaatataggtgcacgccaccacacccaacaaatttttgtacttttagtacagatgagggttcactatgttggccaggatggtctcgatctcttgacctcatgatccacccacctcggtctcccaaagtgctgggattacaggcttgagccaccgggtgaccggcttacagggatatttttaatcccgttatggactctgtctccaggagaggggtctatccacccctgctcattggtggatgttaaaccaatattcctttcaactgctgcctgctagggaaaaactactcctcattatcatcattattattgctctccactgtatcccctctacctggcatgtgcttgtcaagttctagttgttcaataaatttgttaataatgctgactcttcaa

SEQ ID NO: 3154 - DNA, 2610 bp, Homo Sapiens
  NM_007051
caggggcggaggcggcggccagggaggaagcggaggaggcggaggcggccgcggcgttcgcccgcccgctcgctcgctcggtttccccgcccccgccgggcttaacgccgctgaaggtatccgggtgcgcgctgtcgcaacctgccctcatcctggcccgcgactgtaagaccggacccacatccagaccaatcttcctgtccgggctgctgcgacgcgggctccgcaggttgcaggcgggcggccggggcgcctgaaggttaccgagtgcatgagcgcctagcgcttcccgcgctgccccgcccgctggcccgccgacccgcccgccggctcgcccgccagcccctcggcgcccggcggcggcggcggcggtggcggcgacggtcgcaggaggtgccgtctgcctcccaggtgcgcgcttcgctcccggagccgcggaactcggcggccgccatggcgtccaacatggaccgggagatgatcctggcggattttcaggcatgtactggcattgaaaacattgacgaagctattacattgcttgaacaaaataattgggacttagtggcagctatcaatggtgtaataccacaggaaaatggcattctacaaagtgaatatggaggtgagaccataccaggacctgcatttaatccagcaagtcatccagcttcagctcctacttcctcttcttcttcagcgtttcgacctgtaatgccatccaggcagattgtagaaaggcaacctcggatgctggacttcagggttgaatacagagacagaaatgttgatgtggtacttgaagacacctgtactgttggagagattaaacagattctagaaaatgaacttcagatacctgtgtccaaaatgctgttaaaaggctggaagacgggagatgtggaagacagtacggtcctaaaatctctacacttgccaaaaaacaacagtctttatgtccttacaccagatttgccaccaccttcatcatctagtcatgctggtgccctgcaggagtcattaaatcaaaacttcatgctgatcatcacccaccgagaagtccagcgggagtacaacctgaacttctcaggaagcagtactattcaagaggtaaagagaaatgtgtatgaccttacaagtatccccgttcgccaccaattatgggagggctggccaacttctgctacagacgactcaatgtgtcttgctgaatcagggctctcttatccctgccatcgacttacagtgggaagaagatcttcacctgcacagacccgggaacagtcggaagaacaaatcaccgatgttcatatggttagtgatagcgatggagatgactttgaagatgctacagaatttggggtggatgatggagaagtatttggcatggcgtcatctgccttgagaaaatctccaatgatgccagaaaacgcagaaaatgaaggagatgccttattacaatttacagcagagttttcttcaagatatggtgattgccatcctgtattttttattggctcattagaagctgcttttcaagaggccttctatgtgaaagcccgagatagaaagcttcttgctatctacctccaccatgatgaaagtgtgttaaccaacgtgttctgctcacaaatgctttgtgctgaatccattgtttcttatctgagtcaaaattttataacctgggcttgggatctgacaaaggactccaacagagcaagatttctcactatgtgcaatagacactttggcagtgttgtggcacaaaccattcggactcaaaaaacggatcagtttccgcttttcctgattattatgggaaagcgatcatctaatgaagtgttgaatgtgatacaagggaacacaacagtagatgagttaatgatgagactcatggctgcaatggagatcttcacagcccaacaacaggaagatataaaggacgaggatgaacgtgaagccagagaaaatgtgaagagagagcaagatgaggcctatcgcctttcacttgaggctgacagagcaaagagggaagctcacgagagagagatggcagaacagtttcgtttggagcagattcgcaaagaacaagaagaggaacgtgaggccatccggctgtccttagagcaagccctgcctcctgagccaaaggaagaaaatgctgagcctgtgagcaaactgcggatccggacccccagtggcgagttcttggagcggcgtttcctggccagcaacaagctccagattgtctttgattttgtagcttccaaaggatttccatgggatgagtacaagttactgagcacctttcctaggagagacgtaactcaactggacccaaataaatcattattggaggtaaagttgttccctcaagaaacccttttccttgaagcaaaagagtaaacacggcccagcggtggaaccagccattccttgacaagccagcagcctgcgtcaggagaagggctcctcgccaacccacccacacgctcgtctcactcaattcaatgtcacacttctgcctcttgcaaaattgctggaaaaagtaataataaatatagctacttaagatttcccatcaaaaaaaaaaaaaaaaaaaaaaaaaaa

SEQ ID NO: 3155 - DNA, 1559 bp, Homo Sapiens
  NM_007053
ccccagtctgagaacaagaaagaagaacttctgtctcgagggtctcactgtcaaccaggccagagtgcagtgaagatcatacctcactacatccgtgaactcccgggctcctcccacctaagtctcttgagtagctgggacttcaggagactgaagccaaggataccagcagagccaacatttgcttcaagttcctgggcctgctgacagcgtgcaggatgctgttggaacccggcagaggctgctgtgccctggccatcctgctggcaattgtggacatccagtctggtggatgcattaacatcaccagctcagcttcccaggaaggaacgcgactaaacttaatctgtactgtatggcataagaaagaagaggctgaggggtttgtagtgtttttgtgcaaggacaggtctggagactgttctcctgagaccagtttaaaacagctgagacttaaaagggatcctgggatagatggtgttggtgaaatatcatctcagttgatgttcaccataagccaagtcacaccgttgcacagtgggacctaccagtgttgtgccagaagccagaagtcaggtatccgccttcagggccattttttctccattctattcacagagacagggaactacacagtgacgggattgaaacaaagacaacaccttgagttcagccataatgaaggcactctcagttcaggcttcctacaagaaaaggtctgggtaatgctggtcaccagccttgtggcccttcaagctttgtaagccttgtgccaaaagaaacttttaaaacagctacagcaagatgagtctgactatggcttagtatctttctcattacaataggcacagagaagaatgcaacagggcacaggggaagagatgctaaatataccaagaatctgtggaaatataagctggggcaaatcagtgtaatccttgactttgctcctcaccatcagggcaaacttgccttcttccctcctaagctccagtaaataaacagaacagctttcaccaaagtgggtagtatagtcctcaaatatcggataaatatatgcgtttttgtaccccagaaaaacttttcctccctcttcatcaacatagtaaaataagtcaaacaaaatgagaacaccaaattttgggggaataaatttttatttaacactgcaaaggaaagagagagaaaacaagcaaagataggtaggacagaaaggaagacagccagatccagtgattgacttggcatgaaaatgagaaaatgcagacagacctcaacattcaacaacatccatacagcactgctggaggaagaggaagatttgtgcagaccaagagcaccacagactacaactgcccagcttcatctaaatacttgttaacctctttggtcatttctctttttaaataaatgcccatagcagtatttggagtattttcttttctcctaaatccacaaactctcttctttctctttggacagatgacctcttgtcatagttaagcagagagtgggcaggatattcctgataggaggaactacatgaataaaggggtaag

SEQ ID NO: 3156 - DNA, 6652 bp, Homo Sapiens
  NM_007055
actctacggtggccgagaggatgccgcagatgtgttagcggcgagtccagaagcagccccaggaggtgctgggggcatcgtttctctaatctggcctcccgagtgccaaggaggcgtcccggcagcggtcatcatggtgaaggagcagttccgggagacggatgtggccaagaaaataagccacatctgttttggaatgaagtcacctgaggagatgcgccagcaggcgcacatccaagttgtgagtaagaacctgtacagccaggacaaccaacatgcccccttgctatatggggtgctcgaccataggatgggtacgagtgagaaggatcgtccatgtgaaacctgtgggaaaaacttggctgactgtctaggccactatgggtatatcgacctggagttgccgtgttttcatgtagggtacttcagagcagtcataggcatcttacagatgatctgcaaaacctgctgccacatcatgctgtcccaagaggagaagaagcagtttctggactatctaaagaggcccggcctgacctaccttcagaagcgaggactgaaaaagaaaatctctgacaagtgccggaagaaaaacatctgccatcactgtggcgcttttaatggtaccgtaaagaagtgtggactgctgaaaataattcatgagaaatacaagaccaacaaaaaagtggtggatcccattgtatcaaatttccttcagtcttttgaaacagccattgaacataataaagaagtggagcctctgctgggaagggcacaggaaaacttgaatcccttagtagttctgaatttatttaaacgaatcccagctgaagatgttcctctacttctgatgaacccagaagccggaaagccgtctgatttgattctcacacgacttttggtgcctcctttgtgtatcagaccctccgttgtgagtgatttgaagtctggcaccaatgaagatgatctgacaatgaaactgacagaaatcattttcctaaacgatgttattaaaaagcatcggatctcaggagccaagacccagatgatcatggaggactgggatttcctgcagctgcagtgtgccctctacattaacagtgagctctcgggcattcccctcaacatggcacccaagaagtggaccagaggcttcgtccaacgcctgaagggaaaacagggtcgatttagaggaaatctctcaggaaagagagtggatttttctggcagaacagtcatctcgcccgaccccaacctccggattgatgaggtagctgtgccagttcatgtggccaaaattctaacttttcctgagaaggtaaacaaagcaaacatcaatttcttgaggaaactggttcaaaacggccctgaggttcacccaggagcaaacttcattcagcagagacatacgcagatgaaaaggtttttgaaatacggaaatcgagaaaagatggctcaagagctcaagtatggtgacatcgtagagagacacctcatcgatggagatgtggtgctgttcaatcggcagccctcgctgcacaaattgagcattatggctcatctggccagggtcaagccccaccggaccttcagatttaatgagtgtgtctgtacaccctataatgctgactttgatggtgatgaaatgaaccttcatcttcctcaaacagaagaagctaaagcagaggcccttgttctgatggggactaaagcaaatcttgtaaccccgaggaatggggaaccgctgattgctgctattcaggattttctaacaggtgcctatctcctcactctcaaggacactttctttgatcgagccaaggcttgccaaatcattgcttcaatactggttggcaaggatgagaaaattaaagttcgcctcccaccgcctacaatcctaaagcctgtcaccctgtggacgggaaagcagatcttcagtgtcatcctcaggcctagcgatgacaatccagtgagggccaacctgcgaaccaagggcaagcagtactgtggcaaaggggaagatctctgtgccaatgattcctatgttacaatccagaacagtgagttgatgagtggcagcatggacaaaggaaccctagggtcaggatccaagaacaatattttttacattttgctgcgagactggggacagaatgaagctgcagatgccatgtcacggctcgccaggctggctcctgtctacctgtctaaccgtggtttctcaattgggatcggtgatgtcacacctggccaaggactgctgaaggccaagtatgagttgctgaatgccggctacaagaaatgtgatgagtacatcgaagccctgaacacgggcaagctgcagcagcagcctggctgcactgctgaggagaccctggaggcactgatcctgaaggagctgtctgtgatccgtgaccacgctggcagtgcctgcctccgggagctggacaagagcaacagccccctcaccatggctctgtgcggctccaaaggttccttcattaacatatcacagatgattgcctgtgtgggacagcaggccatcagtggctctcgagtgccagacggctttgaaaacaggtccttgcctcattttgaaaaacactcaaagctcccagctgccaaaggctttgtggctaatagcttttattccggtttgacaccaactgagtttttcttccacacaatggccggccgggaaggtctagtcgacacggctgtaaagacagctgaaacgggatacatgcagcgaaggcttgtcaaatctcttgaagatctttgctcccagtatgatctgacagtccgaagctctactggcgatattatccagttcatttatggaggagatggcttagatcctgcagctatggagggaaaagatgaacctttggagtttaaaagggttctggacaacatcaaagcagtcttcccgtgtcccagtgagcctgctctcagcaaaaacgagctgatcctgaccacagagtccatcatgaagaagagtgagttcctctgctgccaggacagcttcctgcaggaaataaaaaaattcattaagggggtctctgagaagatcaagaaaaccagagataaatatggcatcaatgataacggcacaacagagccccgtgtgctgtaccagctggaccgcatcacccccacccaagtagaaaagtttctggagacctgtagggacaagtacatgagggcacagatggagccaggttctgcagtgggtgctctgtgtgcccagagcattggtgagccaggcacccagatgaccctgaagactttccactttgcaggtgtggcctccatgaacatcaccctgggcgtgccccggattaaagagatcatcaacgcttccaaggccatcagcactccaattatcacagcacagctagacaaggatgacgacgcggattatgctcgcctcgtgaaagggagaattgagaaaaccctcttgggagagatttccgagtatattgaagaagtgtttcttcctgatgactgctttattctcgtcaagctctccctggaacggattaggcttctgagactggaagtgaacgctgagacagtgagatattccatctgcacatccaagctccgtgtgaagcccggtgatgtggctgttcatggtgaggctgtggtgtgtgtcacccccagagagaacagcaagagctccatgtactacgtgctgcagttcctgaaagaggatctccccaaggtggtggtgcagggcattccagaggtgtccagagctgtcatccacattgacgagcagagtggaaaggagaagtacaagcttctggtggaaggtgataacctgcgggcagtcatggccacacacggtgtgaagggcacccgaaccacctccaataacacctatgaggtggagaaaactctgggcatcgaggccgcccggacaacgatcatcaatgaaatccagtacaccatggtgaaccacggcatgagcatcgacaggaggcacgtgatgctgctctccgacctcatgacctacaagggtgaagtcctgggcatcactaggtttggcctggccaagatgaaggagagtgtgctgatgctggcctcctttgagaagacggctgaccatctctttgacgctgcctacttcgggcagaaggactctgtgtgtggggtgtctgagtgcatcatcatgggaatcccaatgaacattggaaccgggctcttcaagctgcttcacaaggctgacagggacccgaaccctcccaagaggcccctgatcttcgacacaaatgaattccacatcccccttgtcacatagtccaaagaaagaggggaccatgcctgaccttgactccttgtcctgtctccagctgatgtataaagagttttgtgctccctgggacgggggtcctgaggtccccacctatgccagcaatcagagaagccctcttggcatccccaggagcagcttctcctctgatagggtgcagctcacaccagtgaccctgactgtgccacgctgctcgggagagctgagggttttattgtttgcttgcttgaaacctaatctatagacggccccacagctcgtgcacacactgcttccctggacttaaagcccagccaggtgtcatggtccatcccagctcactgcatacatccatcggctccccatggtgtcttcacacctgacgatgagccaggcctgagccccacacaggccagggcacattcttggattttccattccttggtcatgctggaatctctcaatgtgacatacttatgtaaatattgttactattatttatttgttccatttgagggatttggaatttttgttattttagttttatttttgaaaccaagcatctatagaaaccaagaaagtcagcatgtaagcgtcactggaaaaactggtttaagcaaatagagccgtctgggatttgtaactgaggtgcaactgtcatgaggcccaggcagctctgtaacatcttctatagatgcccctggctaccctgttgttttcatctacctcagacccctatcatggggctctaccctgtgacaagagccaaacccattctccatggcctatggaagcctcactggagtttggggcctgctgcaatggggatgagatggttttttgtagaattatacttacgttccttggatgatctctagttgattttttaagttctgagttgatgctgttaaggtacccggggtagccattggttcttggatctgtgttagaatgagtgctttcccttcctactgatgtgattgtggattaggaattcgtgaccgagtgatttttggccagtggttgggtttaaaattctattaaaatttgtagtttgggctgggtgctgtggctcatacctataatcccagcactttgggaggccgaggggggcagatcacttgagcccaggagttcgagagcagcctgggcaacatgacgaaaccccgtctctacagagaatacaaaaattagccaggcatggtggcccatgcctgtagtacctgctattggtaaggctgaggtggaaggttcacttgagcctgggaggtggaggttgtagtgagccaagatcgtgccactacactccagcctgggcaacaaagcaagaccttgtctcaaaaaaaaaaaagaaaaaaattaagcgtaaaaaaaaattagtttttataaaaaattatagtttgaccttttgatttccctgcatctacaaggtagacctattaacttctcttggggtatcagtgatgtggaaaaaaaatgccatttttcttaatgtttaacccccctttatctttgaattgagctagagcctggtttaggacaaaggattaagtttgttaatgaacactaattcagggcttctacttgagaccccaccgagatcaccagttctcatgtaacctgggaagagccataaaggggtaccccccaccccaactgccttcctggaagcatgcctgggaagtaagctgtaggcctgatccgagccaggaccactgggatccgtgcaaaggccaggggagggtagaattgaatcataggagtgaactccggcacctgttgtcttctgcgggtgacgcacactttaaatggaagagaggttgtggctataacttgtggctgggaataataaagatggcaccgccaaggagcctcaccttgcgtgagtgagtactcagttgggcgctgcagggtctggagtctgtgtgagacgtgtgtgattgtgatgggtgcgaatcagcgtatagcacttgagaacaaggcagaccttggagcagaatggttatgtgaaggatcacatcacccatgggtagggggggaagtcatacgtcctggaggtgctggtcctcctcctggaactgccagccttgctaggactatcaacatcaacagcattgcctggtaaaccctactgtttgtgctccccactgtgtcccatgactggtgttaaaattctccctactttgatcatctgccctgcccaggccttgggctttatgccagcacagagctcaaaggccaggtagcagcacatcctcaagcatgagagctcaaagggttacatttgagtctctgtacctgcttggaagaaataaaaatacgtgtgaattccatctcaaaaaaaaaaaaaaaaaa

SEQ ID NO: 3157 - DNA, 1853 bp, Homo Sapiens
  NM_007062
gatccctgagcgtgtggcagcagtgcggtcgtggtccctccctatgcagcctggtttctagcgtgacacgcccttgacttgaggaccatgaaccgcagccgccaggtgacgtgcgtggcctgggtccgctgcggcgtggccaaagagacaccagacaaggtagagctgagtaaagaagaagtaaaacgcctcattgctgaggcaaaggagaaattgcaagaagaaggtggtggcagtgatgaagaggagacaggcagtccttcagaagatggcatgcagagtgcacgcacccaggcacgcccaagagagcccctggaggatggtgacccagaggatgacaggacgcttgatgatgatgagctggctgagtacgacttagataaatatgatgaggaaggtgacccagatgctgagactcttggtgaatctctcttgggtcttacggtctacgggagtaatgatcaagatccttacgttactctgaaagatacagaacaatatgaacgtgaagatttcttgattaagcccagtgataatcttatagtttgtggccgagctgaacaggaccagtgcaatttagaggtgcatgtttataatcaagaagaagactctttttatgtacaccatgatatactcttgtctgcatatcctctgagtgtggaatggctgaattttgatcctagcccagatgattctactggaaattacattgctgtaggaaacatgacccctgttattgaagtgtgggaccttgatatagtggactctttagagccagtcttcacactcggaagtaaactttcaaaaaagaagaaaaagaaaggaaagaagagttcctcagcagaagggcataccgatgctgtccttgacctttcatggaataagctaatcagaaatgttttagcaagtgcatcagctgacaacactgtaattctgtgggatatgtccttggggaaaccagcagctagcctcgctgtacacacagacaaggtccaaacactgcagtttcatccatttgaagcacagactctgatttctggctcatatgataagtcagtggctttgtatgactgccgaagtccagatgaaagccatcgaatgtggcgattcagtgggcagatagagagagtgacttggaatcacttttcaccttgtcatttcttggccagtacagatgacggctttgtatataatttggatgcacgttcagataagccaatttttacacttaatgcacacaatgatgaaatctctggtcttgatcttagcagtcaaatcaagggctgtctcgtgactgcttcagctgacaaatacgtgaagatctgggacatcttaggagataggccaagtctagttcattctagggacatgaaaatgggagttctcttctgttcttcatgttgccctgatttgccatttatttatgcctttggaggtcaaaaagaagggcttcgggtctgggatataagcacagtctcttcagtaaatgaagcatttggaagacgagagaggcttgttcttgggagtgcaagaaattcatctattagtggcccttttggcagcaggagctcagatacacccatggagtcttaatgaagatcatctaatttcctgcttaccttaactgggaattttaaaaagttggcctaaaaatgttccatgcgtggcagcaaccatgcagagtgactgaaacacaattcatttctgactgacattcctttctgcaactgcggtggcaccacaaatatccggtctttgtgcttgctcttcagatggatggtttgtaaggctcttgttgcatttcttaaaaaagagtaataaaaaggatttttaaaaagtaattccttaaacat

SEQ ID NO: 3158 - DNA, 4412 bp, Homo Sapiens
  NM_007063
tcagagcgctgggcaccggccgggctgtggtccccgcgcgccgccgtcgcctctcgagcgggctcggctcacagcgaccggcggccggggagatgtgagctggggccggcgggcgcggccggaccgccgcgatgtggctcaagcccgaggaggtgctgctgaagaacgcgctgaagctctgggtgacccagaagagcagctgctacttcatcctgcagcggcgccgcgggcacggcgaggggggcggccgcctcaccggtcgcctggtcggcgctctggatgcagtgttggattccaatgcacgggtcgctccatttcgaattctgcttcaagttcccggctcccaggtttattctcccatagcatgtggtgcaacattagaggaaatcaatcagcactgggactggctggaacaaaatctcctccacaccttgtctgtctttgataataaagatgacattgccagttttgtcaaagggaaggtaaagccgtgtgtctgggtggctgacggatgacacggctgagccattctcctcgtcaggtgtgtctgtcgttgaagcagcgcacacttctcgggggcctgtgcacctcagtccctcctgcttcctgtcccttgcaccccctgccttcccattgctggctcactgagcagggactgtcatctctgtgtgtcaggctctgatagccgaggagaccagcagcaggctcgccgagcaggaggaggaacccgagaaattccgagaagccctggtgaagttcgaggccaggttcaacttccccgaggcggagaagctggtcacctactactcctgctgctgttggaagggcagggtgccccgccagggctggctgtacctcagcatcaaccacctctgcttctactccttcttcctgggcaaggaacttaaacttgtggttccgtgggttgatatccagaaattagaaagaacgtccaatgtctttctgacggataccatccgaatcaccacgcagaataaggagcgtgacttctccatgttcctgaacctggatgaggtgtttaaggtcatggagcagctggccgacgtgacgctgcgaaggctgctggataatgaggtctttgacctcgaccccgatctgcaggagccgagccagatcaccaagagggacctggaagccagagcacagaatgagttcttccgggctttcttcaggttgccgaggaaggagaagctgcacgcggttgtggactgttcgctctggacgccgttcagtcgctgtcacaccacggggcggatgttcgcctctgacagctacatctgctttgccagcagagaagatggctgctgtaagatcatcctgccactcagagaggtggtgagcatcgagaagatggaggacacgagcctgctgccgcatcccatcattgtcagtatcagaagcaaggtggccttccagttcattgagctccgggaccgagacagcctggtggaggcgctgcttgcgaggttgaagcaggtccacgccaaccaccccgtgcactacgacacctctgcggatgatgacatggcttcactcgtgtttcattcaacaagcatgtgcagtgaccacagatttggggatcttgaaatgatgtcttctcaaaatagcgaggagagtgagaaagagaagagcccgctgatgcaccccgatgccctggtcaccgccttccagcagtcaggcagccagagccctgactcccgaatgtccagagaacagataaaaataagcctgtggaatgaccactttgtggaatacggcagaaccgtgtgtatgtttcgcacagagaagattcggaagctcgtagccatgggcatccctgaatctttgcgagggagactctggcttctcttctcagatgcggtgacggatcttgcctcacaccctggttactacgggaatctggtggaggagtccctggggaaatgctgcctggtaaccgaggagatagaacgagacctgcaccgctccctgccagagcaccccgccttccagaacgaaacgggaattgctgctttgaggagagtcttgacggcctatgcccaccggaaccccaagattggatactgccagtccatgaacatcctgacctccgtgctgctgctgtacaccaaggaggaggaagccttctggctgttggttgctgtgtgtgagcggatgctgcccgattacttcaaccaccgagtgatcggggcacaagttgaccagtctgtcttcgaggagctcatcaagggtcatctcccagagctggcagagcacatgaacgacctctcagccctggcgtccgtctctctctcgtggttcctgaccctgttcctcagcatcatgcctctagagagtgcggtgaatgtggtagactgcttcttctatgatggcatcaaagccatcttccagctgggactggctgtgcttgaggccaatgctgaggacctgtgcagcagcaaggatgatggccaggccttgatgatcctcagcaggtttctagatcacattaagaatgaggacagcccagggcccccagttggcagccaccatgcctttttctccgacgaccaggagccctaccctgtgactgatatttcggacctgatccgggattcctatgagaaatttggagaccagtctgtggagcagatcgagcacctacgttacaagcacaggatcagggtcctccaaggccacgaggacaccacaaagcagaacgtgcttcgagtcgttatcccggaagtctcaattcttcctgaagacctagaggagctctacgacttattcaagagagaacatatgatgagctgttactgggagcagcccaggcccatggcctcacgccacgaccccagccggccctatgctgagcagtaccgcatagatgcccggcagtttgcacacctgtttcagctagtctcgccctggacctgcggggcccacacggagatcctcgccgaaaggacgttcaggctcttggatgacaacatggaccagctcatcgagttcaaagcgtttgtgagctgcctcgatattatgtataatggagaaatgaatgagaagattaaactattatacaggcttcatatccctccagcactcactgaaaatgaccgagacagccagtcgccgttgaggaatcctctgttgtcaacatcgagacccctggttttcgggaaacccaatggtgatgcagttgattatcagaaacagctgaagcagatgattaaggatttagccaaagaaaaagataaaactgagaaagaattgcccaaaatgagccagagagaatttatccagttctgtaaaactctgtacagtatgttccatgaagatccagaagaaaatgatttgtatcaagccatcgccacagtcaccacactgctgctgcagatcggggaggtggggcagcgaggcagcagctctggaagctgctcccaggagtgtggggaggagctgcgggcttcagctccttctcctgaggactcggtttttgcagacactgggaagacgccccaggactcccaggcatttccagaggcggcagaaagggactggactgtctcccttgaacatattttagcttcacttctgactgaacagtcattagtcaacttttttgaaaagccactggacatgaaatccaaacttgaaaatgccaagatcaatcagtacaatctcaaaacttttgaaatgagccaccaatcacaatctgaacttaagctgagtaacttgtagcaagacagcagctgctatgcacactggagtccaccataccaaagcacgaaccagactgtttcttggggtcagccctaaaccgagatttcagtctaccttaccaatggggcatctggctaaacaacctgacaaactgtggccaggggaaccgacacaaccctcaagcatttctatgtattgagaattgtcagtgccctaaggtatccattggttcccttgatgccaacttacaatttttaccggatttgctgaaatgggcacttctgctgtgatgctagtgttgattttgctctcagatgaacacaatgtctcatactaaccaagaagcaagaaaagccccatgctttcatttttcacttggagtgacaatgggagaggtcaggaatcaagttcactttcaagatctaagggagtccactatctgtgcaattgtatttggcttttttttgcactgtttcaatgctggtaattgaaaccattttaatatatttggttgtattcactttatatgtccttccaaaaatgttgttgtgtacaaaccatgctttcaatgttggcttccaagttttttaataagaaactttttgtatttacttggtccttttcttttaccttgtagttaagtgtcttaagctgtagactgtggcagtgaatgggtaagctggagatgt

SEQ ID NO: 3159 - DNA, 1925 bp, Homo Sapiens
  NM_007075
ggctcccacaccactgcctcgtgtggggttgttcgcccgtgaaggggcaggacagggtgcgcgctggtggaggttgaaattgttacattttggccgggcgcggtggctcacgcctgtaatcccagcactttgggaggccgaggcaggtggatcacgaggtcaggagatcgagaccatcctggctaacacagtgaaaccccgtctctactaaaaaaatacaaaaaatcagccgggcgtggtgacgggcgcctgtagtcccagctactcaggaggctgaggcaggaggatggcgtgaacccgggaggcggagcttgcagtgagccgagatcgcgccagtgcactccagcctgggcgacagagcgaaactacgtctcaaaaaaaaaaaaaaagaaagaaaagaaattgttacattttatatatataggaacaatcctgcaccatgactcaacagccacttcgaggagtgaccagcctgcgtttcaaccaagaccaaagctgcttttgctgcgccatggagacaggtgtgcgcatctacaacgtggagcccttgatggagaaggggcatctggaccacgagcaggtgggcagcatgggcttggtggagatgctgcaccgctccaaccttctggccttggtgggcggtggtagtagtcccaagttctcagagatctcagcagtgctgatctgggacgatgcccgggagggcaaggactccaaggagaagctggtgctggagttcaccttcaccaagccagtgctttctgtgcgcatgcgccatgacaagatcgtgatcgtgctgaagaaccgcatctatgtgtactccttccccgacaatccccgaaagctgtttgagtttgatacccgggacaaccccaaggggctctgtgacctctgccccagcctggagaagcaactgctagtgttcccgggacacaagtgtgggagtctgcaacttgtggacctggcgagcacaaagcctggcacctcgtctgctccattcacgatcaatgcacatcagagtgacatagcctgtgtgtctctaaaccagccaggcactgtagtggcctcagcctcccagaagggtacccttattcgcctctttgacacacaatccaaggagaaactggtggagctgcgccgaggcactgaccctgccaccctctactgcattaacttcagccacgactcctccttcctctgcgcttccagtgataagggtactgtccatatctttgctctcaaggatacccgcctcaaccgccgctccgcgctggctcgcgtgggcaaggtggggcctatgattgggcagtacgtggactctcagtggagcctggcgagcttcactgtgcctgctgagtcagcttgcatctgcgccttcggtcgcaatacttccaagaacgtcaactctgtcattgccatctgcgtagatgggaccttccacaaatatgtcttcactcctgatggaaactgcaacagagaggctttcgacgtgtaccttgacatctgtgatgatgatgacttttaaggaccctgggggctgtgctagggacctgcagtggcagaactgcagagctgagccttggcagtggggcgtgcttggaagccaccagccagcaagcattaatggggctggtgcccactttccactcagcagagctatgtctaaataaagagctcacttccccccagcacttcttgatgactgtgtgccccaagggccaggccagagacccaggaaggcagcgaccccttgggatccctaacctggaggaaattgccagggacccagagggagtgccctaatccaacctggggattttttaaaagcttcctaggaagagatgatctccgatgtgatgaatacgaataaaaggcccttaatggcatttacggctaaaaaaaaaaaaaaaaaaaaaaaaaaaaaa

SEQ ID NO: 3160 - DNA, 1651 bp, Homo Sapiens
  NM_007076
gaggccggcggagaaggaggacccgggagccggcggcccggagctgggagcgcggggaaggcggttggggttctgacagctgcgcgcgatcctgctctctctcagccgcctgtggacatgcgcaaagggccctctcctgagtccagatgatgctcataccaatggcttcagtgatggcggtgactgaaccgaaatgggtctcggtctggagccgcttcctctgggtgacgctgctgagcatggtgctggggtccctgctggccctgctgctgccgctgggggctgtggaggagcagtgcttggctgtgctcaaaggcctctacctgctcaggagcaaaccggacagggcgcagcatgccgccaccaagtgcaccagcccgtccacggagctcagcatcacctccaggggcgcgacgctgctggtggccaagaccaaggcctctccagcgggtaagttggaagccagagctgccctgaaccaggccctggagatgaagcgccagggcaagcgggaaaaagcccaaaagctcttcatgcacgccctcaagatggacccggacttcgtggacgcgctcaccgagtttggcatcttctcggaagaagacaaggacatcatccaggcggactacttgtacaccagagcattgaccatctcaccctaccatgagaaagcactggtcaaccgcgatcggacactgcctcttgtggaagagatcgaccagaggtatttcagcatcatcgacagcaaagtgaagaaggtcatgtccatccccaaggggaactcagctctgcgcagggtcatggaggagacctactaccatcacatctaccacacagtggccatcgagggcaacaccctcaccctctcggaaatcaggcacatcctggagacccgctacgccgtgcccgggaagagcctggaggagcagaacgaggtcataggcatgcatgcagccatgaagtacatcaacacgactctggtttcgcgcatcggctccgtcaccatcagcgacgtgctggagatccacaggcgggtgctgggctacgtggaccccgtggaagccggcaggtttcggacaacacaggtcctggtcggacaccacatccctccccatccgcaggatgtggaaaagcagatgcaggagtttgtacagtggctcaactccgaggaagccatgaacctgcacccagtggagtttgcagccttagcccattataaactcgtttacatccaccctttcattgatggcaacgggaggacctcccgtctgctcatgaacctcatcctcatgcaggcgggctacccgcccatcaccatccgcaaggagcagcggtccgactactaccacgtgttggaagctgccaacgagggcgacgtgaggcctttcattcgcttcatcgccaagtgtactgagaccaccctggacaccctgctttttgccacaactgagtactcggtggcactgccagaagcccaacccaaccactctgggttcaaggagacgcttcctgtgaagccctaaccctagaaatcctcagtgacaaaggctgtcctgaggtaggaaaaaaaaaaagaaacagcatttctagaaacctagtcacttcctaaagcaaaaggagaaacattctttacctccaaatgttttagttt

SEQ ID NO: 3161 - DNA, 2183 bp, Homo Sapiens
  NM_007081
gctgcgaggacgcgggccgagccggaagtggagtgcgctgcggcgcgagctgggccggcgggcgtggttcgagagcgcgcagagtccagactggcggcagggcccgaggggccgacccgcagcgtccctggtctctccagccctcactcggaaccgcactgacaataccctcccctcccttgggctggacccctctctacagctaggagccaatggcagaagacaaaaccaaaccgagtgagttggaccaagggaagtatgatgctgatgacaacgtgaagatcatctgcctgggagacagcgcagtgggcaaatccaaactcatggagagatttctcatggatggctttcagccacagcagctgtccacgtacgccctgaccctgtacaagcacacagccacggtagatggaaggaccatccttgtggacttttgggacacggcaggccaggagcggttccagagcatgcatgcctcctactaccacaaggcccacgcctgcatcatggtgtttgatgtacagaggaaagtcacctataggaacctgagcacctggtatacagagcttcgggagttcaggccagagatcccatgcatcgtggtggccaataaaattgatgacataaacgtgacccaaaaaagcttcaattttgccaagaagttctccctgcccctgtatttcgtctcggctgctgatggtaccaatgttgtgaagctcttcaatgatgcaattcgattagctgtgtcttacaaacagaactcccaggacttcatggatgagatttttcaggagctcgagaacttcagcttggagcaggaagaggaggacgtgccagaccaggaacagagcagcagcatcgagaccccatcagaggaggcggcctctccccacagctgaggggctggggctaggggtgggtggagcccttttaaaatacccttcccttcaacaactctccagctctgaatggagaaactctctaggccatcccctcttctacctcctgcaacccacccatcctattagcctcccacattctaggcccgtgatacagggatgaggtcagcaccagcaaactctggactggtggaagaattccccaccagatctccttgaagcagaagtagggatcagcatcattaacaccttccccaccccctccccgcaggcagacagtgaagagaatcagaaaacatgattatgtgtcactttaatacaggaaatttaggtgttttttggtgtttttgtttttgtttttgttttctttccaaagctcacctcggggacaattccttgggcttctcctgaggtaatgatttacccccccacccacagctgagtctgtgaggccccatcctttccctacgttttctcccatcttttttcctcttcagtctcccagtcatctggtttgtttgtttctttgttcgttctgagacggagtctcgctctgtcgccaggctggagtgcagtggcgcagtctcggctcgctgcaacctctgactccctggttcaaacgattctcctgcctcagcctcccgagtggctggcatcaccacgcccagctaatttttgtatttttagtagagacggggtttcaccatgttgcccaggatggtctcgatctcctcacctcgtgatccgcccgcctcggcctcccaaagtgctgggattacaggcatgagccaccgcgcccggccccaatcatctgtttttaaacaatcgtttttgagcagatagctattcattccagattttcgtgtacccattctgtttcaggagctcttctaggtaaagctgagatcacaggaacagcaggtgacaggcctagctatagttaggaatacacaagccgtaaaatcgagtccttacagccataccacaaggtacgtccatttggactacaagaagagcttcctttaaagttcctatttcagcataaagaggctgtccttttttttgaggaatagtttggaccttgtgcctcctgtgggaggctgaggactgcaagaggagagctagcagatatgcctgttcacccctctctggtacttgtggcttgctagtatgtttttatgataatctcgggcattgtttgcattgtgtttattaatagggttttgtttttgttgtttccttttttacagtaaaggctgaattacataaacattgagtaaatgt

SEQ ID NO: 3162 - DNA, 3840 bp, Homo Sapiens
  NM_007085
aggagaatggggaggagctgggggggcaggcaggcggggaaggagaggtcttaaggggcggcgaggggaggtcgcatttcctccgaggctggcgatcggcggagctcccacctccgcttacagctcgctgccgccgtcctgccccgcgcccccaggagacctggaccagaccacgatgtggaaacgctggctcgcgctcgcgctcgcgctggtggcggtcgcctgggtccgcgccgaggaagagctaaggagcaaatccaagatctgtgccaatgtgttttgtggagccggccgggaatgtgcagtcacagagaaaggggaacccacctgtctctgcattgagcaatgcaaacctcacaagaggcctgtgtgtggcagtaatggcaagacctacctcaaccactgtgaactgcatcgagatgcctgcctcactggatccaaaatccaggttgattacgatggacactgcaaagagaagaaatccgtaagtccatctgccagcccagttgtttgctatcagtccaaccgtgatgagctccgacgtcgcatcatccagtggctggaagctgagatcattccagatggctggttctctaaaggcagcaactacagtgaaatcctagacaagtattttaagaactttgataatggtgattctcgcctggactccagtgaattcctgaagtttgtggaacagaatgaaactgccatcaatattacaacgtatccagaccaggagaacaacaagttgcttaggggactctgtgttgatgctctcattgaactgtctgatgaaaatgctgattggaaactcagcttccaagagtttctcaagtgcctcaacccatctttcaaccctcctgagaagaagtgtgccctggaggatgaaacgtatgcagatggagctgagaccgaggtggactgtaaccgctgtgtctgtgcctgtggaaattgggtctgtacagccatgacctgtgacggaaagaatcagaagggggcccagacccagacagaggaggagatgaccagatatgtccaggagctccaaaagcatcaggaaacagctgaaaagaccaagagagtgagcaccaaagagatctaatgaggaggcacagaccagtgtctggatcccagcatcttctccacttcagcgctgagttcagtatacacaagtgtctgctacagtcgccaaatcaccagtatttgcttatatagcaatgagttttattttgtttatttgttttgcaataaaggatatgaaggtggctggctaggaagggaagggccacagccttcatttctaggagtgctttaagagaaactgtaaatggtgctctggggctggaggctagtaaggaaactgcatcacgattgaaagaggaacagacccaaatctgaacctcttttgagtttactgcatctgtcagcaggctgcagggagtgcacacgatgccagagagaacttagcagggtgtccccggaggagaggtttgggaagctccacggagaggaacgctctctgcttccagcctctttccattgccgtcagcatgacagacctccagcatccacgcatctcttggtcccaataactgcctctagatacatagccatactgctagttaacccagtgtccctcagacttggatggagtttctgggagggtacacccaaatgatgcagatacttgtatactttgagccccttagcgacctaaccaaattttaaaaatactttttaccaaaggtgctatttctctgtaaaacacttttttttggcaagttgactttattcttcaattattatcattatattattgttttttaatattttattttcttgactaggtattaagcttttgtaattatttttcagtagtcccaccacttcataggtggaaggagtttggggttcttcctggtgcaggggctgaaataacccagatgcccccaccctgccacatactagatgcagcccatagttggcccccctagcttccagcagtccactatctgccagaggagcaagggtgccttagaccgaagccaggggaagaagcatcttcataaaaaactttcaagatccaaacattaatttgtttttatttattctgagaagttgaggcaaatcagtattcccaaggatggcgacaagggcagccaagcagggcttaggatatcccagcctaccaatatgctcattcgactaactaggagggtgagttggccctgtctcttcttttttctggacctcagtttcctcagtgagctggtaagaatgcactaaccttttgatttgataagttataaattctgtggttctgatcattggtccagaggggagataggttcctgtgatttttccttcttctctatagaataaatgaaatcttgttactagaacaagaaatgtcagatggccaaaaacaagatgaccagatttgatctcagcctgatgaccctacaggtcgtgctatgatatggagtcctcatgggtaaagcaggaagagagtgggaaagagaaccaccccactctgtcttcatatttgcatttcatgtttaacctccggctggaaatagaaagcattcccttagagatgaggataaaagaaagtttcagattcaacagggggaagaaaatggagatttaatcctaaaactgtgacttggggaggtcagtcatttacagttagtcctgtgtctttcgacttctgtgattattaaccccactcactaccctgtttcagatgcatttggaataccaaagattaaatccttgacataagatctcatttgcagaaagcagattaaagaccatcagaaggaaattatttaggttgtaatgcacaggcaactgtgagaaactgttgtgccaaaaatagaattccttctagtttttcttgttctcatttgaaaggagaaaattccactttgtttagcatttcaagcttttatgtatccatcccatctaaaaactcttcaaactccacttgttcagtctgaaatgcagctccctgtccaagtgccttggagaactcacagcagcacgccttaatcaaaggttttaccagcccttggacactatgggaggagggcaagagtacaccaatttgttaaaagcaagaaaccacagtgtctcttcactagtcatttagaacatggttatcatccaagactactctaccctgcaacattgaactcccaagagcaaatccacattcctcttgagttctgcagcttctgtgtaaatagggcagctgtcgtctatgccgtagaatcacatgatctgaggaccattcatggaagctgctaaatagcctagtctggggagtcttccataaagttttgcatggagcaaacaaacaggattaaactaggtttggttccttcagccctctaaaagcatagggcttagcctgcaggcttccttgggctttctctgtgtgtgtagttttgtaaacactatagcatctgttaagatccagtgtccatggaaacattcccacatgccgtgactctggactatatcagtttttggaaagcagggttcctctgcctgctaacaagcccacgtggaccagtctgaatgtctttcctttacacctatgtttttaagtagtcaaacttcaagaaacaatctaaacaagtttctgttgcatatgtgtttgtgaacttgtatttgtatttagtaggcttctatattgcatttaacttgtttttgtaactcctgattcttccttttcggatactattgatgaataaagaaattaaagtgatggttttattggtttcctttcccccaattaaggccaaataaagtcgtgagaacattacccattta

SEQ ID NO: 3163 - DNA, 5542 bp, Homo Sapiens
  NM_007098
accggtcagcccgcgcgaggggtcggcgttcattcctgccgctgccgccgccgccgccgaggtcccgcaccagccatggcgcagatcctccctgttcgctttcaggagcacttccagctccaaaaccttggaattaatccagctaacattggattcagcacactgaccatggaatctgacaagttcatatgtatccgagagaaagttggtgagcaggcacaggtcacgatcattgacatgagtgacccaatggctccgatccgacggcctatctctgcagagagtgccatcatgaatccagcctctaaggtgatagctctgaaagctgggaagacacttcagatctttaatattgagatgaagagtaaaatgaaggctcatactatggcagaagaagtgattttctggaaatgggtttctgtgaacactgttgccttggtgaccgagaccgcggtctaccactggagcatggaaggtgactcccagcccatgaagatgtttgatagacataccagtctggtgggctgccaggtgattcactaccggactgatgagtaccagaagtggctgctgctcgtaggcatctcggctcagcaaaaccgtgtggttggagcaatgcagctctactctgtggataggaaggtttcacaacccatagaaggccatgctgcggcttttgcagagttcaagatggaggggaatgccaagcctgccacccttttctgctttgctgtacgtaatcccacaggaggcaagttgcacatcattgaagttggacagcctgcagcgggaaaccaaccttttgtaaagaaagcagtagatgtgttttttcctccagaggcacagaatgattttccagtggctatgcagattggagctaaacatggtgttatttacttgatcacaaagtatggctatcttcatctgtacgacctagagtctggcgtgtgcatctgcatgaaccgtattagtgctgacacaatatttgtcactgctccacacaaaccaacctctggaattattggtgtcaacaaaaagggacaggtactgtcagtttgtgttgaggaagataacattgtgaattatgcaaccaacgtgcttcagaatccagaccttggtctgcgtttggccgttcgtagtaacctggctggggcagagaagttgtttgtgagaaaattcaataccctctttgcacagggcagctatgctgaagccgccaaagttgcagcgtctgcaccaaagggaatcctgcgtaccagagagacggtccagaaattccagagtatacccgctcagtctggccaggcttctccattgctgcagtacttcggaatcctgctcgaccagggtcagctcaataaacttgaatccttagaactttgccatctggttcttcagcaggggcgtaagcaactcctagagaagtggctgaaagaagataagctggagtgctcagaggagctcggagacttggtcaaaaccactgaccccatgctcgctctgagtgtgtaccttcgggcaaatgtgccaagcaaagtgatccagtgttttgcagaaacaggccaattccagaaaattgtgctctatgccaaaaaggttgggtacaccccagactggatctttctgctgaggggtgtaatgaagatcagtccggaacagggcctgcagttttctcgaatgctagtgcaggacgaggagccgctggccaacattagccagattgtggacattttcatggaaaacagtttaattcagcagtgtacttccttcttattggatgccttgaagaataatcgcccagctgagggactcctgcagacatggctgttggagatgaaccttgttcatgcaccccaggttgcagatgccatccttggaaataaaatgtttactcattacgaccgggcccacattgcccagctctgtgagaaggcaggcctcctgcagcaagcactggagcactacaccgacctctatgacatcaagagggctgtggtccacactcacctcctcaatcccgagtggcttgtcaatttctttggctccttatcggtggaggattctgtggagtgtctgcatgccatgctgtctgctaacatcagacagaaccttcagctgtgtgtgcaggtggcctctaagtaccacgagcagctgggcacgcaggccctggtggagctctttgaatccttcaagagttacaaaggcctcttctacttcctgggctcaatcgtgaacttcagccaagacccagatgtgcatctgaaatacattcaggctgcctgtaagacagggcagatcaaggaggtggagaggatatgccgagagagcagctgctacaacccagagcgtgtgaagaacttcctgaaggaggccaagctcacagaccagcttcccctcatcatcgtgtgtgatcgttttggctttgtccatgaccttgtcctatatttataccgcaacaacctgcagaggtacattgagatctacgtgcagaaggtcaaccctagccggaccccagctgtgattggagggctgcttgatgtggattgttctgaggaagtgattaaacacttaatcatggcagtgagaggacagttctctactgatgagttggtggctgaagtagaaaaaagaaataggctcaagctgctgcttccctggctggagtcccagattcaggaaggctgtgaggagcctgccactcacaatgcactggctaaaatctacatcgacagcaacaacagccccgagtgcttcctgagagagaatgcctactatgacagcagcgtggtgggccgctactgtgagaagcgagacccccatctggcctgtgttgcctatgagcgggggcagtgtgaccttgagctcatcaaggtgtgcaatgagaattctctgttcaaaagcgaggcccgctacctggtatgcagaaaggatccggagctctgggctcacgtccttgaggagaccaacccatccaggagacagctaattgaccaggtggtacagacagcattgtcagaaacacgggatcctgaagagatttcggtcactgtcaaagcctttatgacagccgacctgcctaatgaactgattgaactgctggagaagatagttctggataactctgtcttcagcgagcacaggaatctacagaatctgttgatcctgactgccatcaaggcagaccgcacacgggtcatggagtacatcagccgcctggacaactatgacgcactggacatcgcgagcatcgctgtcagcagcgcactgtatgaggaggccttcaccgttttccacaagtttgatatgaatgcctcagcaatccaggtcctgatcgagcacattggaaacctggaccgggcatatgagtttgcggagagatgcaatgagcctgctgtgtggagtcagctggcccaagcccagctccagaaagatttggtgaaggaagccatcaactcctatatcagaggggacgacccttcctcttacctggaagttgttcagtcagccagcaggagcaacaactgggaggatctagttaaatttctgcagatggccaggaaaaagggccgtgagtcctatatagagactgaacttatttttgccttggctaaaaccagccgtgtttctgagctagaagattttattaatggacccaacaatgcccacatccagcaggttggagaccgctgttacgaggagggaatgtacgaggctgccaagctgctctatagcaatgtttctaactttgcccgcctggcttccaccttggttcacctcggtgagtatcaggcagcagtggacaacagccgcaaggccagcagcacccggacgtggaaggaggtgtgctttgcctgcatggatggacaagagttccgcttcgcacagctgtgtggtcttcacatcgtcattcatgcagatgagctggaggagctgatgtgctattaccaggatcgtggctactttgaggagctgatcttgctgttggaagcggccctgggcctggagcgggcccacatgggcatgttcactgagctggccatcctctactccaaattcaagccacagaagatgctggagcatctggagcttttctggtcccgtgtcaacatcccaaaggtgctgagggctgcagagcaggcacacctgtgggctgagctggtgttcctctatgacaagtacgaggagtatgacaatgctgtgctcaccatgatgagccaccccactgaggcctggaaggagggtcagttcaaggacatcattaccaaggttgccaacgtcgagctctgttacagagccctgcagttctatttggattacaaaccactgctcatcaatgacctgctgctggtgctttcaccccggctggaccacacctggacagtcagtttcttttcaaaggcaggtcagctgcccctggtgaagccttacctgcggtcagtccagagccacaacaacaagagtgtgaatgaggcactcaaccacctgctgacagaggaggaggactatcagggcttaagggcatctatcgatgcctatgacaactttgacaacatcagcctggctcagcagctggagaagcatcagctgatggagttcaggtgcattgcggcctatctgtacaagggcaataactggtgggcccagagcgtggagctctgcaagaaggatcatctctacaaggatgccatgcagcatgctgcagagtcgcgggatgctgagctggcccagaagttgctgcagtggttcctggaggaaggcaagagggagtgcttcgcagcttgtctcttcacctgctatgacctgcttcgcccagacatggtgcttgagctggcctggaggcacaacctcgtggacttggccatgccctacttcatccaggtgatgagggagtacctgagcaaggtggacaaactggatgccttggagagtctgcgcaagcaagaggagcatgtgacagagcctgcccctctcgtgtttgattttgatgggcatgaatgagacccagctgattgcactaagccctgccgtgggcccagcccctgccagcttcccctatggatatgcctctgctcccaacttcgccagcctccaatgtacaacttccgcgtgtagtgggcgttgtcaccacccaccctacctgcagagttactaacttctccaaggagcatgtcactccagcagcacaggggacgcaatgggaggcagggacacctggacaatatttatttttgctgaaacccaatgacggcaacctctgagccatcccagagcctggggaggccagggtagaggctgacggcgcaagaccagctttagccgacaacagagactggactgtgggccctcctgctggagccaggccttcctcctgggcgcctccgactggctggagctgccccctccaggccagtttgaagactacatgaacacgtcttgtttggaggtaccggacctcataaaaggactctcagcctcttggcaatcataaatattaaagtcggtttatccaggcaaaaaaaaaaaaaaaaaaaaaaaaaaaaaa

SEQ ID NO: 3164 - DNA, 1631 bp, Homo Sapiens
  NM_007103
gaagttgaaggggcgcagcgataccggtgcgcggcgctggcgtcgggcgcgtgacgtctttcctgcgcgccacctagcgtctctatcgcgccagttcctcagcctcagtgctatgaaggtgacagcgtgaggtgacccatctggcccgccgcgatgctggcaacacggcggctgctcggctggtcgcttcccgcgcgggtatctgtgcgtttcagcggcgacacgacagcacccaagaaaacctcatttggctcgctgaaggatgaagaccggattttcaccaacctgtacggccgccatgactggaggctgaaaggttccctgagtcgaggtgactggtacaagacaaaggagatcctgctgaaggggcccgactggatcctgggcgagatcaagacatcgggtttgaggggccgtggaggcgctggcttccccactggcctcaagtggagcttcatgaataagccctcagatggcaggcccaagtatctggtggtgaacgcagacgagggggagccgggcacctgcaaggaccgggagatcttacgccatgatcctcacaagctgctggaaggctgcctggtggggggccgggccatgggcgcccgcgctgcctatatctacatccgaggggaattctacaatgaggcctccaatctgcaggtggccatccgagaggcctatgaggcaggtctgattggcaagaatgcttgtggctctggctatgattttgacgtgtttgtggtgcgcggggctggggcctacatctgtggagaggagacagcgctcatcgagtccattgagggcaagcagggcaagccccgcctgaagccccccttccccgcagacgtgggagtgtttggctgccccacaactgtggccaacgtggagacagtggcagtgtcccccacaatctgccgccgtggaggtacctggtttgctggctttggcagagaacgcaactcaggcaccaaactattcaacatctctggccatgtcaaccacccttgcactgtggaggaggagatgtctgtgcccttgaaagaactgattgagaagcatgctgggggtgtcacgggcggctgggacaacctccttgctgtgatccctggcggctcgtctaccccactgatccccaagtctgtgtgtgagacggtgctgatggacttcgatgcgctggtgcaggcacagacaggcctgggcacagctgcggtgatcgtcatggaccgctcgacggacatcgtgaaagccatcgcccgcctcattgagttctataagcacgagagctgtggccagtgtaccccatgccgtgagggtgtggactggatgaacaaggtgatggcacgtttcgtgaggggggatgcccggccggccgagatcgactccctgtgggagatcagcaagcagatagaaggccatacgatttgtgctctgggtgacggggccgcctggcctgtgcagggtctgatccgccactttcggccggagctcgaggagcggatgcagcggtttgcccagcagcatcaggcccggcaggctgcctcttagcccaccaccctggcctgctgtcctgcgtctatccatgtggaatgctggacaataaagcgagtgctgcccaccctccagctgcc

SEQ ID NO: 3165 - DNA, 719 bp, Homo Sapiens
  NM_007104
agtctcttttccggttagcgcggcgtgagaagccatgagcagcaaagtctctcgcgacaccctgtacgaggcggtgcgggaagtcctgcacgggaaccagcgcaagcgccgcaagttcctggagacggtggagttgcagatcagcttgaagaactatgatccccagaaggacaagcgcttctcgggcaccgtcaggcttaagtccactccccgccctaagttctctgtgtgtgtcctgggggaccagcagcactgtgacgaggctaaggccgtggatatcccccacatggacatcgaggcgctgaaaaaactcaacaagaataaaaaactggtcaagaagctggccaagaagtatgatgcgtttttggcctcagagtctctgatcaagcagattccacgaatcctcggcccaggtttaaataaggcaggaaagttcccttccctgctcacacacaacgaaaacatggtggccaaagtggatgaggtgaagtccacaatcaagttccaaatgaagaaggtgttatgtctggctgtagctgttggtcacgtgaagatgacagacgatgagcttgtgtataacattcacctggctgtcaacttcttggtgtcattgctcaagaaaaactggcagaatgtccgggccttatatatcaagagcaccatgggcaagccccagcgcctatattaaggcacatttgaataaattctattaccagttc

SEQ ID NO: 3166 - DNA, 998 bp, Homo Sapiens
  NM_007108
gggaacggggcggagcgcggctgcgccggcgcgtcgaggggagaggcagcagccgcgatggacgtgttcctcatgatccggcgccacaagaccaccatcttcacggacgccaaggagtccagcacggtgttcgaactgaagcgcatcgtcgagggcatcctcaagcggcctcctgacgagcagcggctgtacaaggatgaccaactcttggatgatggcaagacactgggcgagtgtggcttcaccagtcaaacagcacggccacaggccccagccacagtggggctggccttccgggcagatgacacctttgaggccctgtgcatcgagccgttttccagcccgccagagctgcccgatgtgatgaagccccaggactcgggaagcagtgccaatgaacaagccgtgcagtgaggacccccaagaggcccatttcccccaataaaagagatttgggagtctgcctggttgctgcctctttttcccgcccctccctgggatgggtcccactccctgtgggctccttttggggcttgtgcttggcagttcctgtgctgtcctgtctcccagatcctgagaccctggctgagaacttggcccagcctgctgcttaaaggcaccatggggacctgggttgccctgagacccaagccattgttagcagctagccagccacaccaaccacgccagggggaggaaagggaaggactgggagagacacaaagaccagagccagcctcagggacaagagattccagttttaggcctttctccttctaagtgccccccacccccatagcctgcatgtccactcccagacgatggccaagagcagaaacacaagctggagccagtgtcctggtttgacagcatgttcaacgagggaaccccaagacggacccacacaggtccacccacgctgggggctgtaatcacggagggaagtggctgcccccttaacacacctttaataaacagtctacagacccaaaaaaaaa

SEQ ID NO: 3167 - DNA, 2651 bp, Homo Sapiens
  NM_007111
cgtcccggcgccactcggcccagggcagggaccccgccacggccgggaccgcccggcccggccccagcccgcgcctctccgcgccgccccgcgctccgcaccgcgccctctccgcgtccccgcccgcgcggccggaccgggcagccagaaaaatcatttttcttctctgggaaggtgaacatttgtagcattgatttcccggatctggtaacatggcaaaagatgccggtctaattgaagccaacggagaactcaaggtcttcatagaccagaaccttagtcccgggaaaggcgtggtgtccctcgtggccgttcacccctccaccgtcaacccgctcgggaagcagctcttgccaaaaacctttggacagtccaatgtcaacattgcccagcaagtggtaattggtacgcctcagagaccggcagcgtcaaacaccctggtggtaggaagcccacacacccccagcactcactttgcctctcagaaccagccttccgactcctcaccttggtctgccgggaagcgcaacaggaaaggagagaagaatggcaagggcctacggcatttctccatgaaggtctgcgagaaggtgcagaggaaagggaccacttcctacaacgaagtggcagacgagctggttgcggagttcagtgctgccgacaaccacatcttaccaaacgagtcagcttatgaccagaaaaacataagacggcgcgtctacgatgccttaaacgtgctaatggccatgaacatcatctccaaggagaagaaggagatcaagtggattggtctgcccaccaactcggctcaggaatgtcagaacttagaggtggaaagacagaggagacttgaaagaataaaacagaaacagtctcaacttcaagaacttattctacagcaaattgccttcaagaacctggtgcagagaaaccggcatgcggagcagcaggccagccggccaccgccacccaactcagtcatccacctgcccttcatcatcgtcaacaccagcaagaagacggtcatcgactgcagcatctccaatgacaaatttgagtatctgtttaattttgacaacacatttgaaatccacgatgacatagaagtgctgaagcggatgggcatggcttgcgggctggagtcggggagctgctctgccgaagaccttaaaatggccagaagtctggtccccaaggctctggagccatacgtgacagaaatggctcagggaactgttggaggcgtgttcatcacgacggcaggttccacgtctaacggcacaaggttctctgccagtgacctgaccaacggtgcagatgggatgctggccacaagctccaatgggtctcagtacagcggctccagggtggagactccggtgtcctacgtcggggaggacgacgaggaggacgatgacttcaacgagaatgacgaggacgactgacgtcctccccacttcagattcggcttcaggaaaacgtttagcgaaaagaaactttttttttaatgtgggttttctgtttccttttggcctactcccaagaagatattggtaagctattgaatttagatatgcacctctgataagcaaggattgtttcccgtaggattaggacgtgctgtggatgtgtgttttgataccagtgtgctgatgcagagcgtttatttacttgttaggattttgtgttttcatttgctatttttctttaagtgcagagttcatttttgcccctgaaaagtttttgctgagtttgctgaagaaattgtatttcaaccacatccatgaaaataaaacacctcctgttgtggatggtgagcccctgatgccgcttatttgccgtgagtttggacggcacccctgctggcggatagcaagactctgtggagtttgttcagtggtacggtgtccaagcaaacagcagaatgcaactttctaaacagccccaagcaaacagcagaattcaactttttaaacaataaacaccatcaaccttattgactttattgtcccttaaattatattgactgttgtgattccatcaagtttgtacactcttttctctccctgttttgcagcaacaaattgcgaagtgcttttgtttgtttgttttcgtttggttaaagcttattgccatgctggtgcggctatggagactgtctggaaggcttggaatggtttattgcttatggtaaaatttgcctgatttcttacaggcagcgtttggaaaccttttattatatagttgtttacatacttataagtctatcatttaaagacatgtactgaaacaaatgtatttgtttcataagcatcttcctgtaatctattataaaattgaaattaaatatagagaatgttttaacaattttttaactcaaaatttgtcaatcatttttaatagttctttttttataaaaagaaaaaggaatttaaggacaggcagtagtctcttttaaaatttattcacaaaacccattaactgcacagttgctattagctgcctgttctaaaacgatagtctttttattgaaacacaaataaacttttctgtaatattttatggtatataaagagactttaattgtttgacttgtttaacttggcactgttagtttttattaataaaacgcgcatgggcattttaaacaa

SEQ ID NO: 3168 - DNA, 1439 bp, Homo Sapiens
  NM_007115
agtcacatttcagccactgctctgagaatttgtgagcagcccctaacaggctgttacttcactacaactgacgatatgatcatcttaatttacttatttctcttgctatgggaagacactcaaggatggggattcaaggatggaatttttcataactccatatggcttgaacgagcagccggtgtgtaccacagagaagcacggtctggcaaatacaagctcacctacgcagaagctaaggcggtgtgtgaatttgaaggcggccatctcgcaacttacaagcagctagaggcagccagaaaaattggatttcatgtctgtgctgctggatggatggctaagggcagagttggataccccattgtgaagccagggcccaactgtggatttggaaaaactggcattattgattatggaatccgtctcaataggagtgaaagatgggatgcctattgctacaacccacacgcaaaggagtgtggtggcgtctttacagatccaaagcaaatttttaaatctccaggcttcccaaatgagtacgaagataaccaaatctgctactggcacattagactcaagtatggtcagcgtattcacctgagttttttagattttgaccttgaagatgacccaggttgcttggctgattatgttgaaatatatgacagttacgatgatgtccatggctttgtgggaagatactgtggagatgagcttccagatgacatcatcagtacaggaaatgtcatgaccttgaagtttctaagtgatgcttcagtgacagctggaggtttccaaatcaaatatgttgcaatggatcctgtatccaaatccagtcaaggaaaaaatacaagtactacttctactggaaataaaaactttttagctggaagatttagccacttataaaaaaaaaaaaaaggatgatcaaaacacacagtgtttatgttggaatcttttggaactcctttgatctcactgttattattaacatttatttattatttttctaaatgtgaaagcaatacataatttagggaaaattggaaaatataggaaactttaaacgagaaaatgaaacctctcataatcccactgcatagaaataacaagcgttaacattttcatatttttttctttcagtcatttttctatttgtggtatatgtatatatgtacctatatgtatttgcatttgaaattttggaatcctgctctatgtacagttttgtattatactttttaaatcttgaactttataaacattttctgaaatcattgattattctacaaaaacatgattttaaacagctgtaaaatattctatgatatgaatgttttatgcattatttaagcctgtctctattgttggaatttcaggtcattttcataaatattgttgcaataaatatccttgaacacacaaaaaaaaaaaaaaaa

SEQ ID NO: 3169 - DNA, 12436 bp, Homo Sapiens
  NM_007124
gtattgatgtcaagctgaaccatcgtaggaagttgaaagccttagaaagaggacttggtaaagtttttggattatcttgaaactctggcaagatggccaagtatggagaacatgaagccagtcctgacaatgggcagaacgaattcagtgatatcattaagtccagatctgatgaacacaatgacgtacagaagaaaacctttaccaaatggataaatgctcgattttcaaagagtgggaaaccacccatcaatgatatgttcacagacctcaaagatggaaggaagctattggatcttctagaaggcctcacaggaacatcactgccaaaggaacgtggttccacaagggtacatgccttaaataacgtcaacagagtgctgcaggttttacatcagaacaatgtggaattagtgaatatagggggaactgacattgtggatggaaatcacaaactgactttggggttactttggagcatcattttgcactggcaggtgaaagatgtcatgaaggatgtcatgtcggacctgcagcagacgaacagtgagaagatcctgctcagctgggtgcgtcagaccaccaggccctacagccaagtcaacgtcctcaacttcaccaccagctggacagatggactcgcctttaatgctgtcctccaccgacataaacctgatctcttcagctgggataaagttgtcaaaatgtcaccaattgagagacttgaacatgccttcagcaaggctcaaacttatttgggaattgaaaagctgttagatcctgaagatgttgccgttcagcttcctgacaagaaatccataattatgtatttaacatctttgtttgaggtgctacctcagcaagtcaccatagacgccatccgtgaggtagagacactcccaaggaaatataaaaaagaatgtgaagaagaggcaattaatatacagagtacagcgcctgaggaggagcatgagagtccccgagctgaaactcccagcactgtcactgaggttgacatggatctggacagctatcagattgcgttggaggaagtgctgacctggttgctttctgctgaggacactttccaggagcaggatgatatttctgatgatgttgaagaagtcaaagaccagtttgcaacccatgaagcttttatgatggaactgactgcacaccagagcagtgtgggcagcgtcctgcaggcaggcaaccaactgataacacaaggaactctgtcagacgaagaagaatttgagattcaggaacagatgaccctgctgaatgctagatgggaggctcttagggtggagagtatggacagacagtcccggctgcacgatgtgctgatggaactgcagaagaagcaactgcagcagctctccgcctggttaacactcacagaggagcgcattcagaagatggaaacttgccccctggatgatgatgtaaaatctctacaaaagctgctagaagaacataaaagtttgcaaagtgatcttgaggctgaacaggtgaaagtaaattcactaactcacatggtggtcattgttgatgaaaacagtggtgagagtgctacagctatcctagaagaccagttacagaaacttggtgagcgctggacagcagtatgccgttggactgaagaacgctggaataggttacaagaaatcaatatattgtggcaggaattattggaagaacagtgcttgttgaaagcttggttaaccgaaaaagaagaggctttaaataaagtccagacaagcaacttcaaagaccaaaaggaactaagtgtcagtgttcgacgtctggctattttgaaggaagacatggaaatgaagcgtcaaacattggatcagctgagtgagattggccaggatgtgggacaattacttgataattccaaggcatctaagaagatcaacagtgactcagaggaactgactcaaagatgggattctttggttcagagactagaagattcctccaaccaggtgactcaggctgtagcaaagctggggatgtctcagattcctcagaaggaccttttggagactgttcgtgtaagagaacaagcaattacaaaaaaatctaagcaggaactgcctcctcctcctcccccaaagaagagacagatccatgtggatattgaagctaagaaaaagtttgatgctataagtgcagagctgttgaactggattttgaaatggaaaactgccattcagaccacagagataaaagagtatatgaagatgcaagacacttccgaaatgaaaaagaagttgaaggcattagaaaaagaacagagagaaagaatccccagagcagatgaattaaaccaaactggacaaatccttgtggagcaaatgggaaaagaaggccttcctactgaagaaataaaaaatgttctggagaaggtttcatcagaatggaagaatgtatctcaacatttggaagatctagaaagaaagattcagctacaggaagatataaatgcttatttcaagcagcttgatgagcttgaaaaggtcatcaagacaaaggaggagtgggtaaaacacacttccatttctgaatcttcccggcagtccttgccaagcttgaaggattcctgtcagcgggaattgacaaatcttcttggccttcaccccaaaattgaaatggctcgtgcaagctgctcggccctgatgtctcagccttctgccccagattttgtccagcggggcttcgatagctttctgggccgctaccaagctgtacaagaggctgtagaggatcgtcaacaacatctagagaatgaactgaagggccaacctggacatgcatatctggaaacattgaaaacactgaaagatgtgctaaatgattcagaaaataaggcccaggtgtctctgaatgtccttaatgatcttgccaaggtggagaaggccctgcaagaaaaaaagacccttgatgaaatccttgagaatcagaaacctgcattacataaacttgcagaagaaacaaaggctctggagaaaaatgttcatcctgatgtagaaaaattatataagcaagaatttgatgatgtgcaaggaaagtggaacaagctaaaggtcttggtttccaaagatctacatttgcttgaggaaattgctctcacactcagagcttttgaggccgattcaacagtcattgagaagtggatggatggcgtgaaagacttcttaatgaaacagcaggctgcccaaggagacgacgcaggtctacagaggcagttagaccagtgctctgcatttgttaatgaaatagaaacaattgaatcatctctgaaaaacatgaaggaaatagagactaatcttcgaagtggtccagttgctggaataaaaacttgggtgcagacaagactaggtgactaccaaactcaactggagaaacttagcaaggagatcgctactcaaaaaagtaggttgtctgaaagtcaagaaaaagctgcgaacctgaagaaagacttggcagagatgcaggaatggatgacccaggccgaggaagaatatttggagcgggattttgagtacaagtcaccagaagagcttgagagtgctgtggaagagatgaagagggcaaaagaggatgtgttgcagaaggaggtgagagtgaagattctcaaggacaacatcaagttattagctgccaaggtgccctctggtggccaggagttgacgtctgagctgaatgttgtgctggagaattaccaacttctttgtaatagaattcgaggaaagtgccacacgctagaggaggtctggtcttgttggattgaactgcttcactatttggatcttgaaactacctggttaaacactttggaagagcggatgaagagcacagaggtcctgcctgagaagacggatgctgtcaacgaagccctggagtctctggaatctgttctgcgccacccggcagataatcgcacccagattcgagagcttggccagactctgattgatggggggatcctggatgatataatcagtgagaaactggaggctttcaacagccgatatgaagatctaagtcacctggcagagagcaagcagatttctttggaaaagcaactccaggtgctgcgggaaactgaccagatgcttcaagtcttgcaagagagcttgggggagctggacaaacagctcaccacatacctgactgacaggatagatgctttccaagttccacaggaagctcagaaaatccaagcagagatctcagcccatgagctaaccctagaggagttgagaagaaatatgcgttctcagcccctgacctccccagagagtaggactgccagaggaggaagtcagatggatgtgctacagaggaaactccgagaggtgtccacaaagttccagcttttccagaagccagctaacttcgagcagcgcatgctggactgcaagcgtgtgctggatggcgtgaaagcagaacttcacgttctggatgtgaaggacgtagaccctgacgtcatacagacgcacctggacaagtgtatgaaactgtataaaactttgagtgaagtcaaacttgaagtggaaactgtgattaaaacaggaagacatattgtccagaaacagcaaacggacaacccaaaagggatggatgagcagctgacttccctgaaggttctttacaatgacctgggcgcacaggtgacagaaggaaaacaggatctggaaagagcatcacagttggcccggaaaatgaagaaagaggctgcttctctctctgaatggctttctgctactgaaactgaattggtacagaagtccacttcagaaggtctgcttggtgacttggatacagaaatttcctgggctaaaaatgttctgaaggatctggaaaagagaaaagctgatttaaataccatcacagagagtagtgctgccctgcaaaacttgattgagggcagtgagcctattttagaagagaggctctgcgtccttaacgctgggtggagccgagttcgtacctggactgaagattggtgcaataccttgatgaaccatcagaaccagctagaaatatttgatgggaacgtggctcacataagtacctggctttatcaagctgaagctctattggatgaaattgaaaagaaaccaacaagtaaacaggaagaaattgtgaagcgtttagtatctgagctggatgatgccaacctccaggttgaaaatgtccgcgatcaagcccttattttgatgaatgcccgtggaagctcaagcagggagcttgtagaaccaaagttagctgagctgaataggaactttgaaaaggtgtctcaacatatcaaaagtgccaaattgctaattgctcaggaaccattataccaatgtttggtcaccactgaaacatttgaaactggtgtgcctttctctgacttggaaaaattagaaaatgacatagaaaatatgttaaaatttgtggaaaaacacttggaatccagtgatgaagatgaaaagatggatgaggagagtgcccagattgaggaagttctacaaagaggagaagaaatgttacatcaacctatggaagataataaaaaagaaaagatccgtttgcaattattacttttgcatactagatacaacaaaattaaggcaatccctattcaacagaggaaaatgggtcaacttgcttctggaattagatcatcacttcttcctacagattatctggttgaaattaacaaaattttactttgcatggatgatgttgaattatcgcttaatgttccagagctcaacactgctatttacgaagacttctcttttcaggaagactctctgaagaatatcaaagaccaactggacaaacttggagagcagattgcagtcattcatgaaaaacagccagatgtcatccttgaagcctctggacctgaagccattcagatcagagatacacttactcagctgaatgcaaaatgggacagaattaatagaatgtacagtgatcggaaaggttgttttgacagggcaatggaagaatggagacagttccattgtgaccttaatgacctcacacagtggataacagaggctgaagaattactggttgatacctgtgctccaggtggcagcctggacttagagaaagccaggatacatcagcaggaacttgaggtgggcatcagcagccaccagcccagttttgcagcactaaaccgaactggggatgggattgtgcagaaactctcccaggcagatggaagcttcttgaaagaaaaactggcaggtttaaaccaacgctgggatgcaattgttgcagaagtgaaggataggcagccaaggctaaaaggagaaagtaagcaggtgatgaagtacaggcatcagctagatgagattatctgttggttaacaaaggctgagcatgctatgcaaaagagatcaaccaccgaattgggagaaaacctgcaagaattaagagacttaactcaagaaatggaagtacatgctgaaaaactcaaatggctgaatagaactgaattggagatgctttcagataaaagtctgagtttacctgaaagggataaaatttcagaaagcttaaggactgtaaatatgacatggaataagatttgcagagaggtgcctaccaccctgaaggaatgcatccaggagcccagttctgtttcacagacaaggattgctgctcatcctaatgtccaaaaggtggtgctagtatcatctgcgtcagatattcctgttcagtctcatcgtacttcggaaatttcaattcctgctgatcttgataaaactataacagaactagccgactggctggtattaatcgaccagatgctgaagtccaacattgtcactgttggggatgtagaagagatcaataagaccgtttcccgaatgaaaattacaaaggctgacttagaacagcgccatcctcagctggattatgtttttacattggcacagaatttgaaaaataaagcttccagttcagatatgagaacagcaattacagaaaaattggaaagggtcaagaaccagtgggatggcacccagcatggcgttgagctaagacagcagcagcttgaggacatgattattgacagtcttcagtgggatgaccatagggaggagactgaagaactgatgagaaaatatgaggctcgactctatattcttcagcaagcccgacgggatccactcaccaaacaaatttctgataaccaaatactgcttcaagaactgggtcctggagatggtatcgtcatggcgttcgataacgtcctgcagaaactcctggaggaatatgggagtgatgacacaaggaatgtgaaagaaaccacagagtacttaaaaacatcatggatcaatctcaaacaaagtattgctgacagacagaacgccttggaggctgagtggaggacggtgcaggcctctcgcagagatctggaaaacttcctgaagtggatccaagaagcagagaccacagtgaatgtgcttgtggatgcctctcatcgggagaatgctcttcaggatagtatcttggccagggaactcaaacagcagatgcaggacatccaggcagaaattgatgcccacaatgacatatttaaaagcattgacggaaacaggcagaagatggtaaaagctttgggaaattctgaagaggctactatgcttcaacatcgactggatgatatgaaccaaagatggaatgacttaaaagcaaaatctgctagcatcagggcccatttggaggccagcgctgagaagtggaacaggttgctgatgtccttagaagaactgatcaaatggctgaatatgaaagatgaagagcttaagaaacaaatgcctattggaggagatgttccagccttacagctccagtatgaccattgtaaggccctgagacgggagttaaaggagaaagaatattctgtcctgaatgctgtcgaccaggcccgagttttcttggctgatcagccaattgaggcccctgaagagccaagaagaaacctacaatcaaaaacagaattaactcctgaggagagagcccaaaagattgccaaagccatgcgcaaacagtcttctgaagtcaaagaaaaatgggaaagtctaaatgctgtaactagcaattggcaaaagcaagtggacaaggcattggagaaactcagagacctgcagggagctatggatgacctggacgctgacatgaaggaggcagagtccgtgcggaatggctggaagcccgtgggagacttactcattgactcgctgcaggatcacattgaaaaaatcatggcatttagagaagaaattgcaccaatcaactttaaagttaaaacggtgaatgatttatccagtcagctgtctccacttgacctgcatccctctctaaagatgtctcgccagctagatgaccttaatatgcgatggaaacttttacaggtttctgtggatgatcgccttaaacagcttcaggaagcccacagagattttggaccatcctctcagcattttctctctacgtcagtccagctgccgtggcaaagatccatttcacataataaagtgccctattacatcaaccatcaaacacagaccacctgttgggaccatcctaaaatgaccgaactctttcaatcccttgctgacctgaataatgtacgtttttctgcctaccgtacagcaatcaaaatccgaagactacaaaaagcactatgtttggatctcttagagttgagtacaacaaatgaaattttcaaacagcacaagttgaaccaaaatgaccagctcctcagtgttccagatgtcatcaactgtctgacaacaacttatgatggacttgagcaaatgcataaggacctggtcaacgttccactctgtgttgatatgtgtctcaattggttgctcaatgtctatgacacgggtcgaactggaaaaattagagtgcagagtctgaagattggattaatgtctctctccaaaggtctcttggaagaaaaatacagatatctctttaaggaagttgcagggccaacagaaatgtgtgaccagaggcagctgggcctgttacttcatgatgccatccagatcccccggcagctaggtgaagtagcagcttttggaggcagtaatattgagcctagtgttcgcagctgcttccaacagaataacaataaaccagaaataagtgtgaaagagtttatagattggatgcatttggaaccacagtccatggtttggctcccagttttacatcgagtggcagcagcggagactgcaaaacatcaggccaaatgcaacatctgtaaagaatgtccaattgtcgggttcaggtatagaagccttaagcattttaactatgatgtctgccagagttgtttcttttcgggtcgaacagcaaaaggtcacaaattacattacccaatggtggaatattgtatacctacaacatctggggaagatgtacgagacttcacaaaggtacttaagaacaagttcaggtcgaagaagtactttgccaaacaccctcgacttggttacctgcctgtccagacagttcttgaaggtgacaacttagagactcctatcacactcatcagtatgtggccagagcactatgacccctcacaatctcctcaactgtttcatgatgacacccattcaagaatagaacaatatgccacacgactggcccagatggaaaggactaatgggtcttttctcactgatagcagctccaccacaggaagtgtggaagacgagcacgccctcatccagcagtattgccaaacactcggaggagagtccccagtgagccagccgcagagcccagctcagatcctgaagtcagtagagagggaagaacgtggagaactggagaggatcattgctgacctggaggaagaacaaagaaatctacaggtggagtatgagcagctgaaggaccagcacctccgaagggggctccctgtcggttcaccgccagagtcgattatatctccccatcacacgtctgaggattcagaacttatagcagaagcaaaactcctcaggcagcacaaaggtcggctggaggctaggatgcagattttagaagatcacaataaacagctggagtctcagctccaccgcctccgacagctgctggagcagcctgaatctgattcccgaatcaatggtgtttccccatgggcttctcctcagcattctgcactgagctactcgcttgatccagatgcctccggcccacagttccaccaggcagcgggagaggacctgctggccccaccgcacgacaccagcacggatctcacggaggtcatggagcagattcacagcacgtttccatcttgctgcccaaatgttcccagcaggccacaggcaatgtgaagtattcatccggccaaccaatgtttcctgacgtacagtgttgcccttttcagcaaatgccaattccaagttccattaaatcagaagctccatggctccttggcccacgatgttgagtgctgactgtgtgttctactgaaagagtaaaacactgactatccaaagagaaatggatattttgtttttataataaccatatattattgttttcttcttccctttctatgcaagtgtaaattaatgaacagagaggtatttggaaatggtaatacatttgtcacggatttgtataatgtatacagcattgggaaagtgggtgggggctttctaatatgataccgtctttttaataactatgacaaagcttacataagaattagaagaccactttacatttttacattccttctgctgttcatattaaccttgcacaattacttcattttttctttgactcttttaccacaatgttttggttatttataatttatcagccatatgtttatcagccatataaccaactagatcccaaatagatccatgtatttgtttccgtgatttggccacattaataaattcataaatttcaatcaaatatcttatatatacacacatatggtttaagctacagccctgtgtatgccgtttaactttatttgacgttgcccacttacttctttgctgaccacttggataaccgtaataaaaatcctataagcctaaatggcatttcttttgggatatttttcctgcattttattccctttttatataagtaggaattaattatttattttatgtcttaatctatttgataaagaagactacattataataatctcaaagatcatattaccaaaggttgcccacttgagcatattttcattttgacacagaaacaaaatttagtacaacctttcctagttcccatgtcttgattttcatcattacatgcacagcagacctttacctattgtgataccagaacacatcattgtctttggttcccttcaaagagaattttattgttgttttgtattttcaagtccttaatagttcttgaaactcctagttgttttcttgttgaaagcagacacacatttagtgcacggcttattttacctttcgggtgaaagatcagatgtttttatacccttcacttgatcaatatatttggaaagaatgtttatcaaaagtctatgtcactgcttctacagaagaatgaaattaatgcttaggtgatggtacctccacctacatctttttgagtgcattcaattatgtattttggtttagcttctgatttaacatttaattgattcagtttaaacatgttacttaattagcaaatgtagaggaaccaaaaaaaggtgaaaataatatgttttgattcaaacctaaagacataaaaacataaagacattttaactttgggttctctttagctgggatctggccagaaggaggcttaaagttagaaattgctattattttagaataggttgggtgggttggggggcaagggtgtctatttgcagcagagatattttgaaaagaagaaaattgttttatataaaaaggaaagccatgaccacctttctacctcagatccatcttcatccattgcattggaaactgctttatgctgctgcagtctgcaaagtctagagcttttatcaggccatgtcatacccaagaaagcacctatttaaagaaaaaacaattccctgagctctcaactccaagttgtagatttggtgtcttccttgttcttactttaaaaagtcatgtgttaattttttttctgcctgtatttgtatgcaaaatgtcctctatctgctattaaagaaaagctacgtaaaacactacattgtaaccttctaagtaataataaataaaaagaaatatattgcagtaacaatgggaagtaagtatgtagttcttttgaaatatgtggtaaagaactaatcacagactatcatctaatctggttacatattgtatttttcatcctgaataaaagtaattttaacacaaaaaaa

SEQ ID NO: 3170 - DNA, 3293 bp, Homo Sapiens
  NM_007131
gtccacagaactcgaccctggaagagagagtcggggtcaggtcttcgggaggtggagggatcgaatgagggaactgatattccaagactccccacatcttggagcttcactcgccaggcatcccgcgctttcctgacgtcgcttcccctagtggtgcagcagcggagagctttgctacccagagcagcagggaggcgtggccacagaggcagaggcgtagtcgagccgaggaagaggaaagtggcctccggggaagccagagctgactgaagtgctcttgggaagaacaattcattgatttggtaccaacctgatgcaccctgatttgtcaaaggtggtaccaggtgggtgtcagtgtcacatacaagagtaaaactgttcctagagcaaatggcgatgagagagctgaacgcggattcatgctcaagcccccagatgggggctatgtgggagactagtgggtctgtgaaagagaactccagtcagagtaagaaatacagcacaaaaatagagaatcttggtcctgagagcgcttgcaggcacttctggagcttccgttatcatgaagcaaccggaccgcttgagactatcagccaacttcagaaattgtgccatcagtggctgaggccagagatccactcaaaagagcagatcttggaaatgctggtgttagagcagttcctgagcattctgcccaaggagacccagaactgggtgcagaagcatcatccacagaatgtcaaacaggctctggtcctggtggaattcttgcagagggagcctgatggaacaaagaatgaggtcacagcccatgagctgggaaaggaggcagtgctcttgggaggaacagcagtggccccaggcttcaagtggaagccagcagagccccaaccaatgggtgtgttccagaaagaatattggaatacataccgggtactacaagaacagctgggctggaacactcacaaagaaacccagcctgtatatgaaagagctgtgcatgatcaacagatgttagccctttctgagcagaaaagaatcaaacactggaagatggcatctaaactcatcctgcctgagtccctgagtttgttgacatttgaagatgtggctgtgtatttttctgaggaagagtggcaattattgaatcctcttgagaagactctctacaatgatgtaatgcaggatatctatgagactgtcatctctctagggttaaagctaaaaaatgacactggaaatgatcatcctatatctgtttctacatcagaaatacaaacatcaggatgcgaagtatcaaaaaagaccagaatgaaaattgcccagaaaacaatgggcagggaaaatcctggtgatacacacagtgtacagaaatggcatcgagcttttccaaggaagaaaagaaagaaacctgcaacttgtaaacaagagcttccaaaacttatggatcttcatgggaaaggccccacaggggagaaaccttttaagtgtcaggaatgtgggaaaagcttcagagttagctctgatcttattaaacaccacagaattcacactggagagaaaccctataaatgtcaacaatgtgacaggaggtttagatggagttcagatcttaataagcacttcatgacccatcaaggaataaaaccatatagatgctcatggtgtgggaaaagctttagtcataacacaaatctacacacacaccaaagaattcacacaggagagaagccctttaaatgtgatgaatgtggaaaaagattcattcagaactcccaccttattaaacaccagagaactcacacaggtgagcagccttatacgtgtagcttatgcaagagaaactttagtaggcgatcgagccttcttagacaccagaaactccacagaagaagggaagcatgtctagtgtctccaaactgaggaaagttaccatgtagagcttgactttagaagtggtgaaagaatacaaaattatgaggcacccaatgataggaatctgtgattaataaaacatttgggaagggtacatgttacacttcacaaaaaggaatctaagctgtctgttttattcagcattgcatcttctgtgcctagcacaagagttgatacataaggagtactttataaataaaaaaatgaaagtgtagtgatgagattcctttagctatctatctatatgtatatatctggttattcaaagcttccccacccccagtcatctaaatttttcaggtatcaagtgctcaacagacatatgatagtcaaggctcttagtctcattttttactctttgtcaagagaaatggaaaataagagtacttgggccctcttaagggagctcagagagaattactaaattagggacagtttcaatagttatcattctgtctacatgaacaatcaagaccaggactcagggaactttactctgtaacagaaagagaggattcagtgtttgccctgggagaattgtcccattcttgttgcttctctcctgagtacccactaccacaatgtcttctgtcaaggaattacaagtagcaagggaaggtctgaatgtaaggacaggcctagggaccttgcaagcacttgatatctctcctcttgctgactttgtcaacatagacatatagtgaaatgatgagggaggcagtcttggccctcatccaggtatctggtttttttttgtagaaagcacagataagtggtaaatggtctttttctgactttcattatgtggactggatggaggctttcaaactggtgccatactgctgcaggacctaaagggagccccatctttatggctgatcaactacaaccctatatgcctgaatactctgcaagaaggcctggagattttgcaaaactgatttattgagaatggcaaggagagccttgtgaacttttagctttggtgcacagctgataccaggagggaacatcctgaagtgtcagagaaaagtaaggcatatggctcacagtgatgatgccagtcagagccaggccagatggaaattgttttctgatgttactggttttcttttccctattagccaaagtgactatctcttaagagaagataatgtgacgtcaagggaagttggaaggcatggatttatatctatgtcagatcctggtttataatgttggccaaggcttatttatatatgtttatttagtattccataaaattgtacttcgtaatgaaaatgacacattttatcttaaatttagacaataaacaaaactttgttaccaaatcaaaaaaaaaaaaaaaaaaaaaaaaa

SEQ ID NO: 3171 - DNA, 3880 bp, Homo Sapiens
  NM_007145
aggactcccagacccctcaccttctgcctcccctggtcgcgtccgggtccttgcggagctaactagctcgccacgacgtcaagaacgacgtaacgtcaggccgctgtgggctctgggaattgtagtccagagctagatcggccacggacagaatggcgttctcttatctctgagtcggggcctggctcgttttgacatttttgcgcccacgagtcttcggagagggcgtcgccactccagaccttccagcaagcttgaagtcatctgacgctaaaggactacttacctcaagagctccatcgtcacagaaggaggcggccaagttcgcggggggaggggaggagacagagagtcgaccagtaaagcctcaagggaaatgtagtccaaggcctgagaagcgacgttgctggtaatagaaggtaattcagtaccagcctgggcctggccgcggtgaccgaggcgggccgcgtcgcggagacttctgggagtgcttcctcgctctccgagtgcgcaagcgcagcgcaccgagtggacattttggtctttgtccgcgggtcagtacggcccctgggtccacgtggcgcgaaagtaggaggaagacataggccaaggagccagacttcctgtgttaactccttcctctgccactttttaccttggggacctcagttaatatgatcctctgttgaagcaagaagacaaactgtatggtggagaaagaagtgggaaggatctgcgcggaagaagcctgagaagatgatgcacagatagagaggcaccaggacttgagaggcaccaggacttgggaggcatgttgatccatctccaggaaagactgagaaaaagagcgttgaatataagaaaaaatacttcctctgttctcagatcgtatttgttttaaggccacacctttttgaagttttcagtttgaaacacaacctggactgaaatcatgagggaggttgtgtaggaaagaatcatcaagggacttagttgggagcttctctaccacagcttactccttatggtattaaccccctttaagtgtaaatgtctttggtttaaaacgtttgtacctcatctgttaccagagtgttcatactggagagaaaccctatgaatttactgaatgtgggggaactgttactcatatgttgcatttcgtcgaacgtgcaagtcatgctgaagagaaaccctgtgcttctaaggagtattgacaagcccttagctagatgacaatctcattgagaagcagaaaattcatgctggagagaaactagtgaaggtagcaatacttcattgaatattagaaaatttttctagagagaaagcattgaatatactgagtatgataacatttcctctcaaaccttatcccttactctgcatttgggagatcatacacagagaagccttataaatgtaagagatgtggaaatatcttcagccaaaagtaaatcctcactcatcaagaaatttttactggagagaaaccttgtgaatgtgggaaagcttccattcagatgtcacacctcagccagcagagaatttacagtggggaaaacccctttgcctgtaaggtatgtggaaaagtcttcagccacaaatcaaacctcactgagcatgagcattttcacacgagagagaaaccttttgaatgtaacgagtgtggaaaagcctttagccaaaagcagtatgtcattaaacatcagaacacccatactggcgagaagcttttcgaatgtaatgaatgtggaaaatcatttagccagaaggaaaacctccttacgcaccagaaaattcacactggagaaaaaccttttgagtgtaaagattgcgggaaagctttcattcagaagtcaaacctcatcagacaccagagaactcacacaggagagaagccctttgtatgtaaggagtgtggaaaaaccttcagtggcaaatccaaccttactgagcatgagaaaatccatattggagagaagccttttaaatgtagtgaatgtggaacagcctttggccagaagaagtacctcataaaacatcagaacattcacactggagagaaaccctatgaatgtaacgaatgtggaaaagccttctctcagcgaacatcacttattgtacatgtgaggattcattcaggtgataaaccttacgaatgcaatgtttgtggaaaagccttctctcagagctcatctctcactgtgcatgtgagaagccatacaggggagaagccctatggttgtaatgaatgtgggaaagctttctctcagttctcaacccttgctctgcatttgagaatacacacaggtaagaagccttatcagtgcagtgaatgtgggaaagctttcagccagaagtcacaccacattagacaccagaaaattcatactcactaaaaaccccatgaaagccttgaaagtgggaaagctttcattagaaatttgcacctcatcatgccccagaaataatccttctgaagcaaagcaccacgaatgaggttaactttaacaagtactaaaaacttaagggacaccagaaaatttgtactgaagagaaagacatgcatatgattaaaaccctgtgtccaacagagaaacctgcagcagagataatggtgaaagtttaggcacattttcactaaaagtgggaacagaaaatggaggcctgttttttattgctaccaccatagatctggagatcttcgccagtaacaagaaaaattaagttgtaaatattggaaaggaacagacaaaaatagatgacatggtcatctacaactaatattaagactcctgtggtattgattgagcagagcagaagagatttcaaaaaaagacctatgcatttattagaatttggaatatgatacaagtggcatcaggaaatgaggaaataatggaactattttttttaagtggaggtagtttgttctccaagggggaaaaatagaccatgaactatacacaaaagtgaatccagagattaaaaacagaaatatggaaaagctatgtactaaaatgcatatgaccttgggaatagggaaacattccttggaacaatttgagaaatacttagcggttctacttatgagtatgaatgctcaggaaatacgcactaggatatttactgtggcttgatttgtagtagccaaaaattagaaacaactgagaaagcccatcacgaacaatatgggaaattcttatgtaatactatatatctgtaaaatgcaacaaatgaaatccacatgtattaacagaaagatcccagaattgttgaggggggatcaagttgcagaatgatacagatagtacaatgacttttttgtaaatttgaattaaaagtttcctcataaaactcagtactatctattggtaatggatgcatatatgtatgtacatgtttttgaaacggattggaaggatacagaccaaactcttgatagtggtcacctgtgaagagtggagaagggaaaataatgagtgtgggaggtgggatgggtattggttaaaggggacttcagctttttatataaacatccacttctctttcaaaagacttcaagtaaatataagaagatactgattgattctggattgtggtatagggatatcttgtcttattttttgtacttttctgtatttttaaaatttctcaaaataggaatgggagtgaggatgggaatgctgtatctgtggaagtcatgttatactggattcatttccaattaaatactaaacattttatagaaaatatttctaaaattttatcacggatgaatggatggacttgctctctatgtaatatgaaattaatctattttattaaaatttaaaaggacagcacaatccaaaaaaaaaaaaaaaaaaaaaaaaaa

SEQ ID NO: 3172 - DNA, 3788 bp, Homo Sapiens
  NM_007147
agagcgaccatttagcttctgttgttaagtggatctaagcctatgtcgcttactggacgctgaagtgattgggaatattagcagtgggggttctgtagggtcaggaaggggcggctggctttgggggagtgatgaggggcttgttgggggtgggggtgcgtgataaagggatttctcggctgaagacgaggctgtgaggcttctgcagaacccccaggtcaggccacatcattgaggctgcaggatctctcttcatagcccagtacgactctccgccgtgtccctggttggaaaatccaaacacctatccagcttctggctcctgggaaaagtggagttgtcagcaagagagaccgagagtagaagcccagagtggagatgcctgctgatgtgaatttatcccagaagcctcaggtcctgggtccagagaagcaggatggatcttgcgaggcatcagtgtcatttgaggacgtgaccgtggacttcagcagggaggagtggcagcaactggaccctgcccagagatgcctgtaccgggatgtgatgctggagctctatagccatctcttcgcagtggggtatcacattcccaacccagaggtcatcttcagaatgctaaaagaaaaggagccgcgtgtggaggaggctgaagtctcacatcagaggtgtcaagaaagggagtttgggcttgaaatcccacaaaaggagatttctaagaaagcttcatttcaaaaggatatggtaggtgagttcacaagagatggttcatggtgttccattttagaagaactgaggctggatgctgaccgcacaaagaaagatgagcaaaatcaaattcaacccatgagtcacagtgctttcttcaacaagaaaacattgaacacagaaagcaattgtgaatataaggaccctgggaaaatgattcgcacgaggccccaccttgcttcttcacagaaacaacctcagaaatgttgcttatttacagaaagtttgaagctgaacctagaagtgaacggtcagaatgaaagcaatgacacagaacagcttgatgacgttgttgggtctggtcagctattcagccatagctcttctgatgcctgcagcaagaatattcatacaggagagacattttgcaaaggtaaccagtgtagaaaagtctgtggccataaacagtcactcaagcaacatcaaattcatactcagaagaaaccagatggatgttctgaatgtggggggagcttcacccagaagtcacacctctttgcccaacagagaattcatagtgtaggaaacctccatgaatgtggcaaatgtggaaaagccttcatgccacaactaaaactcagtgtatatctgacagatcatacaggtgatataccctgtatatgcaaggaatgtgggaaggtctttattcagagatcagaattgcttacgcaccagaaaacacacactagaaagaagccctataaatgccatgactgtggaaaagcctttttccagatgttatctctcttcagacatcagagaactcacagtagagaaaaactctatgaatgcagtgaatgtggcaaaggcttctcccaaaactcaaccctcattatacatcagaaaattcatactggtgagagacagtatgcatgcagtgaatgtgggaaagcctttacccagaagtcaacactcagcttgcaccagagaatccactcagggcagaagtcctatgtgtgtatcgaatgcgggcaggccttcatccagaaggcacacctgattgtccatcaaagaagccacacaggagaaaaaccttatcagtgccacaactgtgggaaatccttcatttccaagtcacagcttgatatacatcatcgaattcatacaggggagaaaccttatgaatgcagtgactgtggaaaaaccttcacccaaaagtcacacctgaatatacaccagaaaattcatactggagaaagacaccatgtatgcagtgaatgcgggaaagccttcaaccagaagtcaatactcagcatgcatcagagaattcacaccggagagaagccttacaaatgcagtgaatgtgggaaagccttcacttctaagtctcaattcaaagagcatcagcgaattcacacgggtgagaaaccctatgtgtgcactgaatgtgggaaggccttcaacggcaggtcaaatttccataaacatcaaataactcacactagagagaggccttttgtctgttacaaatgtgggaaggcttttgtccagaaatcagagttgattacccatcaaagaactcacatgggagagaaaccctatgaatgccttgactgtgggaaatcgttcagtaagaaaccacaactcaaggtgcatcagcgaattcacacgggagaaagaccttatgtgtgttctgaatgtggaaaggccttcaacaacaggtcaaacttcaataaacaccaaacaactcataccagagacaaatcttacaaatgcagttattctgtgaaaggctttaccaagcaatgaattcctagtgcatcagcatattcataaatgaaatatactccgagtttcttgaagaagagaaaatcttctcagaatcaggtctaattatatgttattgaattcatgcttcagaaaaactctagggatgcactgcatgtgtgaacacatgataaaaaagtcatgctttattttagtgagggcaattacagagaaaagagtaagcagaaatgtccttctgagtactggcctcattaaggattataaattttctccccgggaagaaaccctgactaacgcattgagaaaagcctttctgtaaagaatggtacaagacaggttgttactcgattatttatagtaaaatatgtgggaaattatatcaatgataaccctgtttattgtgggatatcaatatttttaaagtgccaacacagtcatgataggacaatattttatgtgtgtgtgtgcgccttatgtatataagcatatatataatatataagcatattattatatacaggttgagtatcccttctccaaaatgcctgggatcagaagcattttggatttcagatacttacagattttggaatatttgcattatatttattggttgagcatccctaatctgaaaatccaagattaaatgctccaattagcatttcctttgagcgtcatgttagagttcaaaaagtttcagattttgggttttcagattaggaatacccaacctgtatgtacgtatatttctgtatctatgtatgtatatatatgcatatgcagacatatgtatatggtctggtcagcatatgtgtatgtatgcgtatgtatgtatgtatgtatgccctcagtgcagtggggtttgctgcagaattcactgcatagcaggagatgtaagcagatgagttattttttaagagaatctaatctaattgtttttataaaaattattccctattgaatatttatataatgaggttgtatcaacaatgattaactcctttattatacatacacatgaatgtgcatttttggtaaatgcataaatgagattctataatgtttactgatctttatattacagattttctcttcttttaggattagctcagcttgccccccctttccatctccaccatctatagtgagcctctccataattagtgccaaccattagtctcgttcatatttttacaccaggagtcaacaaactgtggccattggccaaatatggcctcccaactgtttttttaaaataaagttttattggaacacagccatgttcatttggaaaa

SEQ ID NO: 3173 - DNA, 3062 bp, Homo Sapiens
  NM_007151
agcggagaagaaagcgctccgaagagctagagctgacactcggcgatgagctaagacgctgtttcagagcgtttgggtcctctgaggccccttgaccaggagtgtctctgaagatacagtccaaagaaagttctccaaaacaaggagaacagtctgaagctggggatggcaacagcattggtgagtgcccattccctggctcccctgaatctgaagaaggaggggcttcgggtagtgagggaggatcactactctacttgggaacagggattcaagctgcaaggaaacagtaaaggccttggacaggagccattgtgcaaacaattcaggcagttgcgttatgaagagaccacaggacctcgagaagcactaagtcggctccgggagctctgtcaacagtgctacagcccgagacccataccaaggagcagatcctggagctgctggtgctggagcagtttctgatcatcctgcctaaggagctccaggcccgggtgcaggagcatcacccagagagcagggaggacgtggttgttgttctggaggatttgcagctggatcttggagaaacaggacaacaggtggtaagggtcagatgtgctctttttcaggaatgcaggaattgagatctctggccagacaggtggacatgggctcatcagcggaaggagaattactaagctttgattcagtttttttccagtctagctgttaatttccttaggtcttacctcaaccttacctggcccttgcttggagaaaactgaatgtgcaccagattccccatcttcttttctttgcccctctggggtttctctttcttctcttttttaacacctaggtgttttactgaacagcagtttcctaaacccacatatatctaattatgcctccatatacctaattgtccctaggacccagaccagccaaagaaacaaaaaatacttgtggaggagatggcccctctgaaaggagtacaggaacagcaggttcggcatgagtgtgaagttacaaagcctgagaaagagaagggtgaggagacaaggattgagaatgggaagcttattgtagtaacagactcttgtggaagagtagagtcatctgggaaaatatctgaacccatggaggctcataatgagggctctaacttggaaaggcatcaggccaagcccaaagagaagattgagtataaatgctcagaacgtgagcagagattcatccagcacttggacctgattgaacatgcgagtacacacacgggaaagaaactctgcgagtctgatgtgtgtcagagttccagtcttacaggacataagaaagtcctctctagagagaaaggtcatcagtgtcatgagtgtgggaaagcctttcagaggagttcacacctcgtcagacatcagaaaatccatcttggtgagaagccttatcagtgcaatgagtgtggcaaagtctttagccagaatgcaggccttttggaacatctcagaattcatactggagagaaaccttatctatgtatccattgtggaaaaaattttaggcgcagctctcaccttaatcgacatcagagaattcacagtcaggaggagccctgtgagtgcaaggagtgtggaaaaacctttagtcaggccttactcctcacccaccatcagagaatccatagtcactccaaaagccatcaatgtaacgagtgtggaaaagctttcagtttgacctcagaccttattcgacaccacagaattcatactggagaaaaacctttcaagtgtaacatatgccagaaagccttccgactaaactcacaccttgctcagcatgtaagaatccacaatgaagaaaaaccctatcagtgtagtgaatgtggagaagccttcaggcaaaggtcaggtctttttcaacatcagagatatcaccacaaagacaaactggcttgatgaggtgttctctccttgtagaacatcagagaaggcacattgactagcaaacagcactttaggaaaagtcaccgtagcccactgtggcatcagaaaattcttgggggctgagttggaggctccctgcctctattctctctcctttgctttccttgaagtcagctttggaccacaataatttcactgtagatgatatgctaggatcaaagttaaacagcattcttcactgcaggacatctcagagcatgtaacataactgcatgattatatactctaagcaatagagagcttcatgactgagtaagagttttgaagtcagcagtgaatcaagtgcccacagatttgcaggcttaagcagaacaagggaagattgatatttttggatatgctatagcagctttctcctatgaaataaaactgatgatgtttggaagtatactactctcaaaggtgtctttaaagtacaggttaatggtgaacattttcccccagtggcttcacctcattcctcccactggccttaccccttccttccccagtggaagcattttcaaaagcaaagataattttcgctggtgaacttcagaacttgccttcagggttagcttcatgtaattttaccatttcccatccccattccccaccacattatgtcaagattcaagttataaattaacgttttacttagactttgaaagagatttcatgagtaatttgaatgaaccttgctgaattaatctgaatagcaactgtctgacttgataactccagtgccagtatagtggctgctgcatagacactattcagtaaatgtctgatgaaagaaattggactttttccctttaatactgatgatgcaattttgaaatgttgcttgttctggaatacttcggaagttaaacaataaagtcagcttggagaggagatcatgatctttatactgtgaatagcagaatgtcacagatgaagaatattaaaattaggggcgtccactccaaaacatatcaccagagtgacaacttcagccctcagcctctgcaatccatatatatcctggtcttgggagtccatagaatactgtttccttctaataaaggtttcaaacaaaaaaaaaaaaaaaaaaaaaaa

SEQ ID NO: 3174 - DNA, 2189 bp, Homo Sapiens
  NM_007152
aatcaggcacatgtctggagaggagaggacggcttccgggatctagcggggcctttgtcccgacagagctccacttcctgtccccgcggctctgtgtcccctgctagccgtaggtcgtgtgacccgcaggcaccgggagatccagaagtgaaacgccaggctctctggaggccaggagatgactctgttgacgttcagggatgtggccatagaattctccctggaggagtggaaatgcctggacctcgctcagcagaatttgtacagggatgtgatgttggagaactacagaaacttgttctccgttggtctcactgtctgtaagccaggcctgatcacctgcctggagcaacgaaaagagccctggaatgtgaagagacaggaggcagcagacggacatccagctatgtcttctcattttacccaagaccttctgccagagcagggcatacaagatgcattcccaaaaagaatactgagaggatatggaaattgtggccttgataatttatatttaaggaaagactgggaaagtttagatgagtgtaagttgcaaaaagattataatggacttaaccaatgttcatcaactacccatagcaaaatctttcaatataataaatatgttaaaatctttgataacttttcaaatttacatagacgtaatataagtaatactggagagaaacctttcaaatgtcaagaatgtggcaaatcctttcaaatgctctcattcctaactgaacatcagaaaattcacactggaaaaaaattccaaaaatgtggagaatgtggcaaaacctttatccagtgctcacactttactgaacctgagaacattgacactggagagaaaccttacaagtgtcaagaatgtaacaacgtcattaaaacttgctcagtccttactaaaaatagaatttatgccggaggggaacattacagatgtgaagaatttggcaaagtatttaaccagtgctcccaccttactgaacatgagcatggtactgaggaaaaaccctgcaaatatgaagagtgcagcagtgtctttatctcttgctcaagcctttctaatcaacagatgattcttgctggagagaagctctccaaatgtgaaacatggtacaaaggttttaaccacagcccaaatccttccaaacaccagagaaatgagattggagggaaacctttcaaatgtgaggaatgtgacagcatcttcaagtggttctcagaccttactaaacataagagaattcacactggtgagaaaccatacaaatgtgacgaatgtgggaaagcctatacacagtcctcacacctcagtgaacacaggaggattcacaccggagagaaaccctaccaatgtgaagaatgtgggaaggtcttcagaacttgctcaagcctttctaaccataagagaactcattctgaagaaaaaccctacacgtgtgaagaatgtggcaacatctttaagcagttatcagacctcactaagcataagaaaacccatactggagagaagccctacaaatgtgacgaatgtggaaaaaactttacccagtcctccaaccttattgtacataagagaattcatactggagagaaaccctacaagtgtgaagaatgtggcagagtcttcatgtggttctcagacattaccaaacataagaaaacccatactggagagaaaccctacaaatgtgacgaatgtggaaaaaactttacccagtcctcaaaccttattgtacataagagaattcatactggagagaaaccctacaagtgtgaaaagtgtggcaaagccttcacccagttctcacacctgactgtacatgaaagcattcatacttgagaaaaaaataaacaaatataaaaataggcaaagccgttagtatctgctcgcatcccactttacatcagagttcagacttaataaagttatcataaatgtaattactattgaaagacctttcatgaaatataagtctccagagcacacaagagtatttcttctgaaaaaaatgttacaattatactagatggaagacttgcatcagttgcttaaactttcagaaaatttgtagagaaacccaacaaatctcataaatgtggaataacatttgttcaaaaatgatagcttagaaaacactagagttcatactaaaagatattttgcaaatacactaaat

SEQ ID NO: 3175 - DNA, 5651 bp, Homo Sapiens
  NM_007157
ctacctctgggctttctattctgttccagagacccagtaccagaatatttaaatcactgtggcgttaaatacgttttaatatctgatagggccagtttctgcgcattgcacatttttttttcccctttcaggaacgtgttcaggcccgcggcagggggcgggatcgcgcctcctcctcggctctggttccagccgagcctctcggacgcagagatggaaatcccgaagctgctcccggctcgcgggacactacagggcggcggcggcggcggtatccccgcgggtggcggccgagtccaccgaggccctgactcgccggctggccaggtccccacgcgccgcctcctgctgctccggggcccccaagatggcgggcccgggcggcggcgcgaggaggccagcacggcatcacggggccctggcccaagcctgttggcgccgaggaccgatcaacctagcggcggcggcggcggcggcggcgacgacttcttcctggtgctgcttgacccggtgggtggcgacgtggagaccgcgggctccggtcaggccgcagggcctgtgttgagggaggaggccgaggagggcccggggctccaggggggcgagagcggcgcgaatcccgcggggcccactgcgctaggcccccgctgcctgtccgcggttcccactccggccccgatctccgcccccggccccgccgcggccttcgcgggcacagtcactatccacaaccaggacctgctgttgcgctttgagaacggcgtcctcaccctggccacgcccccaccacacgcctgggagccaggggccgctcctgcccagcagcccgggtgtctgatcgccccgcaagctgggttcccgcatgccgcgcacccgggtgactgcccagagctgccgccagacctcctgctagctgagccggccgaacccgcgccagctccggcgcctgaggaggaggcggagggcccggccgccgccctgggcccccgcggaccgctgggctccggcccaggcgtggtgctgtacttgtgccccgaggcgcagtgcgggcaaaccttcgccaagaagcaccagctgaaggtgcacctgctgacgcacagcagcagccagggccagaggcccttcaaatgccccctgggtggctgcggctggaccttcaccacctcttacaagctcaagaggcacctgcagtcgcacgacaaactgcggccctttggctgcccggcagagggctgtggcaagagcttcaccacagtgtacaacctcaaggcgcacatgaagggccatgagcaggagaactcattcaaatgcgaggtgtgcgaggagagcttccccacgcaggccaaactcagcgcccaccagcgcagccacttcgaaccggagaggccttaccagtgcgcgttttctggctgcaagaagacatttatcacagtgagtgctctgttttcccataaccgcgcccatttcagggaacaggaactgttttcctgctcttttcctggctgcagcaaacaatatgacaaggcttgtaggctgaaaattcacctgcggagtcacaccggcgagagacctttcctttgtgactttgatggctgtggctggaacttcactagcatgtccaaactcttaaggcacaaaagaaagcacgacgatgaccggaggttcatgtgccctgtggaaggctgtgggaaatctttcacgagggcggaacatctgaaaggccacagcataacccacctgggcacaaagcctttcgtgtgtcctgtggcaggctgctgtgccaggttctctgctcgcagtagcctctacattcactccaagaaacacctgcaggatgtggacacttggaaaagccgttgcccgatctcctcttgtaataaactcttcacatccaagcacagcatgaagacgcacatggttaaaaggcataaggtgggccaggatctcttagctcagctagaagcagcaaattctctcacacccagcagtgaacttaccagccagagacagaatgatctcagtgatgcagagatagtgtctctcttctctgatgtacctgacagtacttctgctgcattgctggacacagcattggtgaactctggaatcttgactattgatgtggcttctgtgagctcgactctggcagggcacctccctgctaataataataattccgtagggcaggctgtggaccctccgtccttgatggccaccagcgaccctcctcaaagtctggatacctctctcttttttggaacggcggccactggttttcagcagagctccttaaatatggatgaggtctcaagtgtaagtgtggggccattgggatctctggactctttggccatgaaaaactccagtccagagcctcaggctttgacacccagcagtaagctaacagtggacacagatgctctgactccttcgagcaccctttgtgaaaacagtgtctcagaactactgacaccaaccaaagcggagtggaacgtacatcctgactctgacttctttggacaggagggagaaacccagtttggattccccaatgcagcaggaaaccatggttctcagaaagaaacagatcttatcactgtgactggcagctcatttttggtatgaaccaactctattcattcctcatcatgtggcttacttttattacagtcaattttgaggatattctggactaaatatttaagtgcagtcatttctttttggtttgcaaaaagagcacagccctggactacaagtttggagatttaaattctgatcttgagtttggaactgacaagttgtgtgaccctgagcaagtcagttaacctatctgagccttaatttccttatttataaattgaggtggtttgaatagattgcttttaaggtctttctgctctgtgattccttgataatacatttctttccttgaaaaatatgaggacgtttttcagtgatgtggcatgcgtttttttttaactgcccccccagccctgacatgttctttttttggcaaacatacataatgttacatcatactatgatgaacatccatgtacttttcactcaatttcagcaattatgaatccatgaacaatcttttttaacttagcctcactcactccccatgttctagtattattttgtaacaaatagcagacatctgatcattttatccataaatattctttatatatctctgaaagctatgggatgatatggaaaaaaatgataattccattatcgcaagtgatatttacagtaattctttaatatcagtaaatatccagtgagggttcaaacttccaattgcctcataaatgctacttgttttattatttttaattagtagaatcccgtaaatctcctaagtgtcttcttaatccgtatgtttccctttcatctttctttttttccttgcgattttgtttatgaaatgaggttgtttcacatgtagcatttgccacaatttaagttttgctaattgcatccctatggtaatgtttgctttcctctatcctctgtttctttaatttgctagttatgtctagagacttgatgagattgaaacatggcttttggcatgaatgtttcataggttatgttgtgttcatttagtaggtggcgcataatctgtggttttctctctttttgtggtattagcagctgctgcagataaatgcattaattcatgatgcttctgatatgatgagtcatctttgtagagttactaagcattagcaaaggaggaaatgctatgtaatagaaatattattcaatgccaaaatattttcttaaatagtcatagaactaacaagaaaaaatagatagcaaaaaaatgtgttggctgttctcactgtttatcttcctaacttcttttgatgatggaaggcagttttgtggaaattgccagccaggactttgacatgaaacagacccagggctaaattttggctctgtggtgttggataagtggccttgaataaattagttattaagcttcagttttctagcttttaactgattataacaatgcacacacatacctgacacactgttaaattttcttctcttcctgtttcttatgttaaggaaagatactctgtgttttggcatatgttggtgaatttgtaccatttttatcctctcagtccttccttttataagacaataattggagtagtttaatcttattcatgtgcagataaaagaggtttatgaagtttagggtgaagtaggcaagggaatctgtttactccctcttccctctactgaataattttccctctactgaataattttccctctaagaattgctgtgggtaataccaggagtggggacattgcccacatgcataagagcgtatctctccattcgatcagtttgtcaccatctttgctctgttttgaaagtcaggcttctctgtgactgtgaagcctgctgttccctgaaaatctgataatggagcagtggaggtttttttctttctgtgctctgtagatctcattgtttgcacttgtaatttcccagagttgaaaggaaagattgaactggaatattgtgtaaactatctgtcttacattagtgtagcattttgcaatttggggaacatcttcacaatttgtgtctcgttgttcagaacaaccctgtgaagtagttttggcaatgtctgtgttacatttcatgtaatttagccaactcccattccaactaggctttggctaaatctgacaattttatatatagcttaaaacaaagaatatacattcttttcacccctcccagtctacccatccagccttcatgattcattcctgtgtcaaggttagtcgctgttttccatttgaattggtttcttttatggtcagtttactttcttccctctcccctccctttcctgcacatccccatccttgctatgcctttctgtcctcttttataatggatatatctttttcctgccattatccctcagacattctcctcatggcacattttcttcaaatgctaacatttactgagtgtacattgaagttctgtgcatacaggaagaagttattttctgagcttagataatactatgtgtatatgtgattaaaatgaagattattttctaaagccttcaaattagaagtggatttctgtttcattacttccgttttaaaagtttttgccagagagttttgctaaatactctcttatttgctctagtgtactagtccagtagtgtttgcatgtggatgtctgtggatgacagttattgtagcactttggcagtgcactaaaattttgccactatgaaatgtttctttattgtgtgtgcgtgtgtgttttgaaatacgcacacagccacacccacatatatattaaaagtggttgtattcatttagtgaaaaacaaaaagtagatgtacttctgtaaatcagataaatgcttggaatttgattgtctacccaatcaacagttttccctctttgctctggaaatatttgtactcatatagcatatttcaaaaatgttgtcattcattaaggcctcttaaatagaccactattttttgtgtctggcagatgagtatgtcaaggattgagatgaacacataagtcttggaaattaaataaatttataaacataaagataaaaaaaaaaa

SEQ ID NO: 3176 - DNA, 4420 bp, Homo Sapiens
  NM_007159
tttaaaggaggtgatggggcttgcgctggcttgtcttcccacccaagtgaagagttgatgttcactggttatgcttagacaatgtgcagtttgtgttaatttaaaattttgggtgggataggggcataggcttgtgaagggcagtccggatccggaggaactcgtctttgtccctggtaggagagacacccccagtctatcctcgatgccgtcagccttggccatcttcacttgccgcccgaactcgcacccgtttcaggagcgtcatgtctacctggacgagcccatcaaaatcggccgctcagtggcccgctgtcgaccagcgcagaataatgccacttttgattgcaaagtgctatcaaggaaccacgctctcgtctggtttgatcacaagacgggcaagttttatcttcaagacactaaaagtagtaatggtacttttataaatagccagagattgagtcgaggctctgaagaaagtccaccatgtgaaattctttccggtgacattatccagtttggagtagacgtgacagagaatacacggaaagttacccatgggtgtattgtttccacaataaaactttttctaccagatggtatggaagcccggctccgctcagatgtcatccatgcaccattaccaagtcctgttgacaaagttgctgctaacactccaagtatgtactctcaggaactattccagctttctcagtatctacaggaggccttacatcgggaacaaatgttggaacagaagttagccacgcttcagcggctactagccatcacccaagaggcttcagataccagttggcaggctttaatagatgaagatagactcttatcacggttagaagttatgggaaaccaattacaggcatgctccaaaaatcaaacagaagatagtttacgaaaggaacttatagcattacaagaggataaacataactatgagacaacagccaaagagtccctgaggcgggttcttcaggagaaaattgaagtggttagaaaactttcagaagttgagcgaagtctgagtaatactgaagatgaatgtacccatctgaaagaaatgaatgaaaggactcaggaagaattaagagaattagccaacaaatataatggagcagttaatgagattaaagatttatctgataaattaaaggtagcagagggaaaacaagaggaaatccaacagaagggacaggctgagaaaaaagaattacaacataaaatagatgaaatggaagaaaaagaacaggagctccaggcaaaaatagaagctttgcaagctgataatgatttcaccaatgaaaggctaacagctttacaagagcacttgctttcaaagagtggcggggactgcacttttattcatcaattcatagaatgccagaagaagctgatcgtcgaagggcatctaaccaaagcggtagaagaaacaaagctttcaaaagaaaatcagacaagagcaaaagaatctgatttttcagatactctgagtccaagcaaggaaaaaagcagtgacgacactacagacgcccaaatggatgagcaagacctaaatgagcctcttgccaaagtgtcccttttaaaagatgacttgcagggtgcacagtcagaaattgaggcaaagcaagaaatacagcatcttcgaaaggaattgatcgaagcccaggagctagctagaacaagtaaacaaaaatgctttgaacttcaagctcttttggaagaagaaagaaaagcctatcgaaatcaagttgaggaatccactaaacaaatacaggttcttcaagcccaattgcagaggttacacatcgatactgagaatctccgggaggagaaggacagtgaaatcacaagtactagagatgaattgcttagtgcccgagatgaaattttgctccttcatcaagcagcagcaaaggttgcctctgagcgggacactgacattgcttctttacaagaagagcttaagaaggtgagagctgagcttgagcggtggcggaaagcagcgtctgaatatgagaaagaaatcacaagtctgcaaaacagttttcagcttagatgtcaacagtgtgaggaccagcagagagaagaagcaacaaggttgcaaggtgaactagagaagttgagaaaggaatggaatgcattggaaaccgaatgccattctctaaaaagggaaaatgttttgctatcatcagaactgcaacggcaagaaaaagaattgcacaattctcagaagcagagtttagagcttaccagtgatctcagcatccttcaaatgtctaggaaagaacttgagaatcaagtgggatccttgaaagaacagcatcttcgggattcagctgatttaaaaactcttctcagtaaggcagaaaaccaagcaaaggatgtgcagaaagagtatgaaaagacacagactgtactctcagaactgaagttgaagtttgaaatgactgagcaggaaaagcagtcaatcacagatgagctcaaacagtgtaaaaacaacctgaagctgctccgagagaaaggaaataataaaccctggccctggatgcccatgttggctgccctggttgcagtaacagccatcgtgctgtacgtgccaggtctggccagagcttctccatgagagcgttccttgagtccgtacaccgtcctccctctagaagctggcatcacactcatgctggggacaaacagaaccattttcttcctctttacctcttaaaacagcagaagtacaagaatacagctgtagggtcattgctttaaattatataaaatgtatctgtctataaagaagatataaaattgtgactttattctactgtaagcaataatttgcttgcaatttttcatgtaatttttaaattagtatgttaagattctgaatattatggtggcctaaagtaggcttcttggtacaccagattatttataacattaaatttatgagtattttactctgaattctgatcaccagataattcatttttctgatttgataactacccaaaccaaacaaccaatacatacatgggaagagaggccctgtgtgctcagtgcctatcagtttgaaatatatacacatatatatattttttacatatttacgccatttttacttgttatgaaaccactgagctattgggaacaagacttagagacaactatttgcgtggatttttttttttttaaggaaaaatacgtttggaaaataaactgttatggtgataatttggggaatatgtgcacgcttgttcagccttaatgtgacttgaagatgtggaggacatcaactttgaaaaactttccatgagagtgtattttcttgagcaaactgaagtatttctgggagcaaaaacatagtaattacacaatttcagtgcagtcaaccaaaatgttgagtcaattggaatgtaatttattaaaccatgtatttaaagagatatttttctttaaaagccaagttactttctcatatacagcattttaggaagcatgattttttttttctatcatctattcctccaagcatgtttaattgaagaaagtattaatatctctttagataagcttgtattgacctaatttggtttatgatgtgtcagagctaattcatgttcagggtgagcgttgtacctaccaacaaatttcctggttgggtatgcaaatggttattttctttttattgttgttaattgggactttctgttaatgaaaagcactattcccaagattaatagtgttctatgcacaatgaagcacctaaaaacactgcttgatattataaatttaaaacacaagtgaaagtttagccatggttttgtgcggcatcatagttatgtcaataaagtttatttaggtcatagaatatcctaaagtatcacatagttaaatttttcagtcagtgaagaccgggagggaatgtcagtgaattggcttgaatgttctgtggcaatccacaggtctagccaaatattgaaataggagtttagggtataatttgccttgtgatgtttggcagtcactgtttatactttaaaggttatattttaagctatttgagattgcttttgggaagatcactagatttatggaggaattagtcacaaatgacttgtagaaaatactgtcatatagttcatttcatcattttctgttgcaggaagccactccaccacagaatgctaatatgccagtggtacccagtacctcttgtatataggttattgcaaatattgttctgaaatgcttaacttcagaattacattttttaaagtaaataattgttttaaatctattttgtaaagatataaagtacaatagaatttctggagtacagattaaactatttgcactaacacacgtgacgtgcatgatttaataaaataactttactctccct

SEQ ID NO: 3177 - DNA, 1678 bp, Homo Sapiens
  NM_007165
ggaagtgctttctttgcccgccgttcgccaaacgaagtcgtggaggtggcgaaacgaggaggagataacgcggccttgggctctggtgtctcccagtctgctaaagccctaaggccatcaccatggacttccagcatcgccccgggggcaagaccgggagcgggggcgtggcctcctcctccgagagcaaccgtgaccgcagggagcgcctccggcagctggccctggagaccatcgacatcaacaaggacccgtacttcatgaagaaccacctgggctcctatgaatgcaaactctgcctgacacttcacaacaatgaggggagctacctggcacatacgcaggggaagaagcaccagaccaacctggcccggcgagcagccaaggaggccaaggaggcccctgcccagcccgcgcctgagaaggtcaaggtggaggtgaagaagtttgtgaagatcggccgcccgggctacaaagtgaccaagcagagagactcggagatgggccagcagagcctcctcttccagattgactaccctgagatcgccgagggcatcatgccacgtcaccgcttcatgtctgcgtacgagcagaggatcgagcctccggaccggcgctggcagtacctgctcatggccgccgagccctacgagaccattgccttcaaggtgccgagcagagagatcgacaaggcggagggcaagttctggacacactggaaccgggagaccaagcagttcttcctccagttccactttaagatggagaagcccccggctccacccagcctccctgctggcccccctggggtgaagcggcctccacccccgctgatgaacggtctgccccctcggccaccgctgcctgagtctttgccaccgcccccgccaggaggcctgcctctgccacccatgccccccacagggcctgcgccctcagggcccccgggaccaccccagctacccccgccagctccaggggtccaccccccggccccagtggtgcatccccctgcatctggggtccatcccccagctcctggcgtccaccccccagctcctggcgtccatcccccagcccctggggtccacccaccaacctctggggtccaccccccagctcctggagtccaccctccagcccccggggttcacccaccagcccccggagtccacccaccagcccctggggttcacccaccagccccaggggtccatcctcccccatcagcgggggttcacccccaggccccgggggtgcacccagcagcccccgccgttcaccctcaggccccaggggtgcacccaccagccccagggatgcaccctcaggccccgggggtccacccccaacctcccggggtccatccgtcggctcctggggtccaccctcagcctccgggagttcacccctcaaatcctggggtgcaccccccaactcccatgcccccaatgctgaggcccccacttccctccgaaggcccagggaacatacctccccctcccccaaccaactgagaagctgctccctcccccagcaagcccagcgccaggtgctcttgccttttcccactgagagaaggctgctcttttgtactgccccccgctcattaaacagcctcccccagccctgagtgcactgatgtccgcaaaaaaaaaaaaaaaaaaaaaaaaaaaaa

SEQ ID NO: 3178 - DNA, 3860 bp, Homo Sapiens
  NM_007166
cctgttcctcttaccctgcccggctccagctgaccagggaaggggtgggctgaactgaggcgggggcaagggagtgcccgacatcttgtccgactccgcgggtgacacgagccggttctctctggactggtggcagcgcgcggccccgaaccgcgccccaggccggcaggcggggaaggagccggtgggggtagggggtgcggtggggggtggggaccctccggctcttgggggtcccagtccccgccggctgctgagcgggtggggtggtggaggagctgcagagatgtccggccagagcctgacggaccgaatcactgccgcccagcacagtgtcaccggctctgccgtatccaagacagtatgcaaggccacgacccacgagatcatggggcccaagaaaaagcacctggactacttaattcagtgcacaaatgagatgaatgtgaacatcccacagttggcagacagtttatttgaaagaactactaatagtagttgggtggtggtcttcaaatctctcattacaactcatcatttgatggtgtatggaaatgagcgttttattcagtatttggcttcaagaaacacgttgtttaacttaagcaattttttggataaaagtggattgcaaggatatgacatgtctacatttattaggcggtatagtagatatttaaatgagaaagcagtttcatacagacaagttgcatttgatttcacaaaagtgaagagaggggctgatggagttatgagaacaatgaacacagaaaaactcctaaaaactgtaccaattattcagaatcagatggatgcacttcttgattttaatgttaatagcaatgaacttacaaatggggtaataaatgctgccttcatgctcctgttcaaagatgccattagactgtttgcagcatacaatgaaggaattattaatttgttggaaaaatattttgatatgaaaaagaaccaatgcaaagaaggtcttgacatctataagaagttcctaactaggatgacaagaatctcagagttcctcaaagttgcagagcaagttggaattgacagaggtgatataccagacctttcacaggcccctagcagtcttcttgatgctttggaacaacatttagcttccttggaaggaaagaaaatcaaagattctacagctgcaagcagggcaactacactttccaatgcagtgtcttccctggcaagcactggtctatctctgaccaaagtggatgaaagggaaaagcaggcagcattagaggaagaacaggcacgtttgaaagctttaaaggaacagcgcctaaaagaacttgcaaagaaacctcatacctctttaacaactgcagcctctcctgtatccacctcagcaggagggataatgactgcaccagccattgacatattttctacccctagttcttctaacagcacatcaaagctgcccaatgatctgcttgatttgcagcagccaacttttcacccatctgtacatcctatgtcaactgcttctcaggtagcaagtacatggggagatcctttctctgctactgtagatgctgttgatgatgccattccaagcttaaatcctttcctcacaaaaagtagtggtgatgttcacctttccatttcttcagatgtatctacttttactactaggacacctactcatgaaatgtttgttggattcactccttctccagttgcacagccacacccttcagctggccttaatgttgactttgaatctgtgtttggaaataaatctacaaatgttattgtagattctgggggctttgatgaactaggtggacttctcaaaccaacagtggcctctcagaaccagaaccttcctgttgccaaactcccacctagcaagttagtatctgatgacttggattcatctttagccaaccttgtgggcaatcttggcatcggaaatggaaccactaagaatgatgtaaattggagtcaaccaggtgaaaagaagttaactgggggatctaactggcaaccaaaggttgcaccaacaaccgcttggaatgctgcaacaatggcaccccctgtaatggcctatcctgctactacaccaacaggcatgataggatatggaattcctccacaaatgggaagtgttcctgtaatgacgcaaccaaccttaatatacagccagcctgtcatgagacctccaaacccctttggccctgtatcaggagcacagatacagtttatgtaacttgatggaagaaaatggaattactccaaaaagacaagtgctcaagcagcaaaatccttacttccagcaaaatccaaactgctgtctcttaaatctcttaaactctcttcttccattagaatgctacaagtaactcagtgaaggcccatgaaggaaattgggactagtttataggagaacgtatcaatacagtttataaagccaagaattgctatgatttaagactaagatctgtctttttggtgactaacccttcaattctttcaactcctgttaatacccataatcagtaacctatcaagaaaagcccttatttggaaagtgtgaaatttgtatttggaaaagctgcctggagagaagaactgtgtcctttactgtatttcaacaggactcttttgggggatcaaaattaaaattcctaattatgcattatctttcttttctccagtcctcacaaatacagaaacaataactgaaattaacttttctttttttaaaaaaaattatattcagtttgcagtagacattccttaagtatttgtatttatttatgattatcaattttacataacattaatattgtatcagacctccttatgaaaatgagtatggatgtgcacagtatgtttgatttttatccacaagaatgaatctgattcagaatgcttttctcagctgacatacagagcactaaatattttaaggcaagtccataggtctgaatctcttaagaattctcggcctctgtgggatttagggaagcattataaatgcattaatccttatagtcaattctgtgcctaggattttgccagggaacagttcactgactaggaaaagcactacattttaaattcagcattagtgcattgggaaggatctttactgctttgtgcttggcatgtcattattttccatttgacattagggcctttccaaaatgaatgtgaggaattgctttcacttcaagactttccttcttttcactaaaactctagaaggtgttacaagggggagggaaggggggcaaagtccttgaacattttctttggctcgtgccatgttatgatcatataccttttaaataaggggaaatagtatctttaaagttaatgtctagccaagagtttagtaaacgaagaattaaactgcactgttgatcggtgctttgtgtaaatacatctttaacatttgggtggagaggggccttaagaaggacagttcattgtaggaaagcaattctgtacatgagtttaagcattcttgttgcattgtctctgcagattctatttttgtttacaatattaaaatgtatgttagcaaaatgggtggattttcaaataaaatgcagcttccacaaaagttttgttatggtattctggtctgagatgcattttcatttttcctttctctttttattatcaatattgtcatttttccctaataaaatatacccaggtgattatatttgttgatctaataacatggaaggtttgttttatatgaattttcaaaaagatgtctctttacactttttgttaccttgtagactcttattgataaatgcaactacttattaaaattgttcactttttgtcttttgaaaaaaaaaaaa

SEQ ID NO: 3179 - DNA, 5159 bp, Homo Sapiens
  NM_007167
gagggcggagaccaaggctgcgcaggcgtggttggccggtcgttgcgttgggatggatcaggcggaattccagaagagaaaataatccctgtctagatgcagaggacttggttcctattccagtgctcctccggtagcagggaggcgacagaaggtgtccaactatccattaccaagaagaaatctattcgtttgagcctgagacactctttgaggtaaaaaattagaatgaaagaacctttggatggtgaatgtggcaaagcagtggtaccacagcaggagcttctggacaaaattaaagaagaaccagacaatgctcaagagtatggatgtgtccaacagccaaaaactcaagaaagtaaattgaaaattggtggtgtgtcttcagttaatgagagacctattgcccagcagttgaacccaggctttcagctttcttttgcatcatctggcccaagtgtgttgcttccttcagttccagctgttgctattaaggttttttgttctggttgtaaaaaaatgctttataagggccaaactgcatatcataagacaggatctactcagctcttctgctccacacgatgcatcaccagacattcttcacctgcctgcctgccacctcctcccaagaaaacctgcacaaactgctcgaaagacattttaaatcctaaggatgtgatcacaactcgctttgagaattcctatcctagcaaagatttctgcagccaatcatgcttgtcatcttatgagctaaagaaaaaacctgttgttaccatatataccaaaagcatttcaactaagtgcagtatgtgtcagaagaatgctgatactcgatttgaagttaaatatcaaaatgtggtacatggtctttgtagtgatgcctgtttttcaaaatttcactctacaaacaacctcaccatgaactgttgtgagaactgtgggagctattgctatagtagctctggtccttgccaatcccagaaggtttttagttcaacaagtgtcacggcatacaagcagaattctgcccaaattcctccatatgccctggggaagtcattgaggccctcagctgaaatgattgagactacaaatgattcaggaaaaacagagcttttctgctctattaattgcttatctgcttacagagttaagactgttacttcttcaggtgtccaggtttcatgtcatagttgtaaaacctcagcaatccctcagtatcacctagccatgtcaaatggaactatatacagcttctgcagctccagttgtgtggttgctttccagaatgtatttagcaagccaaaaggaacaaactcttcggcggtgcccctgtctcagggccaagtggttgtaagcccgccctcctccaggtcagcagtgtcaataggaggaggtaacacctctgccgtttcccccagctccatccgtggctctgctgcagccagcctccaacctcttgctgaacaatcccagcaagttgctttaacccatacagttgttaaactcaagtgtcagcactgtaaccatctatttgccacaaaaccagaacttcttttttacaagggtaaaatgtttctgttttgtggcaagaattgctctgatgaatacaagaagaaaaataaagttgtggcaatgtgtgactactgtaaactgcagaaaattataaaggagactgtgcgattctcaggggttgataagccattctgtagtgaagtttgcaaattcctctctgcccgtgactttggagaacgatggggaaactactgtaagatgtgcagctactgttcacagacatccccaaatttggtagaaaatcgattggagggcaagttagaagagttttgttgtgaagattgtatgtccaaatttacagttctgttttatcagatggccaagtgtgatggttgtaaacgacagggtaaactaagcgagtccataaagtggcgaggcaacattaaacatttctgtaacctattttgtgtcttggagttttgtcatcagcaaattatgaatgactgtcttccacaaaataaagtaaatatttctaaagcaaaaactgctgtgacggagctcccttctgcaaggacagatacaacaccagttataaccagtgtgatgtcattggcaaaaatacctgctaccttatctacagggaacactaacagtgttttaaaaggtgcagttactaaagaggcagcaaagatcattcaagatgaaagtacacaggaagatgctatgaaatttccatcttcccaatcttcccagccttccaggcttttaaagaacaaaggcatatcatgcaaacccgtcacacagaccaaggccacttcttgcaaaccacatacacagcacaaagaatgtcagacagatttacctatgcctaatgaaaaaaatgatgcagaacttgattctccaccttcaaagaaaaaaagattaggttttttccagacttatgatacagaatatttaaaagttggttttattatctgtcctggatcaaaagaaagttcaccaaggccacagtgtgtcatttgtggagagatcttatccagtgaaaacatgaagccagcaaatctttctcatcatttgaagacaaaacattcagaattagaaaacaaaccagtagatttttttgaacaaaaatctttagaaatggaatgtcaaaatagttctttaaaaaagtgtttactagttgaaaagtcacttgtgaaagcttcttatttaattgctttccaaactgctgcaagcaagaagccattctccattgctgaagaattaattaaaccatatttagtagaaatgtgttcagaagttttgggttcaagtgctggagacaaaatgaaaactattccactttctaatgttacaattcaacacaggattgatgaactatctgcagacattgaagaccagctgattcaaaaggtcagagagtcaaagtggtttgcccttcagatagatgagtcatcagaaatctcaaatatcacacttcttttgtgctatattcgtttcattgattatgattgtcgtgatgtaaaagaagaattattattttgcattgaaatgcctactcaaataactggctttgaaatatttgaactaataaataaatatattgatagtaaatctctgaattggaaacattgtgttggtctctgtaccgatggggctgcaagcatgactggcaggtattctggtttaaaagcaaaaattcaagaagttgccatgaatacagcggcatttacacattgttttattcaccgtgaacgtttagtggcagaaaagttgtctccatgtttacataaaattcttttgcagtcagcacaaattttaagttttataaagagcaatgcattaaattcacgtatgttaacaattttgtgtgaagagatgggatctgagcatgtgagtttaccgcttcatgctgaagtacgttggatatcaagagggagaatgttaaaaagattatttgaattacgacatgagattgaaatatttttaagtcaaaagcattcagatttggccaagtattttcatgatgaggaatgggttggaaagctggcctacttatcagatatattttcacttataaatgaattaaatttaagtctccaaggaactttgactactttcttcaatttgtgtaataaaattgatgtatttaagagaaagttaaaaatgtggttgaagcgcacacaagagaatgattatgacatgttcccttcattttctgaattctcaaattcatcaggcttaaatatgacagacatcacaaggattatttttgagcacctggaaggactttctcaagtgttcagtgactgttttccaccagaacaagacttgcgttcaggaaatttgtggataattcacccttttatgaatcaccaaaataataatctcaccgacttcgaagaagaaaagctaacagagctatcttcagatttaggattacaagcactatttaaatcagtgtctgtaactcagttttggataaatgcaaagacaagttacccagaactccatgaaagggcaatgaaatttttattacccttttcaactgtttatttatgtgatgctgccttttcagctttgactgagtcaaaacaaaaaaatctgttgggttctggccctgccctaagacttgcagtcacatctttaattccaaggatagaaaaattagtgaaggagaaagagtagcaatatgcacattgcttaacagtgaagtcaataatcctgtgttaagttttgtataagtatcctaaaagataatttcctaatgtggatttgtgttttcagtgattaaatgttttaataatttttccctttttgttgaggaatttaataattatgattgttataaataattatgtataattataatctagggtagaaaatttagttatttcattaaatttggactagtgacaaagactgcaggtaatgagaagcccagtttataatgtaacagcacaacctggatgttgaaacagcttggcctttagaagcaagtggaacatttcagtcttctagccaaccagctacttacccctgcaaggttgtgagtaggtggaaaagatagatcttttttttgagatggagttttgctcttgttgcccaggctggagtgcaatggcgtgatcttggctcactggaacctctgcctcctaggttcaaacaattctcctgcctcagccttccaagtagctggggttacaggcatgtgccaccatgcccgtctattgtattttttttagtagagacggggtttcaccatattggtcaggctggtctctatctcctgacctcaagtgatccacctgcctcggcctcccaaagtgctgggattacaagtgtgagccaacgtgcccagctggaaaaagatagatctaagcagcttgggtaactataaatggaagcagcagggggatttgagacccctgcttggggcctttctggcccaatataccagggcttagcaaactttttaaataaagagccagatagtaaatattttcagctttgcaggccatactgtcacaactactcaattctgcagttgcagtgcaaaagcagccatagacaatatgcagataagtgtggctgtttttaaataaaacttattcatgaacactgaaaaaaaaaaaaaaaaa

SEQ ID NO: 3180 - DNA, 3146 bp, Homo Sapiens
  NM_007171
acgcgcgctgctgcccgtctggccccgcaggctcggtgaatcgaacgttgagcagggcggtgggtggtgcggagtgccgagcggcctcacccccaaccgtcggcccagtcggacggttccgaggcgttgccgggagccgggcgcggctctgtgtggactcggagaaacgcggggcgtctgcctgagcccgcttttctacaagatgtggggatttttgaagcgccctgtagtggtgacggctgacatcaacttgagccttgtggccctgactgggatggggttactgagccggctgtggcgactcacctacccgcgggctgtggtttttgacgaagtatattatgggcagtacatctctttttacatgaaacaaatcttcttcttggatgacagtgggccgccatttggccacatggtgctggccttgggaggttatttaggaggattcgatggcaattttttgtggaacagaattggagcagaatacagtagcaacgtgcctgtgtggtccctgcgcctgctgccagcactcgcgggggccttgtcggtccccatggcctaccagatagtgttggagctccacttttctcattgtgccgccatgggagctgctctgttgatgcttatcgagaatgctctcatcactcagtcaaggctaatgcttttggaatcagtgttaatatttttcaatctattggccgtgttgtcctacctgaagttcttcaactgccaaaagcacagccctttttctctgagctggtggttctggctaacactgacaggggtcgcttgttcctgtgcagtgggcatcaagtacatgggtgtgttcacgtacgtgctcgtgctgggtgttgcagctgtccatgcctggcacctgcttggagaccagactttgtccaatgtaggtgctgatgtccagtgctgcatgaggccggcctgtatggggcagatgcggatgtcacagggggtctgtgtgttctgtcacttgctcgcccgagcagtggctttgctggtcatcccggtcgtcctgtacttactgttcttctacgtccacttgattctagtcttccgctctgggccccacgaccaaatcatgtccagtgccttccaggccagcttagagggaggactagctcggatcacccagggtcagccactggaggtggcctttgggtcccaggtcactctgaggaacgtctttgggaaacctgtgccctgctggcttcattcccaccaggacacctaccccatgatatatgagaacggccgaggcagctcccaccagcaacaggtgacctgttaccccttcaaagacgtcaataactggtggattgtaaaggatcccaggaggcaccagctggtggtgagcagccctccgagacctgtgaggcacggggacatggtgcagctggtccacggcatgaccacccgctccctgaacacgcatgatgttgcagcccccctgagcccccattcacaggaggtctcctgctacattgactataacatctccatgcccgcccagaacctctggagactggaaattgtgaacagaggatctgacacagacgtctggaagaccatcctctcagaggtccgctttgtgcacgtgaacacttccgctgtcttaaagctgagcggggctcacctccctgactgggggtatcggcaactggagatcgtcggggagaagctgtcccggggctaccacgggagcacggtgtggaacgtggaggagcaccgatacggcgcgagccaggagcagagggagcgggaacgggagctgcactcacctgcgcaggtggacgtcagcaggaacctcagcttcatggcgagattctcggagctgcagtggaggatgctggcgctgagaagtgatgactcggaacacaagtacagctccagcccactggagtgggtcaccctggacaccaatattgcctactggctgcaccccaggaccagcgctcagatccacctacttggaaacatagtgatctgggtttcgggcagcctcgctctggccatctacgccctgctgtccttgtggtacctgctccgacggcgaagaaatgtccatgacctccctcaggatgcctggctgcgctgggtgctggctggggcgctgtgtgccggtggctgggcagtgaactacctcccgttcttcctgatggagaagacactcttcctctaccactacctgcccgcactcaccttccaaatccttctgctccctgtggtcctgcagcacatcagcgaccacctgtgcaggtcccagctccagaggagcatcttcagcgccctggtggtggcctggtactcctccgcgtgccacgtgtccaacacgctgcgcccactcacctacggggacaagtcactctcgccacatgaactcaaggcccttcgctggaaagacagctgggacatcttgatccgaaaacactagaacaagagtgtggcaaagaacacccgtgctggggtcgggatgaggttgaagggtcttggtcaatgtacgtaatgagcagggtgggccccacgctgggaggacacgggctgggctgagcagggcctctagtggaacacatgggggtctcattgaaaagctctctgatgagcacctccttttgtgcaaagttaattttttctcgacaataaagatattccgtgtctttacccctgaactaagacacagggagtatttcagaggccagcgtaggagtcattgacaacaaaaagccgagaacccagggccagcagtggagcctcagcagaccagggcctggtccttgctaactgctgcagggtggagtttgatctggcagacccgatcctccttcatgaacacccagcaacctgagcaagtcccggccctgccctcagcgagcccggcaggcgtcctgggacagctcagtgttggagggccacctgaaccacgagccagggctggggcttgcatgtcattgtctatgacagcgtcaagactggcccttggcaccgtgctgtgtggaaaccctcccctctgagactccactgagacgtggctgagtgaaatcttcctcgtcagtggtcaaggtgtgtcatccatacagctccatgcctttgtcttttttaaatgtaattaaaaaaggaaccaactggcgtttgta

SEQ ID NO: 3181 - DNA, 3806 bp, Homo Sapiens
  NM_007173
gcggcttccccgaggccggaggcggggcgggcgggcctcgggtggcgcggggggcggacccgccagctgcctgcgctgctcgccagcttgctcgcactcggctgtgcggcggggcaggcatgggagccgcgcgctctctcccggcgcccacacctgtctgagcggcgcagcgagccgcggcccgggcgggctgctcggcgcggaacagtgctcggcatggcagggattccagggctcctcttccttctcttctttctgctctgtgctgttgggcaagtgagcccttacagtgccccctggaaacccacttggcctgcataccgcctccctgtcgtcttgccccagtctaccctcaatttagccaagccagactttggagccgaagccaaattagaagtatcttcttcatgtggaccccagtgtcataagggaactccactgcccacttacgaagaggccaagcaatatctgtcttatgaaacgctctatgccaatggcagccgcacagagacgcaggtgggcatctacatcctcagcagtagtggagatggggcccaacaccgagactcagggtcttcaggaaagtctcgaaggaagcggcagatttatggctatgacagcaggttcagcatttttgggaaggacttcctgctcaactaccctttctcaacatcagtgaagttatccacgggctgcaccggcaccctggtggcagagaagcatgtcctcacagctgcccactgcatacacgatggaaaaacctatgtgaaaggaacccagaagcttcgagtgggcttcctaaagcccaagtttaaagatggtggtcgaggggccaacgactccacttcagccatgcccgagcagatgaaatttcagtggatccgggtgaaacgcacccatgtgcccaagggttggatcaagggcaatgccaatgacatcggcatggattatgattatgccctcctggaactcaaaaagccccacaagagaaaatttatgaagattggggtgagccctcctgctaagcagctgccagggggcagaattcacttctctggttatgacaatgaccgaccaggcaatttggtgtatcgcttctgtgacgtcaaagacgagacctatgacttgctctaccagcaatgcgatgcccagccaggggccagcgggtctggggtctatgtgaggatgtggaagagacagcagcagaagtgggagcgaaaaattattggcattttttcagggcaccagtgggtggacatgaatggttccccacaggatttcaacgtggctgtcagaatcactcctctcaaatatgcccagatttgctattggattaaaggaaactacctggattgtagggaggggtgacacagtgttccctcctggcagcaattaagggtcttcatgttcttattttaggagaggccaaattgttttttgtcattggcgtgcacacgtgtgtgtgtgtgtgtgtgtgtgtgtaaggtgtcttataatcttttacctatttcttacaattgcaagatgactggctttactatttgaaaactggtttgtgtatcatatcatatatcatttaagcagtttgaaggcatacttttgcatagaaataaaaaaaatactgatttggggcaatgaggaatatttgacaattaagttaatcttcacgtttttgcaaactttgatttttatttcatctgaacttgtttcaaagatttatattaaatatttggcatacaagagatatgaattcttatatgtgtgcatgtgtgttttcttctgagattcatcttggtggtgggtttttttgtttttttaattcagtgcctgatctttaatgcttccataaggcagtgttcccatttaggaactttgacagcatttgttaggcagaatattttggatttggaggcatttgcatggtagtctttgaacagtaaaatgatgtgttgactatactgatacacatattaaactataccttatagtaaaccagtatcccaagctgcttttagttccaaaaatagtttcttttccaaaggttgttgctctactttgtaggaagtctttgcatatggccctcccaactttaaagtcataccagagtggccaagagtgtttatcccaacccttccatttaacaggatttcactcacatttctggaactagctatttttcagaagacaataatcagggcttaattagaacaggctgtatttcctcccagcaaacagttgtggccacactaaaaacaatcatagcattttacccctggattatagcacatctcatgttttatcatttggatggagtaatttaaaatgaattaaattccagagaacaatggaagcattgcctggcagatgtcacaacagaataaccacttgtttggagcctggcacagtcctccagcctgatcaaaaattattctgcatagttttcagtgtgctttctgggagctatgtacttcttcaatttggaaacttttctctctcatttatagtgaaaatacttggaagttactttaagaaaaccagtgtggcctttttccctctagctttaaaagggccgcttttgctggaatgctctaggttatagataaacaattaggtataatagcaaaaatgaaaattggaagaatgcaaaatggatcagaatcatgccttccaataaaggcctttacacatgttttatcaatatgattatcaaatcacagcatatacagaaaagacttggacttattgtatgtttttattttatggctctcggcctaagcacttctttctaaatgtatcggagaaaaaatcaaatggactacaagcacgtgtttgctgtgcttgcaccccaggtaaacctgcattgtagcaatttgtaaggatattcagatggagcactgtcacttagacattctctgggggattttctgcttgtctttcttgagctttttggaaggataattctgataaggcactcaagaaacgtacaaccacagtgctttcttcaaatcatatgagaaatactatgcatagcaaggagatgcagagccgccaggaaaattctgagttccagcacaattttctttggaatctaacaggaatctagcctgaggaagaagggaggtctccatttctatgtctggtatttgggggttttgtttgtttttgctttagcttggtgaaaaaaagttcactgaacaccaagaccagaatggatttttttaaaaaaatagatgttccttttgtgaagcaccttgattccttgattttgattttttgcaaagttagacaatggcacaaagtcaaaatgaaatcaatgtttagttcacaagtagatgtaatttactaaagaatgatacacccatatgctatatacagcttaactcacagaactgtaaaagaaaattataaaataattcaacatgtccatctttttagtgataataaaagaaagcatggtattaaactatcatagaagtagacagaaaaagaaaaaaggactcatggcattattaatataattagtgctttacatgtgttagttatacatattagaagcatatttgcctagtaaggctagtagaaccacatttcccaaagtgtgctccttaaacactcatgccttatgattttctaccaaaagtaaaaagggttgtattaagtcagaggaagatgcctctccattttccctctctttatcagaggttcacatgcctgtctgcacattaaaagctctgggaagacctgttgtaaagggacaagttgaggttgtaaaatctgcatttaaataaacatctttgatcacaaaa

SEQ ID NO: 3182 - DNA, 1968 bp, Homo Sapiens
  NM_007182
tctcctcagctccttcccgccgcccagtctggatcctgggggaggcgctgaagtcggggcccgccctgtggccccgcccggcccgcgcttgctagcgcccaaagccagcgaagcacgggcccaaccgggccatgtcgggggagcctgagctcattgagctgcgggagctggcacccgctgggcgcgctgggaagggccgcacccggctggagcgtgccaacgcgctgcgcatcgcgcggggcaccgcgtgcaaccccacacggcagctggtccctggccgtggccaccgcttccagcccgcggggcccgccacgcacacgtggtgcgacctctgtggcgacttcatctggggcgtcgtgcgcaaaggcctgcagtgcgcgcattgcaagttcacctgccactaccgctgccgcgcgctcgtctgcctggactgttgcgggccccgggacctgggctgggaacccgcggtggagcgggacacgaacgtggacgagcctgtggagtgggagacacctgacctttctcaagctgagattgagcagaagatcaaggagtacaatgcccagatcaacagcaacctcttcatgagcttgaacaaggacggttcttacacaggcttcatcaaggttcagctgaagctggtgcgccctgtctctgtgccctccagcaagaagccaccctccttgcaggatgcccggcggggcccaggacggggcacaagtgtcaggcgccgcacttccttttacctgcccaaggatgctgtcaagcacctgcatgtgctgtcacgcacaagggcacgtgaagtcattgaggccctgctgcgaaagttcttggtggtggatgacccccgcaagtttgcactctttgagcgcgctgagcgtcacggccaagtgtacttgcggaagctgttggatgatgagcagcccctgcggctgcggctcctggcagggcccagtgacaaggccctgagctttgtcctgaaggaaaatgactctggggaggtgaactgggacgccttcagcatgcctgaactacataacttcctacgtatcctgcagcgggaggaggaggagcacctccgccagatcctgcagaagtactcctattgccgccagaagatccaagaggccctgcacgcctgcccccttgggtgacctcttgtacccccaggtggaaggcagacagcaggcagcgccaagtgcgtgccgtgtgagtgtgacagggccagtggggcctgtggaatgagtgtgcatggaggccctcctgtgctgggggaatgagcccagagaacagcgaagtagcttgctccctgtgtccacctgtgggtgtagccaggtatggctctgcacccctctgccctcattactgggccttagtgggccagggctgccctgagaagctgctccaggcctgcagcaggagtggtgcagacagaagtctcctcaatttttgtctcagaagtgaaaatcttggagaccctgcaaacagaacagggtcatgtttgcaggggtgacggccctcatctatgaggaaaggttttggatcttgaatgtggtctcaggatatccttatcagagctaagggtgggtgctcagaataaggcaggcattgaggaagagtcttggtttctctctacagtgccaactcctcacacaccctgaggtcagggagtgctggctcacagtacagcatgtgccttaatgcttcatatgaggaggatgtccctgggccagggtctgtgtgaatgtgggcactggcccaggttcataccttatttgctaatcaaagccagggtctctccctcaggtgttttttatgaagtgcgtgaatgtatgtaatgtgtggtggcctcagctgaatgcctcctgtggggaaaggggttggggtgacagtcatcatcagggcctggggcctgagagaattggctcaataaagatttcaagatcctcaaaaaaaaaaaaaaaaaaa

SEQ ID NO: 3183 - DNA, 5252 bp, Homo Sapiens
  NM_007184
aggcggggccaagatggcggcgcagcgcgcggcgggggcgacgggcggcgggggccggggggcggtgggacgttgaccccgccccctgctgctgctagtctgcgccgggcggcggtggcggcggagacccgaacatggcgaccgcgcgcaccttcgggcccgagcgggaagccgagccggccaaggaagcgcgcgtcgtgggctcggagcttgtggacacttatacggtttacatcatccaggtcactgatggcagccatgagtggacagtaaagcaccgctacagcgacttccatgacctgcatgaaaagctcgttgcagagagaaagattgataaaaatctgcttccgcccaaaaagataattgggaaaaactcaagaagcttggtggagaagagggagaaggatctggaggtctacctccagaagctcctggctgccttccctggcgtgacccccagagtactggcccacttcttgcattttcacttctatgagataaatggcatcaccgcggcactggctgaagagctctttgagaaaggagaacagctcctgggggccggcgaggtctttgccattggacccctgcagctgtatgccgtcacggagcagctgcagcagggaaagcccacgtgcgccagtggggatgccaagaccgacctcgggcacatcctggacttcacctgtcgccttaagtaccttaaggtttctggcacagaaggaccttttgggaccagcaacattcaggagcagctcctgccgttcgacctatcaatattcaagtccctgcatcaggtggagataagtcactgtgatgctaagcacatcagagggctggtcgcatcgaagcccaccttagccacgctgagtgtccgcttctcagcaacctcgatgaaggaagtccttgttcctgaagcctcagaatttgatgagtgggagcctgaaggcacaaccctagaaggccctgtgactgccgtcatccccacttggcaggcattgaccacgcttgacctgagccacaacagcatctccgagatcgacgagtctgtgaaactgatcccaaagattgagttcctggacctgagtcacaatggattgctggttgtggacaatctgcagcacctgtataaccttgtgcatctggacctgtcctacaacaagctctcctccttggaagggcttcacaccaagctggggaacatcaagaccttaaacctggcaggcaacctcctagagagtctgagtggcctgcacaagctctactcactggtcaacctggatctccgggacaacaggatcgaacagatggaggaggtccggagcataggcagcctcccgtgtctggagcacgtgtctctgctgaacaaccctctgagcatcatccccgactaccggaccaaggtgctggctcagttcggagagagggcctcagaggtctgtctggatgacacagtgaccacagagaaggagctggacactgtggaagtgctgaaagcaattcagaaagccaaggaggtcaagtccaaactgagcaacccagagaagaagggtggtgaagactcccggctctcagctgccccctgcatcagacccagcagctcccctcccactgtggctcccgcatctgcctccctgccccagcccatcctctctaaccaaggaatcatgttcgttcaggaggaggccctggccagcagcctctcgtccactgacagtctgactcccgagcaccagcccattgcccagggatgttctgattccttggagtccatccctgcgggacaggcagcttccgatgatttaagggacgtgccaggagctgttggtggtgcaagcccagaacatgccgagccggaggtccaggtggtgccggggtctggccagatcatcttcctgcccttcacctgcattggctacacggccaccaatcaggacttcatccagcgcctgagcacactgatccggcaggccatcgagcggcagctgcctgcctggatcgaggctgccaaccagcgggaggagggccagggtgaacagggcgaggaggaggatgaggaggaggaagaagaggaggacgtggctgagaaccgctactttgaaatggggcccccagacgtggaggaggaggagggaggaggccagggggaggaagaggaggaggaagaggaggatgaagaggccgaggaggagcgcctggctctggaatgggccctgggcgcggacgaggacttcctgctggagcacatccgcatcctcaaggtgctgtggtgcttcctgatccatgtgcagggcagtatccgccagttcgccgcctgccttgtgctcaccgacttcggcatcgcagtcttcgagatcccgcaccaggagtctcggggcagcagccagcacatcctctcctccctgcgctttgtcttttgcttcccgcatggcgacctcaccgagtttggcttcctcatgccggagctgtgtctggtgctcaaggtacggcacagtgagaacacgctcttcattatctcggacgccgccaacctgcacgagttccacgcggacctgcgctcatgctttgcaccccagcacatggccatgctgtgtagccccatcctctacggcagccacaccagcctgcaggagttcctgcgccagctgctcaccttctacaaggtggctggcggctgccaggagcgcagccagggctgcttccccgtctacctggtctacagtgacaagcgcatggtgcagacggccgccggggactactcaggcaacatcgagtgggccagctgcacactctgttcagccgtgcggcgctcctgctgcgcgccctctgaggccgtcaagtccgccgccatcccctactggctgttgctcacgccccagcacctcaacgtcatcaaggccgacttcaaccccatgcccaaccgtggcacccacaactgtcgcaaccgcaacagcttcaagctcagccgtgtgccgctctccaccgtgctgctggaccccacacgcagctgtacccagcctcggggcgcctttgctgatggccacgtgctagagctgctcgtggggtaccgctttgtcactgccatcttcgtgctgccccacgagaagttccacttcctgcgcgtctacaaccagctgcgggcctcgctgcaggacctgaagactgtggtcatcgccaagacccccgggacgggaggcagcccccagggctcctttgcggatggccagcctgccgagcgcagggccagcaatgaccagcgtccccaggaggtcccagcagaggctctggccccggccccagcggaagtcccagctccagcccctgcagcagcctcagcctcaggcccagcgaagactccggccccagcagaggcctcaacttcagctttggtcccagaggagacgccagtggaagctccagccccacccccagccgaggcccctgcccagtacccgagtgagcacctcatccaggccacctcggaggagaatcagatcccctcgcacttgcctgcctgcccgtcgctccggcacgtcgccagcctgcggggcagcgccatcatcgagctcttccacagcagcattgctgaggttgaaaacgaggagctgaggcacctcatgtggtcctcggtggtgttctaccagaccccagggctggaggtgactgcctgcgtgctgctctccaccaaggctgtgtactttgtgctccacgacggcctccgccgctacttctcagagccactgcaggatttctggcatcagaaaaacaccgactacaacaacagccctttccacatctcccagtgcttcgtgctaaagcttagtgacctgcagtcagtcaatgtggggcttttcgaccagcatttccggctgacgggttccaccccgatgcaggtggtcacgtgcttgacgcgggacagctacctgacgcactgcttcctccagcacctcatggtcgtgctgtcctctctggaacgcacgccctcgccggagcctgttgacaaggacttctactccgagtttgggaacaagaccacagggaagatggagaactacgagctgatccactctagtcgcgtcaagtttacctaccccagtgaggaggagattggggacctgacgttcactgtggcccaaaagatggctgagccagagaaggccccagccctcagcatcctgctgtacgtgcaggccttccaggtgggcatgccaccccctgggtgctgcaggggccccctgcgccccaagacactcctgctcaccagctccgagatcttcctcctggatgaggactgtgtccactacccactgcccgagtttgccaaagagccgccgcagagagacaggtaccggctggacgatggccgccgcgtccgggacctggaccgagtgctcatgggctaccagacctacccgcaggccctcaccctcgtcttcgatgacgtgcaaggtcatgacctcatgggcagtgtcaccctggaccactttggggaggtgccaggtggcccggctagagccagccagggccgtgaagtccagtggcaggtgtttgtccccagtgctgagagcagagagaagctcatctcgctgttggctcgccagtgggaggccctgtgtggccgtgagctgcctgtcgagctcaccggctagcccaggccacagccagcctgtcgtgtccagcctgacgcctactggggcagggcagcaggcttttgtgttctctaaaaatgttttatcctccctttggtaccttaatttgactgtcctcgcagagaatgtgaacatgtgtgtgtgttgtgttaattctttctcatgttgggagtgagaatgccgggcccctcagggctgtcggtgtgctgtcagcctcccacaggtggtacagccgtgcacaccagtgtcgtgtctgctgttgtgggaccgttgttaacacgtgacactgtgggtctgactttctcttctacacgtcctttcctgaagtgtcgagtccagtcctttgttgctgttgctgttgctgttgctgttgctgttgctgttggcatcttgctgctaatcctgaggctggtagcagaatgcacattggaagctcccaccccatattgttcttcaaagtggaggtctcccctgatccagacaagtgggagagcccgtgggggcaggggacctggagctgccagcaccaagcgtgattcctgctgcctgtattctctattccaataaagcagagtttgacaccgtctgcaaaaaaaaaaaaaa

SEQ ID NO: 3184 - DNA, 8341 bp, Homo Sapiens
  NM_007186
cccggggcccgcttgcctcagcttcttgctgccgccagcacgctaagctccagtcggcgccgaaggagagcttcccgaccctcgtgtccagtagccgcaatcccaggctgggagggtgaggcgccgcgctctgccgcccccccgcccctcgctccctgtgtcctggcggatttgcacgtaatctatccgaaagcccagtcccacccgccacccgactctggagctcccattcttcaggaccctgctgaagtatcgcttctcagccgccttctccaggcgcagctgcattcgcttctcggtttttgcactcgctgtgcaccgagttactttcccggcccctcgttgacaccgttcacaggtggctgttggtctttagtaagggtgctgtcttccctgtctgatccttagcaaaagtaggaaggtagagttgttggcagaaatcctgggataagagaatagtttcctggaagatctgtgcctccaaccagcagagagggattgagcttcattgaactcaacagagccaacatttcatagcaccatgttcaagaggaggttgaagtggcatggcaatggttagagaccctgctgggcgtgaacaccctctggctacctagggacctgtgggcctaccacctggtgccctcatggagacaagaagccctgggttgaacaacatgaagccccagtcactgcagctggtactggaagagcaggtgctggcactacagcagcagatggcagagaatcaggcagcctcctggcggaagctgaagaactcccaggaggcccagcagagacaagcaacccttgtgaggaagctgcaggccaaggtgctgcagtaccgaagctggtgccaagagctggagaagcggctagaagccactggaggaccaatcccccagaggtgggaaaatgtggaggagccaaacctggatgagctgctggtccgattggaggaggagcaacagaggtgtgagagtctagcagaggtgaacacccagcttcgactgcacatggaaaaagctgacgtggtgaataaagcccttagggaagatgtggaaaaactgacagtggactggagccgggcccgggatgagctaatgaggaaggagagccagtggcagatggagcaggagttcttcaagggctacctgaaaggggagcacggtcgccttctcagtctatggcgggaggttgtgacattccgacgccacttcctggaaatgaagtcagctactgacagagatctgatggagctaaaagctgagcatgtgaggctttcagggtctctgttgacctgttgtctgcgcttgactgtgggagcacagtctcgggaacccaacggatctggaagaatggatgggcgggagccggcccagctgctgctgctactagccaagacccaggagctggagaaggaagcccatgaaaggagccaggagttaatacagctgaagagtcaaggggatctggagaaggctgaacttcaggaccgggtgaccgagctctctgctctgttgacccagtctcagaagcaaaatgaagattatgaaaagatgataaaggctctgagagagacagtggagatcctggagacaaatcacacagaattaatggaacatgaagcatctcttagtaggaatgcgcaagaggagaagttgtctttacagcaggtgatcaaggatataacccaggtcatggtggaagaaggggacaatatagcccaaggctctggtcatgagaactctttggaattggactctagtatcttctcccagtttgattaccaggatgcagacaaggctcttactctggtgcgttcagtgctgactcggagacgccaggctgtgcaggacctaaggcagcagcttgcaggctgtcaagaggctgtgaacttgttgcaacagcagcatgatcagtgggaggaagagggcaaagccttgagacagcggctgcagaagctcactggggagcgggacactctggcagggcagactgtggacctccagggagaggtggactctctcagcaaggagcgagagctgctgcagaaggccagggaagagctgcggcagcagctggaggtgctagagcaggaggcatggcgcctgcgaagggtaaatgtggagcttcagctgcagggggactctgcccagggccagaaggaggaacagcaggaggagctgcacctggctgtccgggagagggagcgtcttcaggagatgctgatgggcctggaagccaaacagtcagaatcactcagtgaactgatcactcttcgggaagccctggagtcaagtcacctggaaggggagttactgaggcaagagcaaacggaagtgaccgcagcgctggctagggcagagcagtcaattgcagagctgtcgagttctgaaaacaccctgaagacagaagtagctgatcttcgggctgcagctgtcaagctcagtgccttaaatgaggctttggcgttagataaagttgggctgaaccagcagcttctccagttagaggaggagaaccagtctgtgtgcagcagaatggaggccgcagagcaggcgagaaatgctttgcaggtcgacctggcggaggcagagaagaggagggaagccctgtgggaaaagaacactcacctggaggctcagctgcagaaagctgaggaggctggggctgagctgcaggcagatctcagggacatccaagaagagaaggaagaaattcaaaagaaactaagtgagtcacgtcaccagcaggaggcagccacgactcagctggagcagctacatcaggaggcaaagcgacaggaagaagtgcttgccagggcagtccaggagaaggaggccctagtacgagagaaagcggctctagaggtgcggctgcaggccgtggagcgtgaccggcaggacctcgctgaacaactacaggggctcagctcagccaaggagctactggagagcagtctgtttgaagcccaacaacaaaattctgtgatagaggtcaccaaggggcagctggaggtccagattcaaactgtcactcaagccaaggaagtaatccaaggggaagtgaggtgcctgaagctggaactggacactgaacggagtcaggcagagcaggagcgggatgctgcagccagacagctggcccaggctgagcaagaagggaagactgccttggagcagcagaaggcagcccatgagaaagaggtgaaccagctccgggagaaatgggagaaggagcgctcctggcaccagcaggagctggcaaaggctctggagagcttagaaagggaaaaaatggagctggaaatgaggctaaaggagcagcagacagaaatggaggccatccaggcccagagggaagaagaacggacccaggcagagagtgccctatgccagatgcagctggaaacagagaaggagagagtatccctcctggagacactgctgcagacgcagaaggagctagcagatgccagccaacaactggaacgactgaggcaggacatgaaagtccagaaattaaaggagcaggagaccactgggatactacagacccagctccaggaggctcaacgggagctgaaggaggcagcccggcagcacagagatgaccttgctgccctccaagaagagagcagctccctgctgcaggataagatggacctgcagaagcaggtggaggacttgaagtctcagctggtggcccaggatgactcccagaggctggtggagcaggaggttcaggagaagctgagagagacccaggagtataaccgaattcagaaggagctggagagagagaaagccagcctgactctgtcactgatggaaaaggaacagagactccttgttttacaagaagctgactctattcgacaacaagagctgagtgccctgcgccaggacatgcaggaggcccagggagaacagaaagagctcagtgctcagatggaattactaaggcaagaggtgaaggaaaaggaggctgactttctggcccaggaagcacagctgctggaggagctggaggcgtctcatatcacggagcagcagctgcgagcctccttgtgggcccaggaagccaaggcagcccaactacagctgcgactgcgcagcacagagagccagctagaagcgctggccgcagagcagcagcccgggaaccaggcccaggcccaggcccagctggccagcctctactctgccctgcagcaggccctggggtctgtttgtgagagcaggcctgagctgagtggtgggggagactctgctccttccgtctggggccttgagccagaccagaatggagctaggagcctctttaagagagggcccctgctgactgctctctccgctgaggcagtagcatctgccctccacaagcttcatcaagacctgtggaagactcaacagacccgggatgttctgagggatcaggtccagaaactggaagagcgtctaactgatactgaggctgagaagagccaggtccacacagagttgcaggatctgcagagacagctctcccagaatcaggaagagaaatccaagtgggaaggaaagcagaactccctagaatctgagctgatggaactacatgaaactatggcatccttacagagtcgcctgcggagagcagagctacagcgaatggaagcccagggtgagcgagagttacttcaggcagccaaggagaacctgacagcccaggtggaacacctgcaagcagctgtcgtagaagccagggctcaggcaagtgctgctggcatcctggaagaagacctgagaacggctcgctcagcactgaagctgaaaaatgaggaagtagagagtgagcgtgagagagcccaggctctgcaagagcagggcgaactgaaggtggcccaagggaaggctctgcaagagaatttggccctcctgacccagaccctagctgaaagagaagaggaggtggagactctgcggggacaaatccaggaactggagaagcaacgggaaatgcagaaggctgctttggaattgctgtctctggacctgaagaagaggaaccaagaggtagatctgcagcaagaacagattcaggagctagagaagtgtaggtctgttttagagcatctgcccatggccgtccaggagcgagagcagaagctgactgtgcagagggagcagatcagagagctcgagaaggatcgggagactcagaggaacgtcttggagcatcagcttctagaacttgagaagaaagaccaaatgattgagtcccagagaggacaggttcaggacctgaaaaagcagttggttactctggaatgcctggccctggaactggaggaaaaccatcacaagatggagtgccagcaaaaactgatcaaggagctggagggccagagggaaacccagagagtggctttgacccaccttacgctggacctagaagaaaggagccaggagctgcaggcacaaagcagccagatccatgacctggagagccacagcaccgttctggcaagagagctgcaggagagggaccaggaggtgaagtctcagcgagaacagatcgaggagctgcagaggcagaaagagcatctgactcaggatctcgagaggagagaccaggagctgatgctgcagaaggagaggattcaggttctcgaggatcagaggacccggcagaccaagatcctggaggaggacctggaacagatcaagctgtccttgagagagcgaggccgggagctgaccactcagaggcagctgatgcaggaacgggcagaggaagggaagggcccaagtaaagcacagcgcgggagcctagagcacatgaagctgatcctgcgtgataaggagaaggaggtggaatgtcagcaggagcatatccatgaactccaggagctcaaagaccagctggagcagcagctccagggcctgcacaggaaggtaggtgagaccagcctcctcctgtcccagcgagagcaggaaatagtggtcctgcagcagcaactgcaggaagccagggaacaaggggagctgaaggagcagtcacttcagagtcaactggatgaggcccagagagccctagcccagagggaccaggaactggaggctctgcagcaagaacagcagcaggcccagggacaggaggagagggtgaaggaaaaggcagacgccctccagggagctctggagcaagcccatatgacactgaaggagcgtcatggagagcttcaggaccacaaggaacaggcacgaaggctggaggaagagctggcagtggagggacggcgggtccaggccctggaggaggtgctgggagacctaagggctgagtctcgggaacaggagaaagctctgttggccctccagcagcagtgtgctgagcaggcacaggagcatgaggtggagaccagggccctgcaggacagctggctgcaggcccaggcagtgctcaaggaacgggaccaggagctggaagctctgcgggcagaaagtcagtcctcccggcatcaggaggaggctgcccgggcccgggctgaggctctgcaggaggcccttggcaaggctcatgctgccctgcaggggaaagagcagcatctcctcgagcaggcagaattgagccgcagtctggaggccagcactgcaaccctgcaagcctccctggatgcctgccaggcacacagtcggcagctggaggaggctctgaggatacaagaaggtgagatccaggaccaggatctccgataccaggaggatgtgcagcagctgcagcaggcacttgcccagagggatgaagagctgagacatcagcaggaacgggagcagctgctggagaagtctctggcccagagggtccaagagaatatgatccaagagaagcagaatctggggcaagagagagaagaggaggagataaggggccttcatcagagtgtaagggagctacagctgactctagcccaaaaggaacaggagattctggagctgagggagacccagcaaaggaacaacctggaagccttaccccacagccacaaaacctccccaatggaggaacaatctctaaaacttgattctttagagcccaggctgcagcgggagctggagcggctacaggcagccctgagacagacagaagccagggagattgagtggagggagaaggcccaggacttggcactctccctagcgcagaccaaggccagtgtcagcagtctgcaggaggtagccatgttcctacaagcctctgtcctggagcgggactcagaacagcaaaggctgcaggatgaactggagctcaccagacgggctctggagaaggagcggctacacagcccaggtgcaaccagcacagcagaactggggtccagaggggagcagggtgtgcagctgggagaggtctcaggagtggaggctgagcctagtcctgatggaatggagaagcagtcatggagacaaaggcttgaacacctgcagcaagcagtggcccggctggagattgacaggagcaggctgcagcgccacaatgtccagctgcggagtaccttggagcaggtggagcgagaacggaggaagctgaagagggaggccatgcgtgcggcccaggcagggtccctagagatcagcaaggccacggcttcttcacccacacagcaggatgggagaggacagaagaactcagatgccaagtgtgtggctgaactgcagaaagaggtggtcctgctgcaagctcagctgactttggagcggaagcagaagcaggactacatcacccgctcagcacagaccagccgtgagctagcaggcctgcaccacagcctctcacactcacttcttgccgtggcccaggcccctgaggccactgtcctggaggcagagacccgcaggctggatgagtccctgactcaaagtctgacatccccagggccagtcctgctacaccccagccccagcactacccaagccgcctccaggtagcagccacagccaggagcacacagacagaagactgtgtcatgggtcatggcccctccgcacacctacaggtttgccaaaggaaaagcctggctctgttaggcacccaggagccccaggtcggcgggtgttcccaggaagaggaagtaaatctgcaaccctggggaggaccccaactcacctgggaatgaggcaaattgcatttgcttgctccctatggaatcacccagaggggtgccttgccctggctgagggacatgtactgcctctcatctagaatttattttcctagcacttcaccacctccttcatcttctccttcaacaataaaccctgagatctttgcattcaaaaaaaaaaaaaaaaaa

SEQ ID NO: 3185 - DNA, 2354 bp, Homo Sapiens
  NM_007187
tcggagggaggttcgggtgggcatcgggcggctggaagagctcgactcgtcccgctgggaaagcgcgagtctgagtggaaccctggacgacttgcagagcggctggcgcagtcatggcggactactggaagtcacagccaaagaaattctgtgattactgcaagtgctggatagcagacaataggcctagtgttgaatttcatgaaagaggaaagaatcataaggaaaatgtggcaaaaaggatcagtgagattaaacagaaaagcctggataaggcaaaggaagaagaaaaggcatcaaaggagtttgctgcaatggaggcagctgccctgaaagcataccaagaggatttgaaaagacttggcttagagtcagaaattttggagccaagcataacaccagtaaccagcactatcccacctacctcgacatcaaatcaacagaaagaaaagaaagaaaagaagaaaagaaaaaaagatccttcaaagggcagatgggtagaaggcataacctctgagggttaccattactattatgatcttatctcaggagcatctcagtgggagaaacctgaaggatttcaaggagacttaaaaaagacagcagtgaagaccgtttgggtagaaggtttaagtgaagatggttttacctattactataatacagaaacaggagaatccagatgggagaaacctgatgatttcattccacacactagtgatctgccttctagtaaggtcaatgaaaattcacttggcaccctagatgaatccaaatcatcagattcgcatagtgattctgatggggaacaggaagcagaagaaggaggggtctctacagagacagaaaagccaaaaataaagtttaaggaaaaaaataaaaatagtgatggaggaagtgacccagaaacacagaaagaaaaaagtattcagaaacagaattcattaggttcaaatgaagaaaaatcgaaaactcttaagaaatcaaacccatatggagaatggcaagaaattaaacaagaggttgagtctcatgaggaggtagatttggaacttccaagcactgaaaatgagtatgtatcaacttcagaagctgatggtggcggagaacccaaagtggtatttaaagaaaaaacagtcacttctcttggagttatggcagatggagtggccccagtcttcaaaaagagaagaactgaaaatggaaaatctagaaatttaaggcaacgaggtgatgatcaatagttgcaggagagctttttgtacatgcttttaggacagaatggagacttatacacccaaagtttatctgtgtttgtttgtaagtattatgatgctaaaaatttagatttattctaaatgtatttgatgtgaattaaaataaatattttttcatgtgaaatttattttggttcctaaaatggaagcctaccacattgcattgtaatacagtgtattatgttcagtgtctaaaaactgctaattaagtcataatttaagatgctatgtatctgttatttaaaacatggagaaacagggcctttattccattcatattcataagagcatatttatcctgcattgaaaatgcattacttttgcacattgatattaactgttgtccaacaaataagtatcggagtacgtgagaatattcccagcccagtgatgatttggttctgaggctgatgtgagaaagctgatgtaaaaaatgtatgcatattggcttaccttactcaatttaaagtcaaaagccaacagccaggagcagctcaggtacttcagatgtgcttaatatggagtgaaaactggaccagaggtggaaagatgtatttgccccagttcacttcaaagcagcaaacgttgtttaagcattttagtttgaaccaggcattgtgttaggaatccagggataaagatgaatgaaatgtatttctgttcttcaggagttcacattctagcatatgccttttttcccccagtcatgcactctttttagcagtcttatatgtactagaaaagattttttaaagtttatttaaagctgtgtagatgaaggcttgatctaaaatagtataaggtctccagcttcagtaaaagtttttagtgtttacttaaattagtaatttctcactttctgtctggttaaaatgtcttaaaaagtagaattttcttctttaatccgtttagtagttacctcccttttacttttcaaattcacaaaattacatttctcataaattgtatagtatttaacttataatagttaatatttgtctttttaagatgactgtacatgtaagaaaaaagcttattaaaaacttgatcaaagaaaaaaaaaaaaaaaaaaaaaaa

SEQ ID NO: 3186 - DNA, 3552 bp, Homo Sapiens
  NM_007189
tgagccggccgcacgcggaggatcctaaggagcagctctgttgcgacataggccgagcagcgaggcccagctccctgaaacaacagtaacctacccctgtgggtcatcatcatgccctccgacctggccaagaagaaggcagccaaaaagaaggaggctgccaaagctcgacagcggcccagaaaaggacatgaagaaaatggagatgttgtcacagaaccacaggtggcagagaagaatgaggccaatggcagagagaccacagaagtagatttgctgaccaaggagctagaggactttgagatgaagaaagctgctgctcgagctgtcactggcgtcctggcctctcaccccaacagtactgatgttcacatcatcaacctctcacttacctttcatggtcaagagctgctcagtgacaccaaactggaattaaactcaggccgtcgttatggcctcattggtttaaatggaattggaaagtccatgctgctctctgctattgggaagcgtgaagtgcccatccctgagcacatcgacatctaccatctgactcgagagatgccccctagtgacaagacacccttgcattgtgtgatggaagtcgacacagagcgggccatgctggagaaagaggcagagcggctggctcatgaggatgcggagtgtgagaagctcatggagctctacgagcgcctggaggagctggatgccgacaaggcagagatgagggcctcgcggatcttgcatggactgggtttcacacctgccatgcagcgcaagaagctaaaagacttcagtgggggctggaggatgagggttgcccttgccagagccctctttattcggcccttcatgctgctcctggatgagcctaccaaccacctggacctagatgcttgcgtgtggttggaagaagaactaaaaacttttaagcgcatcttggtcctcgtctcccattcccaggattttctgaatggtgtctgtaccaatatcattcacatgcacaacaagaaactgaagtattatacgggtaattatgatcagtacgtgaagacgcggctagagctggaggagaaccagatgaagaggtttcactgggagcaagatcagattgcacacatgaagaactacattgcgaggtttggtcatggcagtgccaagctggcccggcaggcccagagcaaggagaagacgctacagaaaatgatggcatcaggactgacagagagggtcgtgagcgataagacactgtcattttatttcccaccatgtggcaagatccctccacctgtcattatggtgcaaaatgtgagcttcaagtatacaaaagatgggccttgcatctacaataatctagaatttggaattgaccttgacacacgagtggctctggtagggcccaatggagcagggaagtcaactcttctgaagctgctaactggagagctactacccacagatggcatgatccgaaaacactctcatgtcaagatagggcgttaccatcagcatttacaagagcagctggacttagatctctcacctttggagtacatgatgaagtgctacccagagatcaaggagaaggaagaaatgaggaagatcattgggcgatacggtctcactgggaaacaacaggtgagcccaatccggaacttgtcagacgggcagaagtgccgagtgtgtctggcctggctggcctggcagaacccccacatgctcttcctggatgaacccaccaatcacctggatatcgagaccatcgacgccctggcagatgccatcaatgagtttgagggtggtatgatgctggtcagccatgacttcagactcattcagcaggttgcacaggaaatttgggtctgtgagaagcagacaatcaccaagtggcctggagacatcctggcttacaaggagcacctcaagtccaagctggtggatgaggagccccagctcaccaagaggacccacaacgtgtgagccctctacctgggttcgggtcaggagctccatctgggaactaacagctgctaacctgaccagccgctcaggacaggaccctggggctacactcctgcattgctgcaatactgctcccccagcctctcccctgcccctcaacctgccttagctgcactctcttacctacagctggacagtacctgtctgtttcctgtcctccttccagttacatctgtccatgtctggactcggctggccgttccctccagccccttgctggttatcttactctgagtgtgatgcagtcagaggcacctgcgggttagcccaggggcccaagccctggatttggcctgcggaggagcttaggatcctcgttttctgggttttggtgatgttggaggagtaccccccagcccaccgccccgattcctttttgcttctggtttggagctccggaccaggaccttcgtcctggtcagtttttaaataattatttagcagtgtaacttttagacctgcgtgacatctacaaagcgcccaataaagaaagaggaagccacggtccctaccttccttctcgggtctctggggccttctcctccctgcagtgccaacatgcactgcccacagcaggagctggatccagcgtcagtgtgtcgatgggaactgaagactagtccataggagctggaagaactttgtccctttacttctgatttgaaattgtaccttttctcaggcctgtgattcacagactttaacatgaatcagaatcacctggagggctcatgcaatcagattgccagatctcgcctcagcgtttctggttcaataggttttgggggagaccaagaacgttaacatttctagcaagtttccaggtgatgctgttgttgctggtctagagactattttgagaaccactgtccaggagcgtggttttctgattgtgatctgaggttctgccccaactgcacagcagttgggctgcttgttaaaaatgcaggccaggtgcggtggctcacacctgtaatcccagcgctttgggaggctgaggcaggtggatcacttgagctcaggagttcaagaccagcttgggaaacatggcaaaacccgtctttatgtgcctggaatcccacctgctcaggtggctagggtggatggatcgcttgagcccaggaggtggaggttgcagtgagctgagattgcaccactgcattccagcctggatgacagagcaaaaccctgtctcaaaaaaatgcagactggccaggcacagtggctcacacctgtaatccgactgtaagctcatcaccttgggaggccactgtaggaggatcaattgagcctagaagttcaagaccagcctgggcaaagtagggagaccccttctctacaaatagtaataaaatgaaccgggcatagtagcatgtgcctgcggtcccagctgctctgataagaggaggctcacttgagcccaggaggttgaggctgcagtgagcagagcgtgccgctacactccagcctgatgacagaccgagacactgtctcaaaaaaataaaaaaattcagattgctgaaaaaa

SEQ ID NO: 3187 - DNA, 4684 bp, Homo Sapiens
  NM_007192
ggcagaccgtcacgtgacgacgtcgattcgcgtgcggcagtggcgaagttgacaaaccccgcgaaaatcgactctttgcatcgcacattttgttgattttccctcgtttttctttctctctttcccccgtccatccgaaagagggttggaaaaaaacaaaacaaacaaacaaacaaaaaaaaaacctaacgctgttgggacccggaagcggaaagggcatctttgaggtcgatacttccgggtcattgggagagtgcgggattcctgggccgagagcgggtggctgagccgggacctcgcgtgattctcggaacccgaggagaagcggcgtccggggctatggctgtgactctggacaaagacgcttattatcggcgagtgaagagactgtacagcaattggcggaaaggagaagatgagtatgccaacgttgatgccattgttgtatcagtgggtgttgatgaagaaattgtttatgccaaatcaactgccttacagacatggctctttggttatgaactaactgatactatcatggtcttttgtgatgacaaaatcatctttatggccagcaagaaaaaagtggagttcttgaaacagattgccaacactaagggcaatgagaatgctaatggagcccctgccatcacactgctaatacgagaaaagaatgaaagtaataagagtagctttgacaaaatgattgaagccattaaagaaagcaagaatggcaagaagattggagtgttcagcaaagacaaattccctggagagttcatgaagagctggaatgactgcctcaacaaagaaggctttgacaaaatagatatcagtgcagttgtggcatataccatcgctgtaaaggaggatggggagctcaacctaatgaagaaagcagccagcatcacttctgaagtcttcaacaaattcttcaaggaaagagtcatggaaatagttgatgcagatgagaaagttcgacacagcaaactggctgagtctgtggaaaaggccattgaagagaaaaaataccttgctggggcagacccttctactgtggaaatgtgttaccctcctatcattcagagtggtggcaactataatctcaagttcagtgtggtgagtgacaagaatcatatgcactttggggctatcacttgtgccatgggtattcgcttcaagtcttactgctccaaccttgttcgcactttgatggttgatccttctcaagaagttcaagaaaattataactttttgctccagcttcaagaggagctgctgaaggaattaagacatggtgtgaagatatgtgacgtgtataacgctgtcatggacgtggttaaaaagcagaagccagaactgctgaacaaaattaccaaaaacctagggtttgggatgggaattgaattccgtgaaggctccctagtaatcaatagcaaaaatcaatacaaactgaagaaaggaatggttttcagcatcaatttaggattctcagacctgactaacaaggaggggaaaaagccagaagagaaaacctatgccctgttcattggtgacacagtgcttgtggatgaggatggcccagctactgttctcacttctgtgaagaagaaagtgaagaatgtggggattttcctaaagaatgaagatgaggaagaagaggaggaggagaaagatgaggcagaggaccttttgggaagaggttctcgggcagcattacttacagaaagaacaagaaatgaaatgactgcagaagagaagcgaagagcacatcagaaagaactagcggctcaactcaatgaagaagcaaagaggcgattgactgaacaaaagggagaacagcagattcagaaagctcgcaagtctaatgtgtcctataaaaacccatctctgatgcctaaggaaccacatattcgggaaatgaagatctacatcgataagaaatatgagactgtaataatgcccgtgtttggcattgcaacaccgtttcacattgccacaatcaagaatataagtatgtccgtggaaggagattatacttacttgcgaatcaacttttattgcccaggcagtgctctgggcaggaatgaaggcaacatctttcctaaccctgaagcgacttttgtcaaggaaattacataccgagcatcaaatattaaggcacccggagaacagacagtaccagccttgaaccttcagaatgctttccgaattattaaagaagtacagaaacgttataaaactcgagaagctgaagagaaagagaaggaggggattgtaaaacaagactcactggtgatcaatctaaaccggagtaatccgaaactgaaagatctatacattcgcccaaatattgcccaaaagaggatgcaaggctcactggaggcccatgtcaatggcttccgcttcacatctgttcgaggagacaaagtggatattttgtacaataatattaagcatgctttgttccagccctgtgatggagaaatgattattgtcttgcactttcacctcaagaatgccatcatgtttgggaagaagcggcacacggatgtgcagttctacacagaagtgggagagataaccacggacttggggaaacatcagcatatgcatgaccgagatgacctctatgctgagcagatggaacgagaaatgaggcacaaactgaaaacagcctttaaaaatttcattgagaaagtagaggctctaactaaggaggaactggaatttgaagtgccttttagggacttgggatttaacggagctccctataggagtacctgcctccttcagcccactagtagtgcgctggtaaatgctacggaatggccaccttttgtggtgacattggatgaggtagagctgatccactttgagcgggtccagtttcacctgaagaactttgatatggtaatcgtctacaaggactacagcaagaaagtgaccatgatcaacgccattcctgtagcctctcttgaccccatcaaggaatggttgaattcctgcgacctgaaatacacagaaggagtacagtccctcaactggactaaaatcatgaagaccattgttgatgaccctgagggcttcttcgaacaaggtggctggtctttcctggagcctgagggtgaggggagtgatgctgaagaaggggattcagagtctgaaattgaagatgagacttttaatccttcagaagatgactatgaagaggaagaggaggacagtgatgaagattattcatcagaagcagaagagtcagactattctaaggagtcattgggtagtgaagaagagagtggaaaggattgggatgaactggaggaagaagcccgaaaagcggaccgagaaagtcgttacgaggaagaagaagaacaaagtcgaagtatgagccggaagaggaaggcatctgtgcacagttcgggccgtggctctaaccgtggttccagacacagctctgcaccccccaagaaaaagaggaagtaacttctgaactttggccctgagctccattcttcctccagccaacccctgaaaattttacatgacatagaaactgtatttttcctttcgttttcatttgaagttttgccatttgtgtttatgggtttagggggccatttgtgtggaccaatctactcggggaattccaggcccaccaggacacgtgccaatggccccattcagatggcaagggaggaggtgttcttgaagacaggaggaggctcccgctgttaataaatattgtttcattcttctctcttcctgtcaccttctgccaagacattgatggcttctgacatcttatttggtgtctcaaagctgtatttccaagacagtggtacaaggtgacccttaattacccgtatcatggttcttgaccagcacattcaatcctccaacctaccctactgccatgaccttccgcacatctctaagttttatctttgcaatactcaaggttctcggaaatttgctaatggttgtgataaaccatacagcttgagccagtgaggcagattgggctggtgccttcgtctgagttttcctgctttcctgcctcgtgcagattctgaggtatatctgctgccttggaagacataagaagcagtgatactccctggctcggttattttctccatacaatgcacacatggtacaatgatagaaggcaaaattgccactgtcttcttttttttctcatatatctaaggaagatatatcaggttgtgcctcatgtaccgcttctagtgaaatgtagaggaaggctcaaaggagtcaacatttatatctggaagggacaagtcatgccttgggcctagaataccctgatgagaaaagagaagaggaagggaggccatatctacaacacagcctctcggcactgctgctccttattttaactttgtcttgcattgtcctgtatttatcacagtttctgttgaacagcttttcaagtatttggggagtttatcttgccatcctccccttctggttctctgcacccacctgtcccactgcagttccttccgtgctctgtgactttaagagaagaaggggggaggggtcccggattttatgtttgtttgttttttctccttagcagtaggacttgatattttcaattttggaagaactaaaagatgaataaactgggttttttttgttgtttgtttttgtaaattca

SEQ ID NO: 3188 - DNA, 1862 bp, Homo Sapiens
  NM_007194
gcaggtttagcgccactctgctggctgaggctgcggagagtgtgcggctccaggtgggctcacgcggtcgtgatgtctcgggagtcggatgttgaggctcagcagtctcatggcagcagtgcctgttcacagccccatggcagcgttacccagtcccaaggctcctcctcacagtcccagggcatatccagctcctctaccagcacgatgccaaactccagccagtcctctcactccagctctgggacactgagctccttagagacagtgtccactcaggaactctattctattcctgaggaccaagaacctgaggaccaagaacctgaggagcctacccctgccccctgggctcgattatgggcccttcaggatggatttgccaatcttgaatgtgtgaatgacaactactggtttgggagggacaaaagctgtgaatattgctttgatgaaccactgctgaaaagaacagataaataccgaacatacagcaagaaacactttcggattttcagggaagtgggtcctaaaaactcttacattgcatacatagaagatcacagtggcaatggaacctttgtaaatacagagcttgtagggaaaggaaaacgccgtcctttgaataacaattctgaaattgcactgtcactaagcagaaataaagtttttgtcttttttgatctgactgtagatgatcagtcagtttatcctaaggcattaagagatgaatacatcatgtcaaaaactcttggaagtggtgcctgtggagaggtaaagctggctttcgagaggaaaacatgtaagaaagtagccataaagatcatcagcaaaaggaagtttgctattggttcagcaagagaggcagacccagctctcaatgttgaaacagaaatagaaattttgaaaaagctaaatcatccttgcatcatcaagattaaaaacttttttgatgcagaagattattatattgttttggaattgatggaagggggagagctgtttgacaaagtggtggggaataaacgcctgaaagaagctacctgcaagctctatttttaccagatgctcttggctgtgcagtaccttcatgaaaacggtattatacaccgtgacttaaagccagagaatgttttactgtcatctcaagaagaggactgtcttataaagattactgattttgggcactccaagattttgggagagacctctctcatgagaaccttatgtggaacccccacctacttggcgcctgaagttcttgtttctgttgggactgctgggtataaccgtgctgtggactgctggagtttaggagttattctttttatctgccttagtgggtatccacctttctctgagcataggactcaagtgtcactgaaggatcagatcaccagtggaaaatacaacttcattcctgaagtctgggcagaagtctcagagaaagctctggaccttgtcaagaagttgttggtagtggatccaaaggcacgttttacgacagaagaagccttaagacacccgtggcttcaggatgaagacatgaagagaaagtttcaagatcttctgtctgaggaaaatgaatccacagctctaccccaggttctagcccagccttctactagtcgaaagcggccccgtgaaggggaagccgagggtgccgagaccacaaagcgcccagctgtgtgtgctgctgtgttgtgaactccgtggtttgaacacgaaagaaatgtaccttctttcactctgtcatctttcttttctttgagtctgtttttttatagtttgtattttaattatgggaataattgctttttcacagtcactgatgtacaattaaaaacctgatggaacctggaaaa

SEQ ID NO: 3189 - DNA, 2586 bp, Homo Sapiens
  NM_007198
gcaagctgggcggaaccggaagatggtgtgagccacgggctgccgggggcctggggctcggcgtcggtccccgggggatgtggagagctggcagcatgtcggccgagctgggagtcgggtgcgcattgcgggcggtgaacgagcgcgtgcagcaggctgtggcgcggcggccgcgggatctcccagccatccagccccggctagtggcggtcagcaaaaccaaacctgcagacatggtgatcgaggcctatggacatgggcagcgcacttttggcgagaactacgttcaggaactgctagaaaaagcatcaaatcccaaaattctgtctttgtgtcctgagatcaaatggcacttcattggccacctacagaaacaaaatgtcaacaaattgatggctgtccccaatctcttcatgctggaaacagtggattctgtgaagttggcagacaaagtgaacagttcctggcagagaaaaggttctcctgaaaggttaaaggttatggtccagattaacaccagcggagaagagagtaaacatggccttccaccttcagagaccatagccatcgtggagcacataaacgccaagtgtcctaacctggagtttgtggggctgatgaccataggaagctttgggcatgatcttagtcaaggaccaaatccagacttccagctgttattgtccctccgggaggagctgtgtaaaaagctgaacatccctgctgaccaggttgagctgagcatgggcatgtccgcggatttccagcatgcggttgaagtaggatctacaaatgtccgaataggaagcacgatttttggagagcgggattactcaaagaaacccaccccggacaagtgcgcagcagacgtgaaggccccgctggaggtggcacaggagcactgagccagggaatactgagagcactaactatgcactaacctagattttcatttcgatattccctgtgtcccagcgcagtcctgctctcctgtgacctgtggagagcactaatgatcacgtgtgttgatggaaaccatctgtgcttagtctctgacataggaagcttgcttcaggcaatggctttggattgagtttgagaaattcaaacatttctgcagaacagataccaaatcaatagctaggaatcatgttcaatattgaattctgcccaggagcatgaactgatccatgaatgccttttccaggttaaaatttggtcactgatgcctataatcgtggaagtcagagggattcccctttttcatctcattttaataggaaaattccttatggttaacatctccctacaaactcctactacgtcgtctaaattgctgctctggaataaggtgatttctgcccccagattcttccctagccggtagatacgtgaagatattcccaactgtggaatggcagtgtaggtagcttcaggaaatggctcaggttaattctcaaaacacaaattgttgctggccaggcatggtgactcatgcctgtaatcccagcaatttgggagacagaggcggaaggatcacctgagcctaggagttcaagaccagcctcagcaacagcaggagccccaccccccgtctctacaaaaaaatttaaaaattaactgggcatggtggctgaggtggaagaatggaagaatcacttgagcccaggagtttgaggctgcagtgagctatgattgcaccactgtactcctgccttaaaaaaaaaaaaaaaatcccaatagtccatgaaggctttgatctcttgggaagttcttcatagatgctgtcacatttcttaaagcaaccttttaatatgcagataataccccccaacttttttagagacagcctgtctcttaaaaaaaaaattaatttggtagtgagagcttgtgtcactgccactctgttttatccctgaaattaaaggataacataaggaggacttgggcctttctgacatcatcctgaagagacaggactttgcgtttttcctctgggacctacagtgatgagaatttaatgattatctcctccactataatcctctttagggtgattttttaaatcaaaacccagtgaatctcattactcctaagaaacgaaagattccttcaaagccttttcaggcacatggtttcaacaaagcctggctttgacattccttgtcctgaggagcactttccaggcatagttacagcttccccactgtatttacaagccagaattgtgcaactcttctggatcattaataaagtagcaagatcctcaaaaaacccaaaaacaccattctctaatagtcatgacaaatggcttcagtatggcttgttttttattttccagatggctttttctcttattttttgaagccccagtctttgattttacaggtaactttcaaaacatcatgatgctgccaaatgtacttttgtaaacttaaacattatgattcctgtattatttcagtgagagctacagtgtgatatttcagagtctattaaataaaaatgtgagtttgaattacaccatctgtgccaattacaaagcaattaaaagatttattttttatgaaaaaaaaaaaaaaaaaa

SEQ ID NO: 3190 - DNA, 8351 bp, Homo Sapiens
  NM_007199
ctgccgtcgtggaagcaggatttccgcggttgtgtaacggcctgtcgcaggcgtgcagggacctggactccgcctcgtccccggggctcgggcagccgagccatggcggggaactgtggggcccgcggcgcgctgtcggcgcacacgctgctgttcgacctgccgcccgcgctgctcggagagctctgcgctgttctggacagctgcgacggcgcgctgggctggcgcggcctggcagagagactttcaagcagctggctggatgttcgtcatattgaaaagtatgtagaccaaggtaaaagtggaacaagagaattactttggtcctgggcacagaaaaacaagaccatcggtgaccttttacaggtcctccaggagatgggacatcgtcgagctattcatttaattacaaactatggagcagtgttgagtccttcagagaagagttatcaggaaggtggatttccaaatatattattcaaggaaacagccaatgtcaccgtggataatgttcttattcctgaacataatgaaaaaggaatactgcttaaatcttccatcagctttcaaaatatcatagaaggaactagaaatttccacaaagacttcctaattggagaaggagagatttttgaggtatacagagtggagattcaaaacctaacatatgctgtcaaattatttaaacaggagaaaaaaatgcagtgtaagaagcattggaagaggtttttatctgagcttgaagttttactactgtttcatcacccaaacatactagagttggctgcatattttacagagactgagaagttctgtctgatttatccatacatgagaaatggaacactttttgacagattgcagtgtgtaggtgacacggccccactcccttggcacattcgaatcggtatattaataggaatatccaaagccattcactacctgcacaacgttcaaccatgctcggtcatctgtggcagtatatcaagtgcaaacatccttttggatgatcagtttcaacccaaactaactgattttgccatggcacacttccggtcccacctagaacatcagagttgtaccataaatatgaccagcagcagcagtaaacatctgtggtacatgccagaagagtacatcagacaggggaaactttccattaaaacagatgtctacagctttggaattgtaataatggaagttctaacaggatgtagagtagtgttagatgatccaaaacatatccagctgcgggatctccttagagaattgatggagaagagaggcctggattcatgtctctcatttctagataagaaagtgcctccctgccctcggaatttctctgccaagctcttctgtttggcaggccggtgtgctgcaacgcgggcaaagttaagaccatcaatggatgaagttttaaatactcttgaaagtactcaagccagcttgtattttgctgaagatcctcccacatcactaaagtccttcaggtgtccttctcctctattcctggagaatgtaccaagtattccagtggaagatgatgaaagccagaataacaatttactaccttctgatgaaggcctgaggatagacagaatgactcagaaaactccttttgaatgcagccagtctgaggttatgtttctgagcttggacaaaaagccagagagcaagagaaatgaggaagcttgcaacatgcccagttcttcttgtgaagaaagttggttcccaaagtatatagttccatcccaggacttaaggccctataaggtaaatatagatccttcttcagaagctccagggcattcttgcaggagcaggccagtggagagcagctgttcctccaaattttcctgggatgaatatgaacagtacaaaaaagaataaattctaccagaagataaagaaaaaagcaagtattgcataggcacctgagcataggtatgaccttgggaagacattggctccataagcaatgccaagagaatgatcaatagtgagtttgggtgatgcagataaacaatctggataattccatttcttttttcccaaaccctcaaacagagtgccttaaaaaattgttttatcaggataattgtctcatgaccaaatccacgctcaattagagccattcaaaattccttaagatcatgggttctgacttcagccaaacaaaacaatcaaaacctaccaaaaagggactggattgtaatgtcctctccatcatcctcagtgtgagtcctcagagcctccatctgccaagaacattcagttggattccatcgtttggtttagcttgcttgcacgggttgtaggaaatgtctaatttgtaaatgttaatagatacctttggaaagaatcaccttgttattctgattgacccctcttgttttttggttaatccctgactagcctgcttgtctgaaaatgagccaggttcacccttagctacggcatgctctgggttgaaaggggatttcttcccaagatctatcctaaactcttaggacagtttatcctgtattgactattattacagctttttaaaaacagacttagtgacctattatatcttaaggagactatgtgaaatgtccatcaagtaatttttattcctgagaaaatggctggtcaagggcctaggtcagctttttgtttaatctacacctttcaactctgggccttcattcctgctgtttcttggatctccctcttttgaaatcctaccaatcatcagagctctacaaaacagccacctcctggaagcttccctaatctctacaaccagaagtactccctttatcagtatttccacagcaatttctttgtatttctattttatatttatcactttctgaattatatcaaagctgcttgtcttatctctttttttttttgagacggagtctcgctctgtcatccaggctggagtgcagtggcacaatctcggctcaccgcaaggtctgcctcccgggttcacgccattctcctgcctcagcctcccgagtaaaggtgggactacaggcgcccgccactacgcccggctaattttttgtatttttagtagagacggggtttcaccatgttaggcaggatggtctcgatctcctgacctcatgatccgcctgcctggcctcccaaagtgctgggattacaggcgtgagccaccgcgcccagccttcatctcttttactaggttgtaaactccctatattagttttctattgtttttgtaacacattatcacaaatttagtgacttaaagtaacataaattaattattttgcagttctggaggtcagaattccttagcattctttctggaggctgttggggagaactcactgccttgccttttccagcttctagaggccacctgccttctttggctcatggcctcttcctccgtcttcaaagccagcaacgtgacatttcagatctccctctctctgtctgtctcaccgcatctcttcactaccctcttcctctcattctggcccttctgcatgtcttttataaagacctttgtgatttcactgggcccactcatataagccaggaaaatctctgtgtctcagatccttaatttaattacacctgcaaagtccgttttctcgtgtaaagtaacatattcacaggtttctggaattgggacgtggacatcttcgggggaccattactctgtctgtcatactccctgagtgtgtaagggccatctcttcagagcctaatgtgtcatcctacacagagcaggtgtttccttataaattaagttgaattaaattacccctatgaagccacataatcaataattcagctataataaacattgccgaataaattaacaaagggaggataatgactccttatgatgatggatagaaacactgaagaaaaccattttcagaggatttactgaattttcctctccaaggagcttgtaatagaagggtaaacctctagtttcttgtccagcagaggaataggctcatgtcttttgttttattttatttttttggtgagtcagtatggttgggttaatcatattcacattagattccatgttgaagaacaactaatcaaagaagaaaatcatcaggaatcagggtgagattaacagaccaaggtcagaaacatggagttacaattttccaaaaaagcacgaagtgagattaaaaccacagtaagtcttagtctgactgacaggctttatacaggccctcggtaagcagttgggagaacccatgcccaccactgctctgtacggtatctggctgctcagagctctctgattcacaaaagagatcatcaagaattgactctgtgttaaactgtttttcacttagaatatggacccccaccaatacattcaatgaagggtcattaaggaagctctgattaacaccaggcccatgcagttactccgcacatataatctgtgggtattatgttgatttgaacttgcttagctgacttaaagcagggtttctcaaactgtagtatgcatcagaatgacttggaaagctggttaaaaacgcagattgctgggtccacccagcttctgatgcaataggtctggggttagaaattttgctttctaatgagttcccaggtgatgctgatgccaatgatgtgaagcccgctcttcacatccgtgaaaatcgctgccttaaggtgctcttaaattgttatagattggtagatcctacctttccatcactggtatgttttttgagaaaaggatcctttcttttcattctgttatattcatcctattacataggatgttggttagcacagagtgggagctctagaaagattgttgaccaatcatcttattgactagaccatctttctagagtataactattttggacacctcaaagatgaagtcagataagctggcagtgacctgattaacgttgtggtaagcagatgccactgtggctgggaagtaccaaatcttctgttgagtgattcagtcttcctgactagatttgccttctagtgggtgtattaataagcgttagttgatatgaattaaatgttgcaactttctatgggtaataagaggatacctttatagtttcatgatgtggagaccaagatacataagaaagcaagaatgagtctccgggtgttccctctgatcagcaaacatgaattcataatttcatttactctcatttttgtaatgcactctgagcaatcctccaggcagatcctatttactaagcttcaggcttttgtcccattttataatgcccaaacacatggagaaaacattttgttgtttttaaaaacaggtatgggatttctgatataatcaattttattgacttcttgggagttgtaatgatctgtgactcactgcataatattgtagttttatagggtggcacatcaccctgtgtaaaacaactttaatgacctgaggactgatgagtacaggaagtgaggtttatcatgagtagcatttattaagcatctgctagaatcaaagcactgcattagctactaaggtacaaagtaagacacagtttaataaggaagacagggcatctacccaagtcaacagttcagtgacatctgttatttgaaccacacaccaatgcaaccgaagtaaatgctgaaagggtgagaagaaggaatagattactatgcatttttgagaggatgaagaaggcttcttggagaaggtttctgaaaagagatacggaattaagagaaatagaaaagagcactgacgaagcactcaggatggctattcaaggaattggggatccacagcagctgtgcacaaccatccctaatgccagaaaaatggggtaagggtgaagggaactgggtctagagctttgcatgtttttttctggttaacccttagagtcaccctgaaggtgtggatcccatcttataataaggtgaggacactgagtcaggaaactaacttgctaaaatcaagtcctcccagtcctcccatcaggtccttccagatctggaggagccaggatttgaactcacatttgtctgacttcaaaatccatgctttttcttgtgttccaaattgcacaatggagtcactgccagttcaagctcctatgaaaagggatggatgtgaaaagtcatttgttgattccacagatttttagtaggtaccatgtctcctgcctttatcactatcctactcctctgctacaacttctctgctacaggcacccactgcagttacttgatatgagttaaatgaatccatccatccaaacttccattcattgaataaatacttagcaatggcttcctttgtatcaggcactattctaggagctggggctacagtgcagatggaaaccagcaaagctcactgccctcatggagcttatatgtaagtgaataaatctcagggtggttctcctgtcataggtcctggctcctctgccagctcttccaaatgggttcagagaggttttctccttgtcctgttgtgtaactgataatcccatggtggacctcactttgctattcatatgcactaagtagtttatggtgtgctttgtggctggcaattgtgacagattctattcttctattggtatgtggtttctttggggcatttgtttggatactgatggcatcttccgggggtctgaggcacctacacaaacctcaggtcactatcacgtgatactggagttgcctgttaaattatatttcttcttccacaaaactgcaggttccctgagggaaaggtctatgtcctgctcatttttggatccctaatggctggcacagtacctggtgcataatatggttcaacaaatatttgtaaaatgaatgaatcaaatagtccttcaaagcatcttcagaatcaagattgtcatctagattgcacccgaagtttatctttctagtattcagaatataatcaatcattgcttaaattattccatttcatcattcttgaataaaagctactaattttaaatactaatatctgagatatcttcgaaaagaagattagtcgttgtatgtgttgcttataaattttctctatggtggaaaatattcccaaaccatgtctaagcaatgaaaaaccagtgttctggcaggaaataaactgatgtttgttgtgttttgtatctgtcttcccgttccaaatcatttatatatacttgatggtctgtgggcttgacttgcaagtattttcctgggagacatttttattcaaaagacctgtattgcctgccaaaccttcatttaagagactcattatggatgtcatctgcatcattgcaaacttttctggtcgtctctataaatagcaagataatatttacagagttttacattggctcttgaattttaaaatattcttatagacaaacattaattggaatggggggtaaggaggtaggaatggcttacttgcggaaatgcaggctcattgttgtgtctagtaggtgctaggtgcattcacacatctcttaagctttaaacaacctattgagccggtttccatttccttgatctattagatttaaaaaaatgaagcataaaggagttggctcttgccctaagtcatactactgatggaatgagaatacaaaccaaaaacactttattcaagtccaggaaatatctgccttgaaaaagaataacttaaaaattaaaagtgtcctctatttgaacatgaaaacagctaataaagatgtgttattttattttattattattaattttgtcctcccatattggcaaagataaagcaattgacaaaaatggaattcttgttcaatactggcaggagtgaaaattggtagaacctttctagaaggcaatttggcaacatgtatgaaaacctaaatgttgatacacctttacccagcagtttgtttaggaatttatcctaatgaataaaagttgtccaagtcttcaaacatgagcccaaaggtatatttcatgatgtttatgatattaaaacattggaaacaactgaaacatccttcagtaaaagatggattaaataaattccatgcagttgtcatttaaaaatatttagatatatgtttattgctatggatatatgttcccaaaatattattgaatcaaaaagtagactacaggatatatgttgaatatgagctcatttataacattgaatattttaagataatgtatgtttcatagagagatcttcaccaaatgttaaggatttttttttctgggctgtggtatttgggtgatctttacattcttcagactcatgtgtgtttgaaactttttataatgaacatatatcatttttattagaaaagaataaagtttttgaaaaaaaaaaaaaaaaa

SEQ ID NO: 3191 - DNA, 6500 bp, Homo Sapiens
  NM_007214
acgtctcccttagcgagctcgctggggacacgcagggggagggaaaactgagcggggcgggaactatctcctctcgcgagagctggcgacggcggcggcagcggcagaggtggcggcggcgtgtccgtgagagtggcgtgggggcggggaggagaggcggcggcggcagtgtccaagctacgccactcgggccggggcgttgggagcgggagtgcagagcgtggtcgtggcggcggcggtgagaagagcgaggcggaggagggggtgccatggccgggcagcagttccagtacgatgacagtgggaacaccttcttctacttcctcacctccttcgtggggctcatcgtgatcccggcgacatactacctctggccccgagatcagaatgccgagcaaattcgattaaagaatatcagaaaagtatatggaaggtgtatgtggtatcgtttacggttattaaaaccccagccaaatattattcctacagtaaagaaaatagttctgcttgcaggatgggcattgttcttattccttgcatataaagtttccaaaacagaccgagaataccaagaatacaatccttatgaagtattaaatttggatcctggagccacagtagcagaaattaaaaaacaatatcgtttgctgtcacttaaatatcatccagataaaggaggtgatgaggttatgttcatgaggatagcaaaagcttatgctgctttaacggatgaagagtcccggaaaaattgggaagaatttggaaatccagatgggcctcaagccacaagctttggaattgccctgccagcttggatagttgaccagaaaaactcaattctggttttacttgtatatggattggcatttatggttatccttccagttgttgtgggctcttggtggtatcgctcaatacgctatagtggagaccagattctaatacgcacaacacagatttatacatactttgtttataaaacccgaaatatggatatgaaacgtcttatcatggttttggctggagcttctgaatttgatcctcagtataataaagatgccacaagcagaccaacggataatattctaataccacagctaatcagagaaattggcagcattaatttaaagaagaatgagcctccacttacctgcccatatagcctgaaggccagagttcttttactgtctcatcttgctagaatgaaaattcctgagacccttgaagaagatcagcaattcatgctaaaaaagtgtcctgccctacttcaagaaatggttaatgtaatctgccaactaatagtaatggcccggaaccgtgaagaaagggagtttcgtgctccaactttggcatccctagaaaactgcatgaagctttctcagatggccgttcagggacttcagcaatttaagtctccccttctgcagctccctcatattgaagaggacaatcttagacgggtttctaatcataagaagtataaaattaaaactatccaggatttggtgagtttaaaagaatcagatcgtcacactctactgcacttccttgaagatgaaaaatatgaagaggttatggctgtccttgggagttttccatatgtgaccatggatataaaatcacaggtgttagatgatgaagatagcaacaacatcacagtaggatccttagttacagtgttggttaagttgacaaggcaaacaatggctgaagtatttgaaaaggagcagtccatctgtgctgcagaggaacagccagcagaagatgggcagggtgaaactaacaagaacaggacaaaaggaggatggcaacagaagagtaaaggacccaagaaaactgctaaatcaaaaaaaaagaaacctttaaaaaaaaaacctacacctgtgctattaccacagtcaaagcaacagaaacaaaagcaggcaaatggagtcgttgggaatgaagctgcagtaaaggaagatgaagaagaagtttcagataagggcagtgattctgaagaagaagaaaccaatagagattcccaaagtgagaaagatgatggtagtgacagagactctgatagagagcaagatgaaaaacaaaacaaagatgatgaagcagagtggcaagaattacaacaaagcatacagcgaaaagagagagctctattggaaaccaaatcaaaaataacacatcctgtgtatagcctttactttcctgaggaaaaacaagaatggtggtggctttacattgcagataggaaggagcagacattaatatccatgccatatcatgtgtgtacgctgaaagatacagaggaggtagagctgaagtttcctgcaccaggcaagcctggaaattatcagtatactgtgtttctgagatcagactcctatatgggtttggatcagattaaaccattgaagttggaagttcatgaggctaagcctgtgccagaaaatcacccacagtgggatacagcaatagagggggatgaagaccaggaggacagtgagggctttgaagatagctttgaggaagaagaggaggaagaagaagatgatgactaagcagtactctgaatggaccacagtgtttgcacatatttgcaattttttgctgttttggaagtgtatcataaaccagaaacagtacagaactgatgttgagggaggtgtagtttttttactcttgaaatgggtgcataatataactaggcagtggcggtgccttggtacaacctgaaaaatgttaaggcttattgaaacctttcaagtaggggatggtacatttatttcatctgcaaatgataataaatcctttgttattataactgtccagaagtgtgggctatgtattatctgatcagtctatggtcccagtaaaagtaaagatgcaggaaacacagtctgtaaatgagcgacttttctttgttcagctttagttttagcaaacaccacaaatatgttttaagtaacatcgctcaagtttaagtaacatcgctcaagttgataatctcttgataagctctgttgttgacattttgcagtgatacaacagctccactcatagatttaaacttttatttttacttatcttggtcataagttggcattctctcacattccacatgatatagagggctacgttttggaattttccttttcttaattgcccagagttatcagacagattataaaaatggcttttaatggcttaaaccatttctaaacctctatcttagcagatcaatgcaggatctaattcttttgataagttctagctctaaaagtgatagtgggactgtatgttttctgatactggtggcttatgttattaaaccttttttaaaaaaggttcactctaaaagctgaactacatccttagttttcagtctacttgactctatcaggagctttttaaggaaagtaagtataacatgcaaaggaagctttttttgtattcattttggactcctgtcaataaaaatagaagtttgttgactcgttttatgtttcaatggtgtgtgtctttttactatcaggacataaatagggcaatccacttctttatttttcaactaaagattgaatagtattgtacattactgctaaagtgactgctatttctgtatactgtagaaaaacccaggagtgagagggatttcccctcatagtacaactggaaggatagtgcttgtaaagagtagagatgtgtacatgatgaatcattgagggagggtggatatttttattcctagatatggaggaaacataagtctgtagtattataaaactgattgtaataattctttcctatcaaaatctccataggtcaaaatattgttggaatactaaaatttgcaaccttgtttactttaaaaggttgccactttcagtgcagaatactaccggcatcttgttactgcaatagttggaaataaaatgtgaaaattagcaaaaccatgaatggtttttttggttctaaatttaagatgtaatatttcctataaaagggtgaaagcagtttctttctctataacctcaatcaccagtttagtgagagcctttcttggcaggcaggaggcagtgtcactgaggatttttttcatttacttcattgtacaagtaggagggtgggtttaattttcaaatcaggttctgctgtgaagcaccagtgtcttgaggcagctactgattacctaagtgtggtggcagggggtaagccagctggtgtcaagtgaaaggagggattagagaaaacaggtgtggcacgaaggcaaggaaactgagcagacaagacagaacaatgtgtagaatgcatatttcctagttttcttgaaagatttcaagaaaagttgtttttttttttctagtggctactttgccttaaagaggctttataagttcattcacacagctggcttctctggttttaagattctggagaggatgataacctagtaacaccacagtgcttaaaaaaaaaaaaaaaaaaaaaactaccatcaccagaaaattccaccagtttgttttccttttctctttgtgtgatgtgtatgtacttcccaactaagtaaaataaaatttcctctagtgagtgctttaggtaacctctttccatatggcagtagtgaaagaactgagccttcagttgatagttcttctctctccagcaagtcgctaaactccacatcccttcgtttttcctctggaatgagaataacaaactatcctagtttgcatttaatctaatggaaacttgagcaaagtttcaattttcttcctataaagaaactgacattttgtcaacaattgatgagcctatagatcatacagtgtataggaagtgaaattgaaacagttaaattatgtgatatttttctctaattggtaaagtacctattaaaatacagctgttcatgaggagacttaccacaattcaaagtgtagcagttgtgtattttagcattataatatttgattgaggccctgaggtgttaatatctcaatctcagagttagatgttcatgtcctttttgaattttttaaacatttttcataattttttttttaagttagggagcacattgagtgaagttctctgtgtagaacaataccttctgctctgcttctcccagctttcactgagggctggaaaaggacaggcctgtccagctgtactgtcccactgtgtatggggaagctcaggctctggtggaagcagggggcgtggatgtcaaacaactgatgtggaaacagggagggagagatataatgaggctctctaggcatgttatttttgaccacaagttttgttcagtttgcttcagccaatccaaaccatatactagagtgttctgtagtcacaattcttatttcaaatgtaattcagcaccttacataatttttgagaggttgtcattcatcacatatttactgagtttctatgtgccaggctctgtgactggatactggagctatcaaaatgaaaaaaatagtgttaagaactcactcgctggtgttagagcaggtagatgagtggcaatccatttaaatccatttgccttggctattatttggaatgcctttttttttttttagtctatctactgtaggcagaagaattatttctttaggggctagctgtttattttgctggcctttttttctctctttctctttttcttcttaagacggagtctcgctctgtcctccaggctggaggagtgcagtggcacgatctcagctcactgcaacctccgcctcccagcttcaagcgattcttctgcctcagcctcctgagtagctgggactgcaggtgcatgccaccacacccagctaattttttaatttttagtagagatgggattttgccacgttgtccagcctggtctcgaactcctggcctcaagtgatcagccctcctcagcctcccaaagtgctggcattacaggcatgagccactgcgcccagcctgttgggtttttttggaaaaaaaacaaaaacaacaaatcatcatcctttcctttaaaatgtttttttttttttaagaaacaattttcccacaaacggtctgatttaactccatgaaatcctctatttagactgccttaaagtgaaataactgttggtgaaccataacattttgccagctgtgtagtgattagtccaaatatgtctcaagaagttagcaccaagcattctcatccatttaaacttgatgctagggctattttgcaaaacttaaaaagatgcgatcttgtacatatttctgtaacctgagctgaaaacccaaataacaatcattgacatactttagggctattgtttcaggtgggggtgtatacatcccaggggcgtggagatgatcaatccattgaggaagtattaagatgattatttgtatttaatctcatccttttaaatttctatttttgtgtgttttataatgtacataatatattgtacaattgtacacttctattatttataaataaacatttattggtgcattaa

SEQ ID NO: 3192 - DNA, 1607 bp, Homo Sapiens
  NM_007215
gcctgcgccgtggcctctccggattctgttaacggtagtggtggcttgttgggatccgttgagtgatgggagagtgtgctctttaacttcggagagagatgcgctctcgtgtagccgtcagggcctgccataaggtctgcaggtgcctgttgtctgggtttgggggtcgagtagatgcggggcagccggagctgttgacggaaaggagtagccccaaaggagggcatgtgaagtcgcacgcggagctcgaggggaacggcgagcacccagaagcccccgggtctggagagggaagcgaggcgctgttagagatctgtcagagaaggcatttcctaagtggaagcaagcagcagcttagccgggattctcttctgagtgggtgccaccccggcttcggacccttgggcgtagagttgcggaagaacctggccgcagaatggtggacctcggtggtggtgttcagggagcaggtattcccggtggacgccctccaccacaaaccaggccctttgctacccggggacagtgccttcaggttagtttctgcagaaactctacgcgaaatcttgcaagacaaagagctgagtaaggaacagctagtagcatttcttgagaacgtattaaaaacttctgggaaactacgggagaaccttcttcacggtgccttggaacactatgttaattgcctggatctggtaaacaagaggctaccttatggccttgctcagattggagtgtgttttcatcctgtttttgacactaagcagatacgaaatggtgttaaaagtattggtgagaagactgaagcttcgttagtatggtttactcctccgagaacttcaaaccagtggcttgatttctggttacgtcatcgactccagtggtggagaaagtttgccatgagtccatctaacttcagcagcagtgactgtcaggatgaagaaggccggaaaggaaacaaactttactacaattttccctggggaaaggagttaatagaaaccctgtggaacctaggagatcacgaacttttacacatgtatcctggcaatgtgtctaaattacatggccgagatggacgaaaaaatgtggttccttgtgttctctctgtaaatggggacctagaccgaggcatgctggcctacctctatgattctttccagctgacagagaactcctttacaagaaagaaaaatcttcatagaaaggtacttaaacttcacccttgtttagcccctattaaggttgctttggatgtaggaagaggccccacattggaactaagacaggtttgtcaagggctatttaatgagttactagaaaatgggatttctgtgtggcctggttatttggaaactatgcagtcctcattggaacaactttattcgaagtatgatgaaatgagtattctcttcacagttttggttactgaaactactttggagaatggattaatacatctgagaagcagagacaccacaatgaaggaaatgatgcatatatccaaattaaaagactttttgattaagtatatatcatcagctaagaatgtatagatttttatatttgtataataaatattcttctctcctaaaaaaaaaaaaaaa

SEQ ID NO: 3193 - DNA, 4723 bp, Homo Sapiens
  NM_007216
cgcgaggggagactgaagttcacgttccgctcttagtgcgcggtgagttccccggcgctaagccgggagacaagatccgatctactgagagctgcgaggtactgccctggatgtggtggagctgggctgggacctccgggctgctggtctgtgagcctggctttgaaaattggttactgggtctcctctcaagaaatctcaagatattaaagttactgctgttaaaaagtgcacgagcatagctgtgtctcggaaatggttggctttgggcagttcaggaggaggactccatctcattcagaaagaaggctggaagcacaggctttttctttcacacagggaaggtgcaatttctcaagtcgcctgttgtttacatgatgatgattatgttgctgtagctaccagtcaaggtcttgtggttgtttgggaattaaatcaagagcgtcgtgggaaaccggaacaaatgtatgtgtcttcagaacacaaaggccgaagagtcacagctctctgctgggatacagctattcttagagtttttgtaggtgatcatgctgggaaggtttctgctatcaaactcaatacttctaaacaagcaaaggcagctgctgcttttgtgatgtttcctgttcagacaatcacaactgttgactcctgtgttgtacagttagattatttggatggaaggctacttatatcttcacttactcgatccttcttgtgtgacactgagagagaaaagttttggaaaattggaaacaaggaaagagatggagaatatggagcttgtttctttcctggaagatgttctgggggccagcaacctctgatatattgtgctcgcccaggctctaggatgtgggaagtgaactttgatggagaagttataagtacacatcagttcaagaaactcctctcgttgccacctctccctgtgattactctcagatcagaacctcagtatgatcatacagctggatcctcccagtctttgtctttccccaaactcttacatcttagtgagcattgtgtgctgacttggacagaaagaggaatttatattttcattcctcagaatgttcaagttcttctttggagtgaagtcaaagatattcaggatgtggctgtctgtaggaatgaattgttctgtttgcacctaaatgggaaagtctcacatctctccctgatatctgtggagcgctgtgtggaacgcctgctaagaagaggcctatggaacttggctgctcgtacatgctgtcttttccaaaattctgtcattgccagcagagcaagaaaaactttgactgcagataaattggagcatttgaaatctcagctggaccatggcacctacaatgatctaatttctcaactggaagaattgatcttaaaatttgaacctttggattcagcttgtagcagtagaagaagctccatttcatcacatgaaagtttcagcatcttggactctggtatttatcgtatcattagtagtagaagaggcagtcagtcagatgaagactcttgctcccttcacagccaaaccctctcagaagatgagagatttaaagaattcacctcacagcaggaagaggacctgccagatcagtgttgtggctcacacggaaatgaagacaatgtttctcatgctccagtgatgtttgagacagataagaatgaaacttttctcccgttcggcattccattaccatttcgttctccatctcctcttgtgtctcttcaggctgtcaaagaaagtgtttctagctttgtgcgtaaaactactgagaagattggcacccttcacacgagccctgatctgaaagtgagaccagagctcaggggtgatgagcaatcatgtgaagaggatgtgagttcagatacctgcccaaaggaggaagacactgaggaggaaaaagaggtaactagtccacctccagaagaagacaggttccaggagcttaaagtagcaacagcagaagcaatgaccaagctacaggaccctctggttttatttgaatccgagtctctgagaatggttttacaggagtggctttcacatttagaaaaaacatttgccatgaaggacttttcaggtgtttcagatactgacaactcatccatgaaattgaaccaggatgtgctattagttaatgaatcaaaaaagggaatattagatgaagataatgaaaaagaaaaaagggactctttaggcaatgaagaatctgttgataaaacagcatgtgaatgtgtaaggagtccaagggagtctttggatgacctgtttcaaatatgttctccatgcgccattgcaagtggtcttcggaacgacctggctgaattgacaacattatgtttggagttgaatgtattgaattctaagatcaaaagcaccagtggacatgtggaccacactttgcaacagtactctcctgaaattctggcttgccagttcctgaagaagtacttttttctcctgaacttgaaaagagcgaaggagagtatcaagcttagttacagtaatagcccttctgtttgggatacttttattgaaggattgaaagaaatggcaagttccaatcctgtgtatatggagatggaaaaaggagatctaccaacaaggttaaagttactagatgacgaggttccttttgatagtccgttgttggttgtttatgctacccggttgtatgaaaagtttggggagtctgctcttcgatccttaatcaagttctttccatccattttgccatcggatatcatacaactttgtcatcatcatcctgctgagtttttggcctatttagacagtctggtgaaatcaaggcctgaagatcagcggtcatcttttcttgagtcccttctgcaaccagagtctttaaggttggattggctgcttttggcagtgtcccttgatgctccaccaagcaccagcacaatggatgatgaaggttatcccaggcctcattcacacttgctttcctggggttacagtcagctgatccttcatctaattaaacttcctgcagattttataaccaaagagaaaatgacagacatctgcaggtcttgtggtttctggcctggatatctaattctctgtttggagctggagagaagaagagaggccttcaccaatattgtgtatctgaatgatatgagcctgatggaaggggacaatggttggatcccagagaccgtggaggaatggaagcttctccttcatctcatacagagcaagagcacgaggccagccccccaggagtcactaaatgggagcctcagtgatgggccttcccccatcaatgtggagaatgtggcacttctgttagctaaggccatgggcccagatcgggcttggtcactgctacaggaatgtggtctggcccttgagttgtcagagaagtttaccagaacctgcgatatcctgaggattgctgagaaaaggcagagggccttgatacaaagcatgcttgaaaaatgcgatcggtttctctggtcccagcaggcctagtgggagaagattcagcaggatgtcatgacattttgagaaaaactaaatcatgctcctgaaccttctgaacgcatttgttattgaaggaaagacaccacccccaaatcctgccatcttattggggctacttttgtcagtgtctgtacccttggcatcggcatctgtgactctttatccatgacctcagtgtttcttaaccaaagttgtactcagcatttcttaaccaaagttgaattttgaaaagagtcagtccttgtttgctggaattagaatgttaatgtcctagtattattccgaactacagtattaactgcttgttgctagtggattagacagattcttttcttactgtggcttccatgttgggagcagaagcttttcatcctggtcacatgaagacagatggtattattgactggagttgaattatttttatatcttgtctggcacaatatggaaattactgaaataagacggtgtataatggaattaacacccaaaataagtagaacactgaagatttgaatttgatatttaagtaaaatgggactgggtgcagtggctcaggcctgtaatcccaaccctttggaaggtaaagacgggaggatcacttgaggccaggagttcaagaccagcctgggcaacatagtgagaatgcatctctacaaaaaataaaaaaaattagctaggcatagtacctgaggccaggaggtccaggccgcaatgagatgtgtttgtgccattgcacaccagtctgggtgacagagaaagaccctgtctcaaaaacaaattaaataaaatatcttcatatataaattaagctaattaaaaatatttttccctgtatttatttaatattttctaatctgaacccatatacagctgactaattcattcttagaaatgtgttatctgtaatctttcctaaacagagtagcccacaagaatcatgcactttttaaaattatttctaagaagccataacaaagctgtgtactaataaagactgcagcaagcacttgtgttatttaaattatgtaagtagattgtcatttgtcaggctcctgtacatttacatagcatgttatattaataataaatgtaaaatatgactaaagttttcattggaacacaatgtagacaggaggtttattatgagcattttgcagaaaggtgtggagtaagtaaagtgttggatgcactgaacaattc

SEQ ID NO: 3194 - DNA, 3374 bp, Homo Sapiens
  NM_007219
gcggccgccgcccccgggctggggtttgggggaccgagccgctccgggttcgggatgctgaggagaccgcgggcccgcgccagcctcccacacacacacactctcccggcgcctcggccggccgggcgcggtgtgcaggggtgaggcggtgtctccaggctgaggagggacgcggaggagggtccggcgcggccccgggactggagggtgagtccctcacaaagggcggagcggggctgtcacctggagatcacggagggaagttcatccatgagctcggatttcccacattacaacttcaggatgcctaatattggattccagaatctgcctctcaacatatatattgtggtttttggtactgctatatttgtcttcatccttagtttactcttctgttgctacttgattaggctaagacatcaagcacacaaagaattttatgcctacaaacaggttatattaaaagagaaagtaaaagaattgaatttacatgagctctgtgcagtgtgcctagaagacttcaagcctcgagatgagttggggatttgcccatgtaagcacgccttccacagaaagtgccttattaagtggctggaggttcgtaaagtgtgtcccctgtgcaacatgccagttctacagctggcccagttgcacagtaagcaggaccgtggaccccctcaggggccccttcctggggcagagaacattgtatagcttaccgcaaggatcagactgttgctggacacgacgtctgtgtggagccaggaggaacacatgtggtgtctgtatggctgctctctacctaggacaccagctgccacttcttttgcctcatgaagaactcttgggccagccaaactgggaacctaggtgtctgggtcttgtgacaaccaaagcactttgacactaccccctgccgagagaagaggagtggatgagcctgcgggtttgcctcaagaaacttcatgagggtctcttactaactccattacactctctctcctggagcctcatctccatgtcaagcaggagggtaaagaagggaactaagagcaggtctttcaagccacacccccacctgcggatggatgggtttctctgtaggccatgcaggcctttgtcgcagcaaaccttcccagcagcccttgagccaagtaaaaccagcacaaccagccaccagtggttggtgaggcagtgcccacaaggctcatgttgtatgcctttgataaggccatcttggctttgagtagcagtgttcctcgtcacccatttccccctcaggattacaacacctgctatcaaatcatctaagctgaaaacatgagatgcgcttggaaaggcctagtcagaagccatttcctcttatcatttccctctcctatgcaccagtaaggcccgtccagagccccagcagggagtgggccctgagtccacactgtccctgagtgatccaggaggctgcccacatccccacatgtgcactgtggttccagtgtagctgctgtgagcccactgccactgcctcagaagggagccactgtgaacctctcgagtggctccaaagagcagtggctttttgagaatggcccatacttctggcccggctggatgaagggaatgccgaccctttggcctctccccctccttccatctcttctctctcttgccctatctctctttctacttcagaaaaaaaaaaaaaaaaaaaaaaaagcctgtcattcactttttaacactttatcccaaataagatccctgtgtaattctgaagctggtgatccacttggaattgtagatagtttcaggaagctcctgcagggctgtccaccgttggtgtgtgcctcagtatttggacttccgaaactgaaagtgaaagtgtctttataggagagaaacgcatgctgctctttggctctttctgtccaacttttctagaaatgactcaaagtccattaagatttgtgaatattgtataaattagctatggaaagtagcaggtcagatggaaaattcttttccacagccctgctctccgcctccctccatcttaggagcgcctgcctcaattcctcgtcaactgctttgctccactccatcccacaggtgtgagtgggggaagtttttcattaggaatacagtctgcgtgacatggagaatggatggagggagctttgctactctgctcttggcatgactccaggatttttttctggaatccaacctctgtcctcttaggagaaggaacctgtccttggttcagatggctgggcatgaggaggaaaatttccattagtgtagaacagtgctggacagaatccggtttggaaaattacaaatccagttggtcaaaataggccatttcctatgtgtgacctattcgtggtatgccaactggactgcttcctaaacaggacgaggaaagtgaggaatatttttatatgaaagccttagcctgtctggcacccatgaaaaaaactatttatgcactcctactttcaccgtctttttgcattctctatttgtagcacaacagagttgaatgccacaaaacaccccgtttatagtgagctgttttcagtgaccaatatcagaaggaggcttgcttctggactagcctcactaattgccagcagccaccattttccatggaatggccttgggacagatgtcacctctgttatggggctctaataggaaagagaatgttttttcccttcctatgatcaatactgcaaattattgctgctcacagcttttataggattctcccaactgaaagttgcaggctttttctgtccctgtgcatcagtactaacaaaagacagcctcaccaagtctgtatatttgaacagaggcaagttaattcatccccccgtgtcagagccacaggcatgttgagggggttgatacgtagcactggaccagggcgcaaagcccagatagttccagccatgagaggagagcacaagaatgctctgcactctgcactcagcaccaccttgggtctgctttgcccagatgagggaccactaacaaccttctcagcacatgtgaatgtggactggttttaaaatgcattcattctgctaggattgggctggaagctggaacagtgagagtactttttctgctcctagtcatctccctttctcagcgtgacatcctcctgcagcaagcctagtatcactagcagtagttcctgcgactcttagcaacacaacccgaatatttgctccctgcatctgggtcctccaccaggatgggcctgcgcatctgcattgctgtacagacaaacaggccttttaatttacatcctcctttaattctcattaaaatcgcagggtttttgtttgaaaaaaaaaaaaaaaaaa

SEQ ID NO: 3195 - DNA, 6032 bp, Homo Sapiens
  NM_007220
gtgcaggctgcggatccccgtaggcgagcgagcggctaggttcgtgatctggagagacgctcagattattaagttcctgcaacttaactgggaactgatcaagatttcaagctaaagatggtggtgatgaacagcctgagggtcattcttcaagcctctccaggcaaattgctgtggagaaagttccagattccgagattcatgccagcgaggccctgcagcctctatacttgtacttacaaaacccggaaccgagccttgcatccactctgggagagcgtggacctggttcctgggggcgatcgccagtcacccatcaacattcggtggagggacagtgtttatgatcccggcttaaaaccactgaccatctcttatgacccagccacctgcctccacgtctggaataatgggtactctttcctcgtggaatttgaagattctacagataaatcagtgatcaagggaggacccctggaacacaactaccgattgaagcagttccattttcactggggggccatcgatgcctggggttctgagcacaccgtggacagcaaatgcttcccagcagagctgcacttagtgcattggaacgcagtcagatttgaaaactttgaggatgcagcactggaagaaaatggtttggctgtgataggagtatttttaaagctaggcaaacatcataaggagctacagaaattagtggatactttgccgtcaattaagcataaggacgcccttgtggaatttgggtcatttgacccttcctgcctgatgcctacctgcccagattactggacctactcagggtctctgactaccccacccctctccgagtctgtcacctggatcattaagaagcaaccagtagaggttgatcatgatcagcttgagcaatttcggaccctgcttttcacttccgaaggggagaaagagaaaagaatggtggacaacttccgcccccttcagccactgatgaatcgcactgttcgttcatccttccggcatgattatgtgctgaatgtacaagcgaaacccaagccggccaccagccaagcaaccccctaaaacattcatatctaggcagtattttgcttttgctttaatatatactagcttactataaattgttaactagactattctaagtgcctgcatttgataatatttacagatgtgcatttcttagcatgagagtgcttcatcagtctttgaggaaggctattcggtaccagcaagagacacaagtttctcttacagatacctgttggtaattgtaatgccttttttttttctttaagagactaggtcttgctctgctgcccaggctagagtgcagtggccaaatgatagctcactgcagccttgaactcctaggctcaagcagtcctcctgccttagcctctagagtagctggggctacaggtgctggccgcctggcccagcttgtaatatctttttatgtctgacatttttgagctatctttttatgtttatccattagtggttctatagcactatacatagggattataatcaaaatttttaacatgtggtaaggcacagacactgaccagaactcaggccttgcagaaacagcctatgggcccagactggtacttcctggctgaatattggccatggttttagatgtattttattttataacatgaatgtgtattctttcataagggcttatcagtcagtatatttgccccagtgtttagttgttacaaggacatgatatgcttacttactatcagtttatgatgtagaaaatatattttgtaattataagaaaacaagacttttcctatacccagaaatccctttgcatttccgaagatcagatattttgcttaaaggtctgatcatataggaaatatatgcagaacattttaaagaaaatgcctggctgggcacagtggctcacacctgtaatcccagcactttgggaggctgaggcgggtagctcacttgaggtcaggagtttgagaccagcctggccaacatgatgaaaccctgtcactactacaaataaaaaattagccaggcatggtggtgagcacctgtaatgccagctactcgggaagctgaggctggagaatcgcttgaacccaggaggtggtggttgtagtgaaccaagatcacaccactgcactccagcctgggcaacagagtgagactctgtgtctaataaaaaaaaaaaaagaaaagaaaagaaaaaatgcttaaagtgcctagaacttagaattctttcattgcacatttccagaaatatttttcttttcttttttttttttttttttgagatggagtctcgctctgtcccccaggctggagtgcagtggcactatcttggctcactgcaacctccacctcccgggtttaagcgattctcctgcctcagcctcctgagtaactgggactacaggcacatgccaccacgcccagctaatttttgtatttttagtagagatggggtttcactatgttggccaggctggtcttgaactcctgacctcaggtgatccacccgccttggcctcccaaagtgctgggattacaggcgtgagccaccgtgcccggccttccagaaatatttttcaaaggactagtaatctaatagcctatagtttatattattattttgtattatttgcacgctgttacatagtatataatgataatgttttctacagtgaaagagctatcccgtcttccctttacaactgtctgaactttatttactcattagtcaaggttctttgcaaggcaggtgattaacttaaatatctcagtttatacagtggtttaaaagacttttgttatggtaatagggagagaaacttgtcagataggctaaaatctagataattctacatattctgaggaattcatgctcctgtggctcttgcttataaatatcttggaatgtttctgaatgcctctaagcctatgttcagactctgttgcgtcaatgactggtagtatttctttcattaatatgtttgtcatctggtctgcaagatagggttggatgaatatacttaacactactgaactgtacacttaaagatcgttaggaaggaaacgggactacatcaaacttaaaaatgtctgtgtgtcaaaggaagcaatcaacaaagtgaaaacgcaagctctagaatgagagaaaataattgcaaatcgtctatcttataaggagcccaaatccagaatatatgaggaacttctacaactcaacaacaaaaaaccaaataactcaatttttaaaaatgggcaaaggacttgcacagacatttctccaaagaagttatacaattggccaataagaacatgaaaatatgctcaacattgccaattattagggaaatgcaaatcaaaaccacaatgagatatcgtctcacgcccatcatgatggccactatcagaagaacaaaaaaataacaagtattggggaggatgcagagaagttgaaacccttgtgcactgttggtggtaatgtaaaacggtgcagtcattacggaaaacagtacacaggtttcccaaataactgaaaacagaattaccataagaattaccaccaaagcgggatctcaaagagatatttgtacacccatgttcatagcagcattattcacaatagccaagaggttctggaagcatcccaaatgtccatcaacagatgaatagataaaggaaatgtggtatatacagtcaatggaatattattcagcctttaaaaagaaggaaatcctgtcaaatgtacaatgtggatgaaccttgaaggcattatgccaagtgaaataagccagccaacaaaagaacaaatgctatatgattcctccatgtgaagtatgcaaagtagtcaaaatcatacaatagaaagtagaaaggtggttgccaagcaacggttgggggaaggggagagggtgaatttgtatttagtgggtacagagcttgtgttgcaagaattctagagatctgttgcaaaacaagtgtgattgtacttaacactactgaactgtatacgtataagtttgagaaatatctcttttaaaaagggggaaatgtgaaggcttttgcatgtatgccctaggaaatgcatagaattcttagaaaggtaaacatggtaaaaaaagaagtctttgttaactttctgcagttcacctgtttcaaagtatagttacctttaaaagggtaaacacacaagatatgcattttccaaagcatacaggctttcctcctagctgtcttgttttttatttttttttattttttttatttttttgagacagagtcgcgctgtcacccgggctggagtgcagtggcgcgatctcggctcactgcaagctccgcctcccgggttcacgccattctcctgcctcagcctcctgagtagctgggactacaggcgcccgccaccacacccggctattttttgtattttaagtagagacagggtttcaccgtgttaaccaggatggtctcgatctgacctcgtgatccacccgtcttggcctcccaaagtgctgggattacaggtgtgagccactgtgcctggccttcctagctgtcttgtgaaacgataagtcaaaaccctactgcagtgagttttccaaactgaagggagaagcaatgtacagaatgcctgacttgcccttacatcttatacctggtgttctggcatgattattaaccacactctttttcactttgaaccatgtcctggtttgcatggccagcttccctgcagaggtgatagaaactgacttgaggcagtttctttctccatgccttagttagatgaccctcaaaggggcacagcagatttccctggctactgatacaccttaacaagaagcttgtgttttttatgccctcaaaagtgttttacttatactttcctagacataaaggtggaaaatgggcctaaggtctgtcaaaggtcttggaaaagaagattgtattaaaattgctgtccgtcttcattaaataatactagatcgatacaatgctttctttacagtattagtggttggtgaaagacttccttcctattgttacagtatatgtatatatctgtaaaattaatgagatatcctttaacttgtagattagaaagcgactaaaaactcataggggatttactaaagaagcaacaatgggaagaagcagccgatcctcctcagtgcacctttttctgttgcacagtacagtgcacagtgtgctggcatcaccatatagggcaagctgtgaccgcctttctcctttcccagggctacatggtgccaagcaggttcagtgtacactggttaccaacctgtctgattccattgtgacagaacacactcacacccaatacattacatgaagcagatttattacttacagacaggaagcaagggacaaaagaggccctggctccattgtgagccagtcccccagggctcaagaaagctgcccagggcggggctgatggagtcttgattgtacgtgccccacttgcaccacagcctgccttgggttatataccataggagccacataactcattgggcaaagctttaaagtacatcctccttccaggggaaagaggaacacaacctcgctgtctcaaacagttccctaaatcaagatgttacattccctaggagggacaacaacaaggccaacctgtttcaggcagttcctccatatcaggatattgcattcccagtgcattctacagttattcttaagaactacaagcaaggaagaagggagaactgggtcagtccaaggccacctggagaactgtcttgtacatgggttagggtaaagttggctattctaaaactaagcatccgcccaaaagaagtcttggaagatgtctttccctgttaaattcagatgatggtaattatagtttggaagtggaattggcttttagagttacttcctgtaatgaaattaacaagcaattcaggcctatttctgaaaatgaattcagtggttaattgttaaaaataaatgtctaactccta

SEQ ID NO: 3196 - DNA, 5139 bp, Homo Sapiens
  NM_007222
gacgcgcgcgcgggagggccccgccttggccggctctctcccttccccctccgcccccggacggccgctggggcgcgcgcctctcctcgcacccccaccctgagtccccacactccgcggggccaccgagctgctgaggcccctttgcgggcccgccgagcggttccgggtttagggttcacaggtcagagttgactccctgaaaagtgcagccggtttgaaatgcaagatggcggcggcgtggcgctgagaggcgcggcggcccctgcaggagaagacagactgctgctttggacctgttggtaatgatggcctgagctaaacatctaactagaagggatacccttccatttcaaagaacagaatgctaaggaagctgtggcaagtgattggagttgtgcttcaaaaatttcagaaattcagcagtattttatctgccaacaataagctctttacttgattgcaccatgagaaagctgctaatgagacttgttgagcacaaaaatggacttgaagaaccaaaagccattgttttcaaatgaagaacactgaacagttttaagcctcgatgctttttaatcaccactgagcttttcctcataacatcagaatggcaagcaggcgaaaatcaacaacaccttgcatggtccttgccagtgaacaagatccagaccttgagttgatatcagatttggatgaaggtcctcctgtgcttacacctgtagaaaacaccagagcagagagtatctcaagtgatgaagaggttcatgaatctgtggattcagacaatcagcaaaataaaaaagttgaaggtggatatgaatgtaaatattgtacttttcaaactccagatctaaatatgtttacttttcatgtggattcggaacatcccaatgtagtgctaaattcatcctatgtttgtgtcgaatgcaattttcttaccaaaaggtatgatgcactttctgagcataatctgaaatatcacccaggagaagagaattttaagttgactatggtgaaacgtaataaccagacaatctttgaacaaacaataaatgatctgacttttgatggtagttttgttaaagaggagaatgcagagcaagcagaatctacagaagtttcttcttcgggaatatctatcagtaaaactcctatcatgaaaatgatgaaaaataaagtggaaaataaacggattgcagttcatcataactcagttgaggacgttcctgaagagaaagagaatgaaatcaaaccagaccgtgaagaaattgtagaaaatccaagttcttcagcttctgaatctaatacaagtacttccattgtaaacagaatacatccaagtactgccagcacggtagtgacaccagcagcagttcttcctggattggcacaggtgataactgctgtatctgctcagcagaattctaatttgattcccaaagtcttaatccctgttaatagcattcccacctacaatgctgcattggataacaatccccttttacttaacacctacaacaagttcccttacccaacaatgtcagaaattacagttctttctgctcaagcaaaatatacagaggaacagatcaagatatggttttcagcccaacgtttaaaacatggtgttagttggactcccgaggaagtagaggaggcaagaaggaaacaattcaatggaacagtgcatactgtacctcagaccataactgttattcctacacacatttccacagggagtaatggtttaccatctattttacagacatgccaaatagttggtcagcctggtctggtccttactcaagtggctggaacaaacaccttgccagttacagcacctatagccttgacagtggcaggcgttccaagtcaaaataatatacagaaaagtcaggtacctgctgctcagcctactgcagaaacaaagccagcaacagcagcagttccaacttctcaaagtgtcaaacatgaaactgcattggtaaaccctgattcatttggcattcgggcaaaaaagacaaaagagcaactggcagaattaaaagttagctaccttaaaaatcagtttccccatgattcagaaattatcagacttatgaaaataacaggcctgacgaaaggagagattaaaaaatggtttagtgacacaaggtacaaccagagaaattcaaagagtaatcagtgcttacatctcaacaatgattcctctaccaccattattatagactccagtgatgaaaccacggaatccccaactgttggtactgcacagcctaagcaatcctggaatccttttcctgactttactccccaaaagtttaaagagaaaactgcagagcagcttcgtgtccttcaggcaagttttctcaacagctctgtacttacagatgaagaattaaataggttaagggcacaaaccaaacttaccagaagagaaatcgatgcttggtttacagagaagaagaaatcaaaagctttaaaggaagagaaaatggaaatagatgaaagtaatgcaggtagttccaaagaagaagctggagaaacttctcctgcagatgaatctggtgcacctaagtcagggagtacaggcaagatatgtaaaaaaacacctgagcagctgcacatgcttaagagtgcatttgtccggacacagtggccatcaccagaagagtatgacaagttggccaaagaaagcgggcttgctagaacagacatagttagttggtttggggacacccgttatgcttggaagaatggaaacttgaaatggtactactactatcagagcgccaattcaagtagtatgaatggtctgtcttcccttaggaaaagagggagagggagacccaaaggacggggaagaggaagaccgcgtgggcggcctagaggaagcaaaagaattaacaactgggacaggggaccatcactcataaaatttaaaactggaactgcaatacttaaggattattacctgaagcacaagtttcttaatgagcaagaccttgatgaacttgttaacaaatcacatatgggctatgagcaggtcagagagtggtttgcagaaagacagagaagatcagaattaggtatagaattatttgaggaaaatgaggaggaagatgaagttattgatgaccaggaagaggatgaagaagaaacagatgatagtgacacttgggaacctccacgacatgtgaaacggaagctgtctaaatcagatgactgaaatctgcctaaaacgttgaaggagaatcaattcttcaactcaagatgtctgatttactgtgaatttgcccaatctttgatgacattgaaaacgttttggggcatacacactcaaaaagcaggatccaatacccaaaagaaatggaacttaatgttgtgccaaagttaaactactgcagttggtggaagttctgcaatgtaaatagaacactaattaaaaaacaacttgtaaaaatgcaatttaaattttaatacagtacatttttcttctaatatgatggagacattctgaatcttagactttctgagggggtttaatgaccactagagcttgtcctcatattcagtccagtttaatactgtatgtctagtaagatgggctatatattgcctctattctttgagatgtgattaagcttagaactttgaccaaaaattttacagtaaaaattgttagaaatgggtaaaaaaaaaaaaaaaaaaaaaaccctgatttattactatgtcttatttatcagaccctgcactaagattaaaagttgtgcatgggcttatacaatttcaaatgtaaaaacagcctatttatatatgttgaaacaataagattttatggtttcactggcccttaataattggatccttcattaaacacatccatgaataccactgtttctactgttacttgttccattagaagctgatttgctttttattaaactgcaggaaattaattctgaagaaggaaaagaaactgacatggtaatttggatagggtgaagctttgaaataaatactgcaccaaaaatgtgaaaaagaatcacgtagtaaatgtatacttagtgttttcttacaatcgtggaaatcagaaatgtttatacaggtgtcagatcagaatttttaagagttatctttcagtgaaattttataacagtttcagtgaatagagaaaaaattctgaactgatcataatgagttaaaagttagcttttcacttatgaatcatgggagtgttaactgttaactcttgccgtatcaggagactgaaagttcatactaatttacaaactttgtaaagactggtgctgttcattcatattgggaagaaccctttcttttgtgaccataggaccatttttcaaaatgcgctttcttcgtagaagaaatgttcagtttaattagctttggattttaacatgtttttctgaatgaccagatgtaggcttagccagtttattttctctaatttaatggataataaatattaagctcttggttaaatgtttttcagccattgaaaatgttatgaaaaagccttgaatatgcatgctgctttcatttttataaactttttattttttaactatagctttattagtaattccaaaatgctgcaatgtagctgatttcctcactcagacagctggctttgtgggtggcttttttcatactactgttaacttttttaaaaaagaagcaatgtaaagaccgtaatgcactaagctttttttttttcttttacacgtttaaaaacttcttaaagcactctgtaatataatgattaaattgctcccttttataaacattgctaatgtggtctgagttttgtttgacaataattttaatgttctcaaaatttgaaatgtcaagtattagaaatgaagcctttgaatatagttgtttcccttgcaatatgttaactctgtgtagctgtatataactattaatttccctcatctcttttataggcctgataaaactcttctctgacgtttgctagcttttaaatatatttatttgacagagcaaaagaaccctcttctggttgattgtgaccttgaatacaaaataaaagtagtgattagtagtttacagtgaaaaaaaaaaaaaaaaaaaaaaaaaaaaaaaaaa

SEQ ID NO: 3197 - DNA, 3292 bp, Homo Sapiens
  NM_007229
ctgtcccactgggcaggtgcctctgacggagaggaggcgtcgtcgggaagtatgtggccgtggctgctctggcatgatcctgaagactggcacgaaggggaatggagccgcacagagaatttcaggcatcagaggggaagcgcaggtttgtctacagattttgagcgttcgaagttgacccctgactaagtatactttgctgctccctcagcctttgaaaaaatgtctgtcacatatgatgattccgttggagtagaagtgtccagcgacagcttctgggaggtcgggaactacaagcggactgtgaagcggatcgacgatggccaccgcctgtgcagcgacctcatgaactgcctgcatgagcgggcgcgcatcgagaaggcgtatgcgcagcagctcactgagtgggcccggcgctggaggcagctcgtggagaaagggccccagtacgggaccgtggagaaggcctggatggccttcatgtccgaggcagagagggtgagcgagctgcacctcgaggtgaaggcctcactgatgaacgatgacttcgagaagatcaagaactggcagaaggaagcctttcacaagcagatgatgggcggcttcaaggagaccaaggaagctgaggacggctttcggaaggcacagaagccctgggccaagaagctgaaagaggtagaagcagcaaagaaagcccaccatgcagcgtgcaaagaggagaagctggctatctcacgagaagccaacagcaaggcagacccatccctcaaccctgaacagctcaagaaattgcaagacaaaatagaaaagtgcaagcaagatgttcttaagaccaaagagaagtatgagaagtccctgaaggaactcgaccagggcacaccccagtacatggagaacatggagcaggtgtttgagcagtgccagcagttcgaggagaaacgccttcgcttcttccgggaggttctgctggaggttcagaagcacctagacctgtccaatgtggctggctacaaagccatttaccatgacctggagcagagcatcagagcagctgatgcagtggaggacctgaggtggttccgagccaatcacgggccgggcatggccatgaactggccgcagtttgaggagtggtccgcagacctgaatcgaaccctcagccggagagagaagaagaaggccactgacggcgtcaccctgacgggcatcaaccagacaggcgaccagtctctgccgagtaagcccagcagcacccttaatgtcccgagcaaccccgcccagtctgcgcagtcacagtccagctacaaccccttcgaggatgaggacgacacgggcagcaccgtcagtgagaaggacgacactaaggccaaaaatgtgagcagctacgagaagacccagagctatcccaccgactggtcagacgatgagtctaacaaccccttctcctccacggatgccaatggggactcgaatccattcgacgacgacgccacctcggggacggaagtgcgagtccgggccctgtatgactatgaggggcaggagcatgatgagctgagcttcaaggctggggatgagctgaccaagatggaggacgaggatgagcagggctggtgcaagggacgcttggacaacgggcaagttggcctatacccggcaaattatgtggaggcgatccagtgatgagtcggggacaggccagcggggggacggaggcggcgggcccaggagcctcagccagccacgtgggcatccactccttttcctgcaagagatgatggttccattgctcttggcttcatggtgttcctggaaggcagatgagctggtcatttcgcctgggactcggcacctttccgagtgcagctggagggatctgagcgcaggaagacgcagaacaacagaaatagccgcccctccccgcccactgtgcctgttggcctatcatagatctctatgttcttgactttgtctctcctttccgagtcaatggtgggttacactgatcttgttccactgattactctctctgacgagtccatcacctgcaacttaaatgaacaagcttacatcccattttgagtgaagattttgaggtttttaatttaaaggctgtgtacagttatacttttttatacacctgttcatttctacttaaattatggcacagattgatgcgcaccagtcttgaggaaacgatctccctattcccttaccctgttactcagccacgccgtgtgtaggcttagcctcaggtggcagatgtttgaggaaaggaattatgccaggaaggtgggaccgggttatggtcgggtttctattgggaatgctctttgtgcttttgggcatctgaatggaagctttacatagaaccttaggtagaactcccccaaatcgccatatttaaaaattattttcactctattcttgcttaaaactgtactcttttgcaaattaacaattttatcactgattcagagttaaaaagaagactaacttttcaagcaaatgcatctgtaaagatgctttagattagactgtcatgtctcagtgtctatctgtatatattatttgatattcagagaatctaaagcactcgtctactgttttaatgagatttaacagcttttaacagtgagtttcgtttgtaaactgcttgaagtctgtggcattcaggcacacgtctggctggccggctgggtctcctcccgggctcagtgggcctggggcctctctgacgtggtgcctgctggagggaggctcgtcgtcaccagctgactgctggtccggcttctgaccggcctttgtcctggctccgtagcagaacactgtaaaagtgcccgcgtctttgcagtagttgcagatttcagtcgtcgtgttacttgtgcacaaacagaagctgggtcttacccgcagcacgagtgtctcgggctgcccggagtcgcccgggagcaggtgctgcagccagagttacgcgggggccacgcgggccggcgggggtggggggaacgtgggggaacctgtgtttcacgtgactcagcagtgcccgccgccgtcaccagctatgcattcactccgtttccagtgagcagatgtcttgcttggaaagtggacctgtgtctgtgtctgtcctgagaacttaccagcagaaatcctcatttctgtgctacggatttaccaaaaattgtcaagtctttttcagtttaacagttcctttacatgtgtagtatttgaggaaaaaaatcaataaacagttgatctcgtgcatatggaaaaaaaaaaaaaaaaaaaa

SEQ ID NO: 3198 - DNA, 3230 bp, Homo Sapiens
  NM_007236
accacccctgggttccctcccgggtccgcagtggaaacactgccctctcccttcttgacccctagcccttccttccctccctccttccctcctgtcgccgtctcttctggcgccgctgctcccggaggagctcccggcacggcgatgggttctcgggcctccacgttactgcgggacgaagagctcgaggagatcaagaaggagaccggcttttcccacagtcaaatcactcgcctctacagccggttcaccagcctggacaaaggagagaatgggactctcagccgggaagatttccagaggattccagaacttgccatcaacccactgggggaccggatcatcaatgccttctttccagagggagaggaccaggtaaacttccgtggattcatgcgaactttggctcatttccgccccattgaggataatgaaaagagcaaagatgtgaatggacccgaaccactcaacagccgaagcaacaaactgcactttgcttttcgactatatgatttggataaagatgaaaagatctcccgtgatgagctgttacaggtgctacgcatgatggtcggagtaaatatctcagatgagcagctgggcagcatcgcagacaggaccattcaggaggctgatcaggatggggacagtgccatatctttcacagaatttgttaaggttttggagaaggtggatgtagaacagaaaatgagcatccgatttcttcactaaaggagaccaaactgttccttgcggtctagtatttaagaactggaacttgaaagtcctccttctaccaactccacctccaccccctcattccccttctcccaaagtactactgctgttgcatgacaaccccaaatatgttctgtcaacacaaacctgcctttggtgtataaacagggcattacagaatggtacaccctatatatttctgttcagtatccattcactagttcttcatttataaatatcatcttccccattctgctgctgaatgccacacatccatccagtctgagaaagtgagagaggcaatcatgccaagaacaagccagcaaagctctttcaccagatgtagactgtagccctgctgccttccctccagcgagtctgccagcatgcttcttcatcctttttatatgttctttgcttcctacttccctgtcttccaacatactgttcacttactctggcagtctttctgcttttcattaagcctcaaaatctcctctgttctacttggcaccacaagctatgtcctatatatgtatttctgacttggcaggatagttcaggggtctggcagtttttatttaccttcattattaaatgggcctctgggatgttgcctcttcaggagctttttggtaatcaatacttctctcagaagtatgagaccatcctctgcactctgctctgtcatcaaaggctgctgggtggagataccctttttgaaaggtggccttggtgagaggtatggagccaagtcttctaggttgcttgcccacatcactctatctctggcctctgattctcaactttgtacctgtgtggctcctcttgttagtgcaatgttgactgttgaaaaagcagcagtatgcttacaggtttgcttagtttggggacaccgttaccaccagaatggctgctctgacaatatgcctagggactttctcatggcttttatttaataaggaggctgggcaccctataaagcctcatgcattcacacctttgcagcatggtttatgcctcagtgttatgtgcactggaatgttttccacttcacatttccaagtagaaatattagtgttacggaagtgcctaatatcccagtccaaatttttttttttttttttttttttttttgagacagagtcttgctctgtcacccaggctggagtgcagtggtgcgatcgctcactgcaacctcagcctcctggatttaagtgattctcctgcctcagcctcccaagtagctgggattacaggtgtgcaccaccatgcccggctaattttttgtatttttagtggagacagggtttcaccatgttggccaggctggtctcgaactcctgacctcgtgatccgcctgcctcagcctcccaaagtgctgggattacaggtgtgagccaccacgcctggccccagtccaaaatatttaaagattgtttccttagtgtcttgaagttttgcacaaaattcttttttttgagatggagtctcactctgtcacccaggctggagtgcagtggcgtgatcttggctcactgcaacctctgcctcctgggttcaagcaattctcccacctcagcctcccaagtagctgggattacagacgtgtgccaccatacctgggtaatttttgcatttttagtggagagggagtttcaccatgttggccaggttggtcttgaactcctgacctcaggtgatcctcctgcctcggcctcccaaagtgctgggattacaggcatgagccaccgtgctcagccgcaaaattctttatgaattttacacttggcaaatgttaatgacggaagccatagtctgctcctaatacatgtccaaagcattgactgttgtgtcattagctgcctggttacattagctccctggcttcttgtttagaccactgctaatcccttaaaaacaagaggtctggcactagtagcacaacctaaggtggcattacagatctttgagcgagccacagcaacttttctgccaagtcagcttagtttagacttcagtgaatcaggctattgctatcctaatgtatgtctctatgagtgtatttagccacacatctgcccttggttgactttctgactcattgcttgcttgcttgtttccttgctttggaaaactattgaagattgctaaaaaataccactgcaaagtgatggaaaagggtggagaacaggggagtagccaggctggatggctcaaatataaatgaatgaggaattctttatgaagtatcagtcagattttatgattaagtgatgtaatataggaattatgtaaaagggaagaatgtctgatactgatctattagagaggtactttagaggcttcttgattggcataaagttcctaaggttatagattttccccccttttggctgtatagcaaagtgttttaatccacggttgtgccttattgttccattaaaattgtatcttcgatccatcaataaatacttgtggttgaaacaaaa

SEQ ID NO: 3199 - DNA, 3270 bp, Homo Sapiens
  NM_007237
acttttcttttcctctttgactgagcaccgaggggcagttggcagcttcacctcagagctgcaggaaggaacggggcagtgaaaatcgaatcgggtgtgatcctaggccaagctcatggcccagcagggccagcaggggcagatggcaagtggagacagcaatctcaacttcaggatggtcgcagagatccagaacgtagagggtcagaacctgcaggagcaggtttgccctgagcccattttcaggttcttcagagaaaacaaggtggagattgcaagtgcaataacaaggccatttcctttccttatgggcctccgagaccgctccttcatctccgagcagatgtatgaacattttcaagaagcttttagaaacctggtcccagtgacaagagtgatgtattgtgtactcagtgaactggagaagacatttggctggtcacatctggaagcattgttcagcaggattaacctgatggcctatcctgatttaaacgagatttacagaagcttccagaatgtatgctatgaacactcacctctccaaatgaataatgtaaacgatttagaagatagacccagattactaccatatggtaaacaagagaacagcaatgcctgtcatgaaatggatgatatagcagtgcctcaggaagccttgagctcctcgccaaggtgtgagccaggtttctcttcagagtcttgtgagcagttagctctcccaaaggctggtggaggagatgctgaagatgcacccagcctactaccaggtgggggagtgtcctgtaaacttgctatacaaatagatgaaggagaatcagaagaaatgcccaagttactgccttatgatacagaagttctagaaagcaacgggatgatagatgcggcaaggacatacagcacagcaccaggggagaaacagggagaggaggaaggcaggaacagtcccagaaaaagaaaccaagacaaggagaagtaccaagagagtccagagggaagagacaaagagacctttgatctaaaaactccccaagtcactaatgaaggagaaccagagaaggggctctgtctactaccaggtgaaggagaagagggcagtgatgactgttcagaaatgtgtgatggagaagagccccaggaagcctctagctccctagcaagatgtgggtcagtttcttgtttatctgcagagacctttgatctaaagactccccaagtcactaatgaaggagaaccagagaaggagctcagtctactaccaggtgaaggagaagagggcagtgatgactgttcggaaatgtgtgatggagaagagcgccaggaagcctctagctccctagcaagacgtgggtcagtgtctagtgaactagaaaatcacccaatgaatgaagaaggagaatcagaagagcttgcttctagcctgctatatgataatgtaccaggagcggagcaatcagcatatgaaaatgagaagtgttcctgtgtcatgtgtttctcagaagaggtgccaggaagcccagaagcaaggacggaaagtgatcaagcgtgtggcacaatggatactgtggatattgcaaacaactccactttgggaaaacccaagaggaaaagaagaaaaaagagggggcatggctggagcagaatgagaatgagaaggcaggaaaacagccaacaaaatgataatagcaaagccgacggccaggtggtctccagtgaaaagaaggcgaacgtgaatctgaaagacctttccaagattagggggagaaagagaggcaaacctggaacccgcttcactcagagtgacagagctgcacagaaaagagtccgatcaagagcttcaagaaagcacaaagatgaaactgtggattttaaggctcctttgcttccagtgacctgtggtggggtgaagggaattttacataagaagaaattgcagcaaggaatcttggtgaagtgtatacagactgaggatggaaaatggttcacccccacggaatttgaaatcaaaggaggccatgcaagatcaaagaactggaggctgagtgtgcgctgtggcgggtggcccctacgatggctgatggagaatggatttctgcctgatcctccaagaatacgttacaggaaaaaaaagagaatactgaagtctcaaaacaatagctcagttgacccttgtatgagaaacctggatgagtgtgaggtgtgccgggacggaggggagctgttctgttgcgacacttgttcaagagtcttccatgaggactgtcacatcccgcctgtggaagctgagaggaccccgtggaattgcatcttctgcaggatgaaggagtctccgggaagccaacagtgttgtcaggaatctgaggtcctggagaggcagatgtgtcctgaggaacagttgaaatgtgagttcctcctcttgaaagtctattgctgttctgagagctccttttttgccaagattccatactattattatattagagaggcgtgtcaaggcctgaaggagcccatgtggttggataaaatcaagaaaaggctgaatgagcacggttacccccaagtggaggggtttgtacaagacatgcgcctcatcttccagaaccacagggcctcttacaagtacaaggattttggccaaatgggatttagactggaggctgagtttgagaagaatttcaaggaagtgtttgctattcaggaaacaaatgggaacaattgactggattagtggatgctgaaagcattcagcaaatggcaccctaaaatatgccgctggtttgccactgacttcaaaatgaggtcacttgggcacagcacatgcagggaggggcttttctctgagcctccttcatctgcccaaagacaaatcctcaaaaggaaattcaatcatcatgaatcacaaccccaagtatctcatcagccagggaagagtaagtgggatcacagggaaggatgttggcagcgacaccatcccatacaggctcttacctcttctcctgagggctgctccagacaacatttattacccagaagaccttttgtctgaaaaccagccaagctttattcaggacacacttcttgccttcactttcccacttccgtggccacctccatgcagaagccctaagcccacattctttcgatagctcacggtggtgcatgagtgtccatcatctgactcttctcggagtctcatattttgtgggactcctgtgcaaacatatgttattaaaatttttttcctcctgttaaaaaaaaaaaaaaaaaaaa

SEQ ID NO: 3200 - DNA, 1271 bp, Homo Sapiens
  NM_007240
tgggcgcggccatgttggaggctccgggcccgagtgatggctgcgagctcagcaaccccagcgccagcagagtcagctgtgccgggcagatgctggaagtgcagccaggattgtatttcggtggggccgcggccgtcgcggagccagatcacctgagggaagcgggcatcacggccgtgctaacagtggactcggaggagcccagcttcaaggcggggcctggggtcgaggatctatggcgcctcttcgtgccagcgctggacaaacccgagacggacctactcagccatctggaccggtgcgtggccttcatcggtcaggcccgcgctgagggccgtgcggtgttggtgcactgtcatgcaggagtcagtcgaagtgtggccataataactgcttttctcatgaagactgaccaacttccctttgaaaaagcctatgaaaagctccagattctcaaaccagaggctaagatgaatgaggggtttgagtggcaactgaaattataccaggcaatgggatatgaagtggatacctctagtgcaatttataagcaatatcgtttacaaaaggttacagagaagtatccagaattgcagaatttacctcaagaactctttgctgttgacccaactaccgtttcacaaggattgaaagatgaggttctctacaagtgtagaaagtgcaggcgatcattatttcgaagttctagtattctggatcaccgtgaaggaagtggacctatagcctttgcccacaagagaatgacaccatcttccatgcttaccacagggaggcaagctcaatgtacatcttatttcattgaacctgtacagtggatggaatctgctttgttgggagtgatggatggacagcttctttgcccaaaatgcagtgccaagttgggttccttcaactggtatggtgaacagtgctcttgtggtaggtggataacacctgcttttcaaatacataagaatagagtggatgaaatgaaaatattgcctgttttgggatcacaaacaggaaaaatatgaacatgatattttatagcttgggaagaaacttgcagatgatatgtgctgcctttgcttcttatcattcatggcagattgttagtgctttcaacatttcatttgaaatgggagaagataaaatcacttgatgtaacctggaaactatgctttacatggcaatcaaagccttttgatcatgtacattttatttgatattaaaatcttttataaccagaaaaaaaaaaaaaaaaaaaaaaa

SEQ ID NO: 3201 - DNA, 4386 bp, Homo Sapiens
  NM_007245
tccgcggtcttctctctccacccccgacaccgcggggctccccccgcccgcccacggcgggccccggctgcccgatccccctcgcttcccgcgctctccagcggggccccagccccggccccctctctccctcccttctctctaattccccttccggacgctgccatcatgttgaagcctcagccgctacaacagccctcccagccccagcagccgccccccacgcaacaggccgtggcccgtcggccccccgggggcaccagccctcccaacggcggcctcccggggccgctggccacctctgcggctcctcccgggcctccagcggccgcctccccctgcctggggcctgtggccgctgccgggagcgggctccgccggggagccgaaggcatcttggcgccgcagccgccgccgccgcagcaacaccaggagaggccgggggcagccgccatcggcagcgccaggggacagagcacaggaaagggacccccacagtcacctgtgtttgaaggcgtctacaacaattccagaatgctgcatttccttacagctgttgtgggctccacttgtgatgtaaaggtgaaaaatggtaccacttatgagggtatcttcaagacgctaagctcaaagtttgaactagccgtggatgctgtgcaccggaaagcatctgagccagcaggtggccctcgtcgggaggacattgtggacaccatggtgtttaagccaagtgatgtcatgcttgttcacttccgaaatgttgacttcaactatgctactaaagacaagttcaccgattcagccattgccatgaactcgaaagtgaatggggaacacaaagagaaggtgcttcagcgctgggaggggggtgacagcaacagcgacgactatgacctcgagtctgacatgtccaatggatgggaccccaatgaaatgttcaagttcaatgaggagaactacggtgtgaagactacctatgatagcagtctttcttcttatacggtgcccttagaaaaggacaactcagaagagtttcgtcagcgagagctgcgtgcggcccagttggctcgagagattgaatcaagcccccagtaccgcctacggatcgccatggagaacgacgatgggcgcactgaagaggagaagcacagtgcagtccagcggcagggctcagggcgggagagccccagcttggcatccagggaggggaagtatatccctctgcctcaacgagtccgggaaggtccccggggaggagttcgatgcagcagctctcggggcggtcggcctggccttagctctttgccacctcgtggccctcaccatctggacaacagcagccctggcccaggttctgaggcccgtggtatcaatggaggcccttcccgcatgtccccaaaggcacagcggcctctgagaggtgccaagactctgtcttcgcccagtaataggccttctggagaaacttctgttccacctcctcctgcagtgggccggatgtatcccccgcgttctcccaagtctgctgcccctgccccaatctcagcttcctgtccagagcctcccatcggctcggcagtgccaacctcttcagcctccatccctgtgacctcatcagtctcagatcctggagtgggctccatttctccagcttctccaaagatctccctggcccccacagatgtaaaagaactctctaccaaggaacctgggagaactctggagccccaggagctggctcggatagctgggaaagtccctggtcttcagaatgaacagaaacgattccaactggaagaactgagaaagtttggggcccagtttaagcttcagcccagtagctcccctgagaacagcctggatccttttcctccccggatcttaaaggaggagcccaaaggaaaggagaaagaggttgatggtctgttgacttcagagcccatggggtctcccgtctcctccaagacagagtccgtatcggataaggaggacaaaccacccctggcaccatcaggaggcactgaggggccagagcagcccccaccaccttgtccaagccaaactggcagccccccggtgggcctcatcaagggagaagacaaagatgagggccctgttgctgaacaagtaaagaaatcaacgttgaaccctaatgctaaggagttcaatcctacaaagcctctgctgtctgtgaataaatccaccagtaccccaacttctccggggccccggactcattcaactccctccatcccggtgctgacagcaggccagagtgggctatacagcccccagtacatctcctacatacctcagatccacatgggaccagctgtgcaggcacctcagatgtatccatatcctgtatccaattcagtgcctgggcagcagggcaagtaccggggagcaaaaggctcccttcctccgcagcgctcggaccaacaccagccagcctcagccccgccgatgatgcaggccgccgcggctgctggcccgcctctggtggctgccacgccctattcttcctacatcccctacaaccctcagcagttcccaggccagccagccatgatgcagcccatggcccactacccctcacagccggtgtttgcccccatgcttcagagcaacccacgcatgctgacgtcgggcagccatccccaggccatcgtgtcatcctctacccctcagtacccttctgcagagcagcctaccccccaagccctttatgccactgttcaccagtcctacccacaccatgccacacagctccatgcccaccagccgcagccggctaccacgcctactggaagccagccgcagtcccagcatgcggcccccagtcctgtccagcatcaggcggggcaggccccacacttgggcagtggacagccacagcagaatctgtaccacccaggggccctgacaggcacgccgccctctctgccaccgggaccttctgcccagtcccctcagagcagcttcccccagccagccgctgtgtatgccatccaccaccagcagctgccccacggcttcaccaacatggcccatgttacccaggcccatgtccaaactggaatcacagcagccccgccccctcaccctggggctccccacccgccccaggtgatgctgctgcacccaccccagagtcatggggggcccccccaaggcgcggtgccccagagtggggtgcctgcactctcagcttccacaccctcaccctacccctacatcggacacccccaaggtgagcagcctggccaggcgcctggatttccaggaggagccgatgacaggattcgtgagttctcattagctgggggaatttggcatggaagagctgaggggctgcaggtggggcaggatgcacgggttctgggtggggagtgaggggtcttggaggcagggctgtcccacagggcgcccgccgacctgcacctgtctgtgaagtatgtagggtgggcagaagccacagtcgccgccgccaggggcttgctcctggctctgtcctttgcttccctccgtcctcgctcagttgtgatccagcagcccccctccccactgcctccccagctctcagtgaccccgactgtctcctgacttagccgaggtaaggtcagtgcagcagacagggccagactggggtgtggggggctgagctgggcacatgagtgagggctctggcttactgggaaacagcgattgacctgtgcttctgacagcccccgagacaccttgaggaggccgctccttcccagacacacccccacgcccccactggacggcattggaggaagggacagctgcttgggttctaatgctcctgctctcttctctttcccctccaaccagttcaatctcatccctcccagcagctccccttccaccccccggggaactgaagattgtcctggccgcgacctgagacctccatgagtggagggaagagtgatctatgtctcttcccccagcagctcggaccactcccagccccccatccccccgttccccaggggagctggggaattcctgccaagcaccttgaatgggaggggcctcacagagggcagggccagggtccagcaggggtggggggttcctgctctgcccctgcccgtccccacccagtcttgccctcccatcctctcatctattcccccgctggagacggaagatcttttattttctattatttataacttcagacttgggccccctgttctttctttcccattaacttgagtgacctgtgtgagagacagacagatgccccacgaggatggctggacaaggacttttactttttattacataaaaatattaaaaaataaataaaaaaaataaaattttaaactaacttaaaaaaaaaaaaaaaaaaaa

SEQ ID NO: 3202 - DNA, 3137 bp, Homo Sapiens
  NM_007246
gcgcccgccggtcccgtcgccgccgccccgcactcgggcgagcgcgggagccgcgcagtagacggagcgcgcccggccgagcgggccatggccgcgggggccgccgccgcaggtggtggcgcgcggtgaggagagcgcggcgccccctccggggcggatggaacgcggctcggcgggcgggcagtgccggcgtccgcggctggaatggtgctggctgtgttggtcggtgcctgcgttctgaagcccgagaggagccacaatggagacgccgccgctgcctcccgcatgcacaaagcagggtcatcagaagcctctcgattcaaaagatgataataccgaaaaacactgcccagtgacagtgaatccttggcatatgaagaaagctttcaaagtcatgaacgaattaagaagtcaaaatttgctgtgcgatgtcacaattgtggcagaagacatggaaatttctgctcatagagtggtgctggccgcctgtagtccttattttcatgccatgtttacaggtgagatgagtgagagccgagcaaagagagttagaataaaagaggtagatggctggaccctgaggatgctaattgattatgtttacactgcagaaattcaggttacagaagaaaatgtacaggtacttctcccagcagctggtctcttacagttacaggatgtgaagaagacttgttgtgaatttttggaatcccagcttcaccctgtcaactgcttaggaatccgggcttttgctgatatgcatgcatgtaccgaccttctgaacaaggccaacacctatgcagagcaacattttgcagatgttgtacttagtgaagaatttctcaatcttggcatcgaacaagtgtgcagcttaatctcaagtgacaaacttaccatttcttcagaagagaaggtatttgaagcagtaatagcatgggtgaaccatgacaaggatgtgaggcaagagtttatggcccgactgatggaacatgtacggttacctttgcttcctcgggaatatttagttcagagggttgaagaggaagcattggtcaagaatagcagtgcttgcaaagattacctcattgaagcaatgaagtaccatttgctgccaacagagcagcgtatattaatgaagagtgtccggacccggctgaggacacccatgaaccttcccaaattgatggtggtggttgggggccaagcaccaaaggctatccggagtgtggaatgctatgactttaaagaagaaaggtggcaccaagtagcagagttgccttccaggaggtgcagggcaggcatggtctacatggctggacttgtttttgctgttggtggctttaatggctcattaagagttcgcactgtagattcctacgaccctgtgaaggaccagtggaccagcgttgctaacatgagagaccggagaagcactttgggagctgctgtgttaaatggattattatacgctgtgggaggctttgatgggagtacaggtttgtcatctgtggaagcatacaacataaagtctaatgagtggtttcatgtagctcccatgaatacaaggaggagcagtgttggtgtgggtgttgttggaggtttgctctatgctgtaggaggttatgatggagcatcacgtcagtgtcttagcacagtagaatgctataatgctacaacaaatgagtggacctatatagcagaaatgagcaccaggcggagtggagcaggtgttggtgtgttaaacaatttattgtatgctgtaggaggtcatgatggccctttagtacgaaaaagtgttgaagtatatgatcccaccactaacgcatggagacaggttgcagatatgaacatgtgcagaagaaatgcaggagtttgtgcagttaatggtctgttatatgttgttggaggggatgatggttcctgtaacttggcgtcagtagaatattataacccaacaaccgataaatggacagttgtgtcatcgtgtatgagcacagggagaagttatgcaggggtcacagttattgataaaccattatgagcctgaaggacattttcagcatatttatacatgagaaacagccttcaacaagtatttgtgaagtgactgagaatctagcacttctccacttgtagctgcactttaagtctcagcagaagatacgatcgtctgcctttataggcctcagatactgaagattatttttggtagaagcaccgtgtaggctttttctgcaatgagcagcagctgactgaattttcataagaaacttggactgcaggacttaatctgtagtctttagacaacagttgctttcataaagactagttcttatcaaccttgaatgactacagattattttgtgaaggaggatgaagtaatgtgtgttcttgtaaaattaaattttatctttatttcttctaaaaatctgtataccaggaactgaaaatctttgaacagatattaaaatctacgtaagtatacaaactagttgagggatacactgtttgcttttataaaataactttgattacatgaatataataaattatgtgcatataaatgtgtgtctatatgctttcctttaaatatgtttgaaaagatgtttgaaacttgattatactatttataattggcacagtactttgaattatgccagtactacattgtaaaacagagttgtattttttgatatttaacaatgcttaacactttaaatgccacttctgaggaatggacctggtgtaacacacttgaatatgtgtgatgccaaactttttaaaatacaatataaattatgcttatttattattttctttagtttaatcttggtcatgttttggtgtgtatttttaatttttttcttaaattaacactttggcatgaacattactgcaggtttttgatgaatataatgaatgtatggaattcaattgaatttgcatggtcttcggaattttttctgtgtgtataaatttagctgctattaacagaagagagaactttctgtgagtagccatgtgtgttgatcagatacagtttttctgagatcttcaattaatctcactttaaaaatgaccaaaacatgtctttcttgaattaactttgaataaaagtttgtatattatttgtttca

SEQ ID NO: 3203 - DNA, 8181 bp, Homo Sapiens
  NM_007247
tgtttgacccggaagtggctgtgttcagctgacagctgctgataaggtggcggcggcgaaggcagcggcaggtcgggagcaagatggcgctgcggccaggagctggttctggtggcggcggggccgcgggagctggcgcggggtccgccgggggaggcggcttcatgtttcctgttgcaggtgggataagaccccctcaagcaggcctgatgccgatgcagcaacaaggatttcctatggtctctgtcatgcagcctaatatgcaaggcattatgggaatgaattacagctctcagatgtcccaaggacctattgctatgcaggcaggaataccaatgggaccaatgccagcagcgggaatgccttacctaggacaagcacccttcctgggcatgcgtcctccaggcccacagtacactccagacatgcagaagcagtttgccgaagagcagcagaaacgatttgaacagcagcaaaaactcttagaagaagaaagaaaaagacgccagtttgaagagcagaagcaaaagctcagacttttgagcagtgtgaaacccaagacaggagagaagagtagagatgatgctttggaagccataaaaggaaatttagatgggttttccagagatgcaaaaatgcaccctactccagcatcgcaccccaagaaaccaggcccttccttggaggagaagttcctagtatcttgtgatataagtacatctgggcaggaacaaattaaattaaatacttctgaagttggccacaaagccctaggcccaggttccagtaagaagtatcccagtttaatggccagtaacggggttgctgtagatggatgtgtaagtggtaccaccactgcagaggcagaaaatacttcagatcaaaacctgtcaattgaagagagtggtgtgggagtatttccctcacaggatcctgctcagcccagaatgcctccttggatttacaatgagagtttggttccagatgcctataagaaaatcttagaaaccacaatgactccaactggaatagatactgccaaactgtatcccattctgatgtcatctgggcttcccagggaaactcttggacagatatgggccttagctaatcgaactacacctggcaaacttacaaaagaagaactttataccgttctagccatgatagcggtaacacagaggggcgttcctgcaatgagtcctgatgctttaaaccagttcccagcagctcctattccaactttaagtggcttttctatgactctgcctacaccggtgagtcagccaactgtgataccttcaggtcctgcgggctccatgcccctcagccttggacagccagtcatgggcattaaccttgttggaccagtgggtggagctgcagcccaggcttctagtggtttcataccaacctaccctgcaaatcaggtagtaaagccagaagaagatgacttccaggattttcaagatgcttctaagtcaggatcccttgatgactcattcagtgatttccaagagttgcctgcttcttcaaaaacaagtaactcccagcatggaaacagtgccccttctttgttgatgccacttcctggaactaaagcattgccttcaatggacaaatatgctgtgtttaaaggaattgcagctgacaagtcctctgaaaatactgttccacctggagatcctggtgataaatatagtgctttcagagaacttgaacagacagcagagaataaacctttaggagaaagctttgcagaattcagatctgcaggaactgatgatggtttcaccgattttaaaacagccgatagtgtatcaccactagagccaccaacaaaagacaaaacttttccaccatccttcccctcaggaactatacaacagaaacaacaaacacaagtgaaaaaccctctgaacttagcagacctagatatgttttcctcagttaattgcagcagcgagaaaccattgtctttttcagctgtgtttagcacatcaaaatcagtttctacaccacagtcaacaggttctgctgctactatgacagcattggcagcaacaaaaacttctagtttggctgatgattttggagaattcagcctttttggggaatattctggtctagcacctgttggggagcaggatgactttgcagattttatggctttcagtaatagctctatttcatctgagcaaaagccggatgacaaatatgatgcccttaaagaggaagccagtcctgttcctctaaccagcaacgtgggcagcacagtgaagggtggacaaaactcgactgctgcgtctaccaagtacgatgtcttcagacaactttctctggaagggtctggactaggtgttgaagacctgaaagataacactccttcaggaaaaagtgatgatgattttgctgacttccactccagtaaattttcttccataaactcggacaaatccctgggagagaaagcagtggctttcagacacaccaaagaagactctgcatcagtgaagtccttagatctcccttccattggtggcagcagtgttggcaaggaggactctgaagatgcactctctgttcagtttgacatgaaattggctgatgtgggaggagatcttaagcatgtcatgtctgatagctctttggatttaccaacagttagtggccagcatcctcctgctgcagatatagaggacttaaaatatgctgcttttggaagctacagtagcaattttgcagtgagcacacttacaagctatgactggtcagacagggatgatgcaactcagggcagaaaactctctccatttgtcctctcagcaggaagtggatccccctcagccacctcaattcttcaaaagaaagagacttcatttggcagttctgaaaacatcaccatgacatctctctccaaagtaacgacctttgtaagtgaagatgctcttccagagaccaccttcccagctcttgccagttttaaagacacgattcctcagaccagtgagcaaaaggaatatgaaaacagagactataaagatttcacaaaacaggacctgcctacggctgaacggagccaggaggccacgtgtcccagcccagcgtccagtggtgcctctcaagaaaccccgaacgaatgttcggatgactttggagagtttcaaagtgaaaagcccaaaatcagcaaatttgacttcttagtagccacttcacaaagcaaaatgaaatccagtgaagaaatgatcaaaagtgagctggcaacctttgacctttctgttcaaggatcacacaagaggagtttgagccttggtgataaagaaataagccgttcttctccttctccagctttggagcagcctttcagagaccgttccaatactctgaatgagaagcccgccctgcccgtcatccgagacaagtacaaagacctgacgggagaggtggaggaaaatgagagatatgcatatgaatggcagagatgcctggggagtgccctgaatgtcattaagaaggcaaatgataccttaaatggaatcagtagtagttctgtttgcacagaagtaattcagtcagctcaaggcatggaatatttattaggtgttgttgaagtgtacagggtaaccaagcgtgtggagctggggataaaagccactgcagtgtgcagtgagaaactccagcagttgctgaaggacatcgataaagtatggaataacctaatcggcttcatgtcactcgccacactcacaccagatgaaaactcgctggatttttcctcctgtatgttacggcctgggattaaaaatgctcaggagcttgcctgtggagtgtgcctcttgaatgtggactcgaggagccggaaagaagagaagcctgcagaagaacatcctaaaaaagcattcaactcagaaacagacagtttcaagctggcctatggagggcaccagtatcacgccagctgtgccaacttctggatcaactgtgtcgaaccaaagcctcctggcctcgtcctgcctgacctgctctgaacaactcctctgtgaagcattgacttttttttttctgtgacaccccacggggtgacagggaccaataaatagaatgcgagcactgcacagttcgcttccctgaatcgatatgaagaacaccgcaagggacggggcccccgtcatccccacggccagtctgcaggacttcaggtaaaattgtcccacccaaactgcacgtggcaccagaagcttgctcacttatctctacttaagattttctgaaatacggaccacggctttcttgatctaaggaagaacttgctgctgcagtattgaaactgtgaagaactgacatttgaagaaaaatagattaccgttgcgggactagaatgggcgactgcttggagccagtgcttgtttttatctaggacacttactgtcctgtgaagtagaatacatttatctgcatttagtttgttaatgtctgaaatgaataaaaagaggaaattgcgattaaactgatgttctgctttttatggagaagattctgcccatctcccctggacagtagcaggcaggtgagggcagattttacccacttggttgtcacaactgaaccagttctctactccttcccttcacttctgtccactctcaagactttttcccaaaacatgcctgggcactctgcagccgtgaagaatgctcattttgacagaggcccaaatcctgtgtattaggataatatccttccccccgggagccttcgctgcaaacctgttctgccgcatgcaaagactgtgaccatggagttttctcagacaagatttggaaaggcagtggaatgaaatctctttgcagtggcctctctccaaatttccaaagatgactgcatagggaccaacactgcctgactttgcagtatctgtgagaaaaacctgaaaattaattcagggtgaaaatgtggagctctcggcctagtgtaaagtatcaagatgtatatttatgggatagatacatgacttagaagaagtagaagaaaattgtccagaaacagtactgaattttagatagaaaaggctcatgcttcctggagtagggaattgtctttgccatttaatgtgaatgcataaaattaggggaaaaacccaagtggctaagagctgtgttattcctgggaagaactaccaatctagggcacacgtctctctgaattgttgattatgcgctttatgaagagatttttcaatctcgtgtgctttactttgtgtggtttagaccctctgacctagacttttatttttaaactgaaaaagttggtcttgtctatataattgctgcttttacataatttattttcccctctcaggacaaattctgtcttgctccatcttacagcttttccatgttctccaagaaaggtgtggaacattttcattaaacagctgttgctgaggcttctgcttgaccttctgcgtgcccgaatgcacagagaggcaccgaggagagaaaggcttttctcactcgctcccgatgataccgtctctggccattcctgactgaggcagctcactctgaatgggcacctttggagcttttgcccaccacaaggctagtggggtgtttctaacaacacaagtgggacagcttttggcaggcttttcctgaggcctcggcgcttccatcctggacagcaccacttccacatggagctggaatgcaagcaggctgctaattggccttaaaaattctttgtttttttttgagatggagtttcactcttgttgcccaggcttgagtgcaatggcacaatctcagctcagtgcaacctccgcctcccgggttcaagcgattctcctgcctcagcctcgtgagtagctgggattacaggcgtgcaccaccacgcccagctaattttgtatttttagtagaggcaaggtttctccatgttggccaggcttgaactccggacctcaggcgatccgcccgcctcagcctcccaaagtaccgggattacaggcgtgagccactgcgcctggcctaaatttcataacagaaccatgacagcagaatctacctttgcaataagaatgtttcccaggagttagagaccagccctgggcatgatggtaaagaccccagctaattatacaaaaaataattagccgggtaggtggagtgcatctgtggacattcgtggtcccagctactaggtaagctgaggcgggagatcacaagtccaggagtttgaggctgcacgtgacagcgtaggtgatgacagagcgagacactgtctcttaaaaaaaaaaaaaaaaaagtttcccagtttgaatttgtattgctgaagcatttttttgaaatgctatatagatgcctgtcatgtcacagtggcccagtatcaacattttaaaaagctcacttggtagctgggctggtttctattcctgagaaattccagaatgcctcagataaaattccttagtataatccccattttccttaccaaggatggtaggcttagtcactccttgggaggtgccacaggaaaattcagcagatgtcaacagaaaaaaagcctttgctatgaaaagtattcactacctttcatatctcttgaatacttgaaatgtttaattagatgccaccaatagggatccaaggagtgtgggacacggttgcgctgcttttctttataaacgtttattaaaatggctcaacgctgcattcagcttcacctcagctcttcttgtcagccaggagccccgtgtccttggaaactgtagccaaggttacttatttccatactgtgcattgtgtcagcccgcttcaccccactgcttgaatggccattaataagcacttttctttttttggtgggatgttttgcctttaaaatttttatggcttagtgtgtaatttaatttttgtctggacatgcttgagatagaagaggtactggatatatgaggatattttccatgctttatttttcctgtggctactagttagcattccataggggttgtgaatttttaattatttgaatattttgtgtacatatacatatttgaagggttttgggggggtcttatttgtttaaaggtgtcttctgtttgcctatttcaagtgtacttcagctttgcaaagattatagggctgtatgttacagaaataggaaatgctggccctgtactggggaccactacaaaaattccctttagccgggcgtggtggctcacgcctgtaatccccagcactttgggaggccgagccgggtggatcacccgaggtcaggagttcaagaccagcctggccaacatggcgagaccctgtctctactaaaaatacaaaaattagctgggcatggtggcaggtgcctgtaatccgagctactcgggaggctgaggcaggagaattgcttgaaccagagaggcggaggttgcagtgagccgagatcgcgccactgcactccagcctgggcaacaagagcgaaactctgtctcaaaaataaaaaattccctttaacaccttcaaggtcaaatgcctgcctttgtgaacagttaataaactgacattttcagacatttgccattcagaagggagcattgtagcctgctgtagaccattccagcaaatgtcagaatgcagggcaagatgtgtgtcgactatgttttttatgtttaagttacttacttatttcttcaggtaagtgtgtaccaaataacaatactgaaaagccctccccttgccaggccgaggaaataaagcttaagtgaaacagctcttgggggaaaaatgccactttacaaatacttttctaacaaaatagcattataatgaagtttttacttaattccattatttatatgttgacgtgaatgtaagtggttaaaaagtattcatgtgggacatctcattactttgtagctgtggctttattaaccagtgaatgctgtggcccttagcgaaatgcgttgtcttctgcgtgatgtggaattcgcgcctgtattttaaaagatggtgtggtttctcccttgtttgtattttaataaacaactgctctaattgatgtgtttagacattataaagcttcacctttaaaatattttcagggtctgttctgaaatcaccccttgttaaacttctctaaccaaaatacaagtgtagaagaatgtcaggctaaaaaaaaaaa

SEQ ID NO: 3204 - DNA, 10923 bp, Homo Sapiens
  NM_007249
attcatttcctgagaactgcagagagccgctgagaggctctgcgtgtgcgtgtgcgcgggtgacgccgtgtgtgtgcgagtgtgtgtgtgtgtgtgcgcgcgcgcgtgtgagagagagaaagggagagagagagggggactctgtgtgagggaaagaaaacaatttctcctgctctgcagcttctgttcaggatcaatgtgactctaagaacaaatggatgaatgaatatccatatgaagagaaaaacaataaagaatatcaacacctttgagaacagaatgttaatgcttgatgggatgccggcagtcagagtcaaaacagagcttttggaatctgaacaagggtctccaaacgtccacaactatcccgatatggaagccgttcccctgttgctaaataatgtgaaaggggagcccccggaggactcgttatctgtagatcacttccaaacacaaactgagccagtggacttgtcaataaacaaagccaggacgtcccctactgccgtttcatcctccccagtttccatgacagcatctgcctcctcaccttcttcaacttcaacctcttcatcgtcttctagtcgtctagcctcatccccaactgttatcacatcagtatcttcagcgtcatcttcgtcaacagtattaactccagggccccttgtggcctctgcatctggtgttggaggccagcagtttttgcacattatccatcccgtaccgccttcaagtcccatgaatttacagtctaacaaactgagtcatgttcaccgcatccccgtggtggtacagtcggtgcctgttgtctacacagctgtaaggtcacctggaaatgtgaacaacactattgtcgtgccgcttttggaggatgggagaggccatggcaaagcacaaatggacccccgaggcctatctcccagacaaagtaaaagtgacagtgatgatgatgacctgccaaatgtgaccttagatagcgttaatgaaactggatctacggccctttccatagccagagcagtacaagaggtacatccgtccccagtatcaagggtccggggcaatcgaatgaataatcaaaagtttccttgttcaatttcaccatttagtattgagagcacaagacgccagagacggtctgaatccccagactccagaaaacggcgtatccacagatgtgattttgagggatgcaacaaagtgtacacaaaaagttctcacctgaaggctcaccggaggacacatacaggagagaaaccttacaagtgtacctgggaaggctgcacctggaagttcgctcgttcagatgaactgacgaggcattaccgcaaacatacgggagtgaagccattcaagtgcgcggactgtgatcgcagcttttcccggtcagatcatttggccctgcaccgccggaggcatatgttggtgtgaggaatgctacctgtccagctgagcgtaagagctggatctcttagcggcacccaattcagcagggctgaatccccttcacagtgttaacacaaaagggcatcaccatcccacgatgtctgaaaccagagcaggaaaaagaaggcacacttcttttggtctgaaggtaacccccatcatgactagacgagaaccgtctttacccgggcctgggagctcagtgacataaatgctgaagagacaggcattgttttccgtgctgtgtcctctgccatttaaagatgtttgtagcttgtacattttctgagctgtcagacattttgttattgataccttaaaggtcacctaccacaaattgatggctagagcaagaccttttaaatttggatgaatctcccatcatcccatcccttaacccctttttacagaaattttagttacaatctgagtaagctagaacacacatccaatctgttaccagcaagcagcatgaaagtagaaacgaagaagcagatggagaggtcccattacctgcaaagaaagggcactcaggcagccctttgcaatcgcgatggcagccactagatatcactctcaacttgtcattctgccatgccctgaagaaaaccaacattgaatctttcatttgtttgtcgttgattgtttttgttttgtttcgattctgttttgttcatctgttcgagcagaggggcagttgaagtctcgtcctggtctctgccctggcatggactggcacagaggtgttctgtagttgaataggaagagcctgtctaaaaaactactgccccacttcaaattgcagtgttctgtcacctaggcatcatctcttcctgcccctagtatttgattacaaggaaccaggggaaaaaaactttcttagacacactggcaccaaggtaagaggtggggctgcccaggcaaagtcagtgaacatgaaaactcagacaaagcagagatggaaataatgcgcctcttgaggagaaaagcaataatgaataaaaggactttcctacaataacttcactgaggactcacgttaccaattttcatacttactaaagggattgtaaaaaacaccccagcattttaggtgtcttggttccatttacagcactgaggtaatctttctgctgtttgttgtcctgcttggttgagtaccacaattaaagattatgctccccttttcttgtttgaaaacagttatttggtgactagaaaggcaagggaggcatagccgggaattaactcttcggttaatgggtcagttctccttggaactgaatcagtggaaagagaatgcttcccatagaaagcccgacatggtgctagtttcctctcttggagagccaaggataagtgactctccaataggttcttctataccgatttcattttctaaactgtatcaggacccaggtgtcctgcattggcatctgcagggatattgaacccactcatcctgtgcagaggatgagaggaaggtgttagttccatcagccccataaaattatgaacctttttgcaactaggaacatatacagtaaacaagcaatacatcaccaacgagcattctttcagaaaaattaccatatttttgtccccaccacaagctgggtttttttccagctttctgtggctgaggggctggtgagattttttgttgttattgttgttgttgctagaattttttatagcttagatataaaaggtctccaacaaagacctttgcaatatattttaattacaaacacttgattttgggaattgcacatattaacctcacaatattactagctcatttttaaatgtctggacattctgaaataatttccggttacagaattaccctttttaggatcatcttctaattcagataatcttattctgatgaagcgagaactatgaacgttgaaacaaggacaatttgtgttggatggtattcaaaaggaattttttaaaacattaagcaacagtgtaatgattttcaggtcaaattatggcttcacaaatatgtgctctatattgtctgccaggtctcaaaaattcatcaagcaatttccctccaacaagggctgcagttctagtgataaatagcatctttagctgcacagtctactactcatcaaccagtgggttttttttagcacctggaaagtttttttgtactatatgcaactcctacttcacattgcctgtgaccattcagaatagaaaaaggtctgttgatgcatgccagtgctggttactagtcagtgacagagaacacagagagggacaaacacagccatgaaccccctggcactagtaccagcacctagttggcaagtagtgggtgcatctctcaagtgaagtgtagatttgtatttagtcctgcttgctctcataaaaagagccagttcttttctctgctgaaagatgtcttgagagtattacaggtagacttggtttttagaattcataaaactgacaggcaggggaatcttcctgagtgacagcttggtttaaatttagcacagaactagatgagttgcacttttctaataacataggatggatttggggaagggaacattttccctcatcctctgaaagtggaaaccagactgagatggtaagttaactgataaaacctgtcagcattccatcattttccccttttgacgtatcagtacttctaagaagggatctaagcacaattaagtgaattgagtccctggtctagcctcaggaactgaaacttctttggggcttgtcttgagacgtggcaaattctccttggtgagttttctaaaagtatttccccatggaaaggagaaagtggtttgggacagaaagaaatggaatgtcttcagtcatggaagagcctccatttcatctcatgtccatttctagcctctttcaaaaagcacagtgcatcatgagcaacagaaaagcagtagaatcctaaaggacataacagttgttccgtaactagaagcattctttgattttaaatttgaagctgttcagtttgcagctggggatatgtgcatggttgggaacttatacacatagagccattaactacttaagcagctgcagtagacctgattttctgtttgcagtatagagattgatttcaagggagttacattatttgaaaagttatgactttcagcctttgaggttttaagaatcccttttcatggtctgatcttaagttgtttgaaaaaagattcacgcttctgcatccacctctgccctcattctgtcaattgtgtgtggactctgagaagcctgcttgataacttgtcttaagttctattaaggcagttagactgagatttctaatgacttcaccataaagattatacttctgcctggcgtcgtttctataaaacactataggacatttgttttcaaaagcagttgagtaacagcaacataaaccacattttttaaaaaaatgagcacttttcattcacttgaaagcttaagtgggaaaaaggaagatgattgtcaggggaaaaacttacaaaatgctacagtgtttacaaatgccagttccaggtgattagaaaggccgttttcattatggttcagatttggaatagcttatgcaaagattgtgttcatttttatacaattctttttaactttaaattgccatctgtgttttaaacataattctgcactttggaatcagttcattagaatgataacatttatatggataaagatgcagtattccttattctgtacttgatttattatacttaccaaagctgcaactgaataaatctggtgaggtgaggccttcaaaatgtattaatacgcctttgttatgttgttatgactgcttagaaatgtagccatgatgttgttctaaagatgtcttaacatttatagtgaggattgacagaaattaagcagtgttaagaataccagcatccatgttacagtctgcgtataagggactgaatgtgaggtaactcttatgaatcataataggcccagaaagccttaatattcatagttcataatccagtctcagattttgctcttcaatgttgcctgtaaacttagcaggtaaatgtattctagtataaaacatcattgaccaaatctcttcctttagtttttctgaggtagtgcatcccattaaaaaagtctcttcaattagatttggctttagtttagaaaggggtttggtaagtcatgtcttccatatgacatttctactcatccccacactgccttccacttaacctgtacagacagccccaacacatgcacatgtgtgtacacaactgtatatgcagcagccagtgggctaacaaatatcagcaaagaacttttttaaaaagaatttgtaataatccgtgctgtctagaaatgtgagttacttaccttattaggaaaccggcttataatactatatatgactctgcctgcattttatagttaagaaatgtacataaaaattgctatattttcacagtttcattataatgtctgtttagtaacccatgtccactgatactttaaatatgctaattactgagcaattgcaatagaaatccagattttcataagaaaatgaaatagaaggatactgcatctttaaaaaatagagtgaagatattttactgtattcgtaacatatgtgatagtggaaaaagtattttcaaactcacaaattttacagaggttgtaaatagtttgatgaagtatgttgggaaagagagcttctagttttcatcacaataaaaagaaaaaacttgttcagatatgccttgtatatcttacacacaatgagtgaaattgccatgggaactctgtccaactttgtcagagcatgctcttcgtgttctgttcaaaatagagtggccacttgtcatggtttagccaggatggtttaaaatataatgaagtcattttaagttgcagacaactgattccaaactagtaatgtcttttcctgaaaagggcaaaacagctgcacaggattttgcttgtactaaagaggagcatcttacaattgttctcttttctcagttatctccctcctcaacagagtgtgaacaaccatacaggtgtttattcttgttttattccagggagactgcttttaggtataactacatgttgacaagattaagtgctgtggatatggccacgtgttaaaggaatctatactcgcaataggaataagctaatgcccattttcagaaataaattaaatgctgaaagtgcctgtcagtaaaccttatgaccaatgagatattcctatacttttacacagcaataattcttaataagactgggttttttcctgcacatgtgaacacacacacacatacacacagagagagtaaatacatacacatagtaaatcaaatctgttcacatgcccacaaaaaacgcttttatagctttcaaatatacctaatcttgtttacattaacatttcttaatttgatctttctaacttgcagaacgttaagaacacaaatctgaacattaagtttatcttcagtgaacactattgcatatggtaattataatttccagataaaaagttgactgtcatttgccccaaacttatgaaacagtatgtatgattcaaaaagttttgctcagttaaaaacaccaatttatttggcgcaaaagactgaaggatatttgtttgcttgttcattttatccactcatatcaaacgcacaaattcatctttacatttcttcattcccctttcccctaatatttcctattatcatcttaagaatcattttggaatgaatattgacagaatcatttctccccaaaaagtctgttgaagtaccactgacacttagtaagcctagcctttaaccatctttgcagttagtcctaaaaattaccagatgcacattcagaagctcacaggttttttcctgtaattactgtactgctaaaagtggagtcatggatagaaatatacaatgagactatatgaatagacatgaaccctggaaattctccaaccctgccatctcagagcacaaattcacccaaacaagctactgaggctatcagtaaaattatactcatggagagtcacacatcgggtaagggcaattttaaaagtaggactgtgattaaacattcaggctttagacttccatgatggactcagaccacaggcctcaaaaaaacatccactgttttctcctcccaatgttagaaagaagaaaagggagacggaaatgtaccaggataagggggtaaaataaccaattaagtgtcaaaggaaagctgctgggttccttaatctcactgaagtcaagtcttctgactgggcttcttaccatgtgttgtctgaaaaaactaaagtaccttgaaaggttacacattcagcaaaccatgaagataatagctattctttattaaacactgtgtgccaagcaatagactaggcaatttttagatacgttacctgcaacctgtacaacatttctacactttatggatgggaaacggagacatgggaagtgtggctgagttgttcatggatgtagaaatagtaaacggcagagtaggaaagtgaaaccgcctatctctgacctggaggtctgcctgtatctttcccactccaccacactgcacgtgggtgtcccgaaaccaccttcccagattcctgactctcagtaattttattatggacaacatgcatgagtagtcatcatatttttcaagtgaaatatcgggacatgatataacacatgacttaacaatggtactgaatatttgaaatcaggcctttcccggaaaatcatgcatgaaggatcattataaacaaacaatagcaaccagttgtctccccgaacttgtcacttttctcataaatgtctggcctggagctccaaaatcatccaaatacttagtagcattttagcctgagtacactttctcagttcctcaactctttgtatacctttccaccaatatagacattctagaatctgcttcagatgcatttgaaattttcacccccatggaactagtgattaatatcagagcccactcttgcagttggtaatggggtggcaatcaaacgttcagatgatgataaaggagagataatggataattctttttcagagttctcacttaacagctctgttgtggaatgttttaaatagtcttataaataatttgtttatagtattgttgttagtttaattgaattttatgtaagaagctgtccaacatcagagaaatgaaattcctcccactttctgtgtagaacaaggtctctgacagtattgattcatggaagtactaatggacttagaaaacattaagagaatgtcatttctcatagtgtttctgtttctgaaaatgaatctcctgaattattatctttctccctgttacttggctggggaaagagatagaagctgtataaacaaattctcttccatgctcaaagcaagtgttccatgtgcacaacctgctgcagactggggcccttctcagttaattgggtttcacaagcaataatttctccacaacaaaaaccacaacttgaagtgagttgaaaagagatcaatagtggaaacagtcgcctcagtactttttctttctggatttcatctctagaaatttgaagtgtttgagacagagtccaccctttgtgcaaggcgagaaccaatgaatggactccttgtgtgaattattgcatcttcttccaaagcaggttcatcaagactttcacagagattcatttttgttgagaagtaagggttaataggaggatagaatttggatccaaatctagtgataaaagtgtccaagcaatcaaaaagtaagatattttagggacataccaacatcttccctttctgctaatttcatgctccaaagatatggcaaaaaaaaaaatcataaaaagtgcttttgccctacttgtgttctagttttcccatggcagaattttgtaattacatccagaatatagtgtatattttgttcctcaaactttattacattggatggatattgttgaactggggcactggtgcctatattcaaggctctttcctatcaacgtgtctgtccacgatttgttgtgtttaaagcttcattttgaaaaatcactgtccccctgtggggtagtgactgtattgttttgttcatgtctatgtgggacacattgcatcacatggcaaaccaactctctgtggatgtgagataagtacttataaaaccagcttgaaaacatcgtcttatgtattatgtcatcctgcatcataatgcaattatgtgtatcataacatgctcatttaaaaaaagagaaaccagcaaattcatgtttgtccatagaagaatgtactcagaactttgtgttgtgaaacgatgagaacagaccacctttaagatacccacctgccacttaaaatgacttagttataattagtagtagtctagacgttgttcttggtgtgtgggggtcaattctaacgtcatgttcttttgaataaatctctcagtcatatttgaaaaaaaaatacatgggaataaagaaaaatatcatctttggccaaatcaagcaggcatcttttttcttttccttgacgtttagctcattatacgtggtgattggatcacgagatctgtccgtgtgaaaatacagaaacatcctttagtttacaaaacagttattctaggcttgaagcctctgaacagcaaattgaatagatgggctgcatctgatttgctttatggatgtaattttacaaaacactcttgggtctctgaccccagggagttaagagtgcccagaggaggtcctacacattaaaggataaagccccccagtgatgctggcaagcaaatgtgttgagttcttaaatcttcatttggttttctgttcaggattttaattgcaaatgaatttatttctccagtttatctaaagacctaatttcccaatagtttcctctgcatttatatactctgtagtgtttaggcaaccctgttataagtttattaatattatgtaagtgttgttcttgtatttatgtatagtgtatgtattgtaaatatactcagagcttttttccttttactgtaaaatggtgatttttttgccctatgataatgtaaagggagaccctcctaatgagattctctcagaggatgattattccagtctattctcagagatttaaatgaacaagtgttattgtttttaatggtgtctcagacatattctgttggtgcattgcttttctgtattcaactttcctatgaattgagctgtgaactgaaatagagtttaaacctttaactgtatgcatttgtataattatctgaatgaaggcatgaaggttaaataaagcattttgtatggaacaaaactccctaactgactcagacactttggaaatcatagttattaaccattctaattaaacctttgttatgaaaagttttaaaaaaaaaaaaaaa

SEQ ID NO: 3205 - DNA, 1747 bp, Homo Sapiens
  NM_007255
gcggagcgggaggcggaggcgccgcgtaggcccgggaggccgggccggccgggctgcgagcgcctgccccatgcgccgccgcctctccgcacgatgttcccctcgcggaggaaagcggcgcagctgccctgggaggacggcaggtccgggttgctctccggcggcctccctcggaagtgttccgtcttccacctgttcgtggcctgcctctcgctgggcttcttctccctactctggctgcagctcagctgctctggggacgtggcccgggcagtcaggggacaagggcaggagacctcgggccctccccgtgcctgccccccagagccgccccctgagcactgggaagaagacgcatcctggggcccccaccgcctggcagtgctggtgcccttccgcgaacgcttcgaggagctcctggtcttcgtgccccacatgcgccgcttcctgagcaggaagaagatccggcaccacatctacgtgctcaaccaggtggaccacttcaggttcaaccgggcagcgctcatcaacgtgggcttcctggagagcagcaacagcacggactacattgccatgcacgacgttgacctgctccctctcaacgaggagctggactatggctttcctgaggctgggcccttccacgtggcctccccggagctccaccctctctaccactacaagacctatgtcggcggcatcctgctgctctccaagcagcactaccggctgtgcaatgggatgtccaaccgcttctggggctggggccgcgaggacgacgagttctaccggcgcattaagggagctgggctccagcttttccgcccctcgggaatcacaactgggtacaagacatttcgccacctgcatgacccagcctggcggaagagggaccagaagcgcatcgcagctcaaaaacaggagcagttcaaggtggacagggagggaggcctgaacactgtgaagtaccatgtggcttcccgcactgccctgtctgtgggcggggccccctgcactgtcctcaacatcatgttggactgtgacaagaccgccacaccctggtgcacattcagctgagctggatggacagtgaggaagcctgtacctacaggccatattgctcaggctcaggacaaggcctcaggtcgtgggcccagctctgacaggatgtggagtggccaggaccaagacagcaagctacgcaattgcagccacccggccgccaaggcaggcttgggctgggccaggacacgtggggtgcctgggacgctgcttgccatgcacagtgatcagagagaggctggggtgtgtcctgtccgggaccccccctgccttcctgctcaccctactctgacctccttcacgtgcccaggcctgtgggtagtggggagggctgaacaggacaacctctcatcacccccacttttgttccttcctgctgggctgcctcgtgcagagacacagtgtaggggccatgcagctggcgtaggtggcagttgggcctggtgagggttaggacttcagaaaccagagcacaagccccacagagggggaacagccagcaccgctctagctggttgttgccatgccggaatgtgggcctagtgttgccagatcttctgatttttcgaaagaaactagaatgctggattcttaagtgatatcttctgattttttaaatgatagcacctaaatgaaactttcaaaaagtatggcaggccagacaaaaaaaaaaaaaaaaaaaaaa

SEQ ID NO: 3206 - DNA, 2817 bp, Homo Sapiens
  NM_007259
atgaacccgggaagacgaatctcgaccactgtttcgcaaataccgcgtgtgatttattaaatgccgtctctccgagtcccaagcggccgggagcattatgccacctcccttgccctcatctctcactgccatgcaagaaagcgttaatggcaaatagggcacgtagccacactccgtcgttcctgcttccaagcaaaccttgtgccaggttcctcatttcgcgaggctccactctcttgggcttcaggctgccgctgggcctccagcaccaaagggcaataggggtctgagagtccgggcctcaggcatcttcaggccgcaggtgggtggagaatagcgcccgcgcgtggcagcggcccaggccgtctcagccggatttttccatccccggggtaggcttggtcccctgtacactccagcggaactacaactcccagcaccgtggctgcccggactcccggaagccgaatcccggctgggaggaagcagctgagacccggccaacagactgggggttaatttagccagaaaagggggcgggaagggctgtagggtacttgtcaattcgccgccatgaacgtggtttttgctgtgaagcagtacatttccaaaatgatagaggacagcgggcctggtatgaaagtacttctcatggataaagagacgactggcatagtgagtatggtatacacacaatcggagattctacagaaggaagtgtacctctttgaacgcattgattctcaaaatcgagagatcatgaaacacctgaaggcaatttgttttcttcgacctacaaaggagaatgtggattatattattcaggagctccgaagacccaaatacactatatatttcatttatttcagtaatgtgatcagcaagagtgacgtgaagtcattggctgaagctgatgaacaggaagttgtggctgaggttcaggaattttatggtgattacattgctgtgaacccacatttgttttccctcaatattttgggttgctgccagggtcgaaattgggatccagcccagctatctagaacaactcaagggcttacagctctccttttatctctgaagaagtgtcccatgattcgttatcagctctcatcagaggcagcaaagagacttgcagagtgcgttaagcaagtgataactaaagaatatgaactgtttgaattccgtcggacagaggttcctccattgctccttattttagatcgctgtgatgatgccatcaccccattgctaaaccagtggacatatcaggccatggtccacgaactactaggcataaacaacaatcggattgatctttccagagtgccgggaatcagtaaagacttaagagaagtggtcctatctgctgaaaatgatgaattctatgctaataatatgtacctgaactttgctgagattggtagcaatataaagaatctcatggaagattttcagaagaagaaaccaaaagaacagcaaaaactagaatcaatagcagacatgaaggcgtttgttgagaattatccacagttcaagaaaatgtctgggactgtttcaaagcatgtgacagtggttggagaactgtctcgattggtcagtgaacggaatctgctggaggtttcagaggttgagcaagaactggcctgtcaaaatgaccattctagtgctctccagaatataaaaaggcttctgcagaaccccaaagtgacagagtttgatgctgcccgcctggtgatgctttatgctttacattatgagcgacacagcagcaatagcctgccaggactaatgatggacctcaggaataaaggtgtttctgagaagtatcgaaagctcgtgtctgcagttgttgaatatggtggtaaacgagtcagaggaagtgacctcttcagccccaaagatgctgtggctatcaccaaacaattcctcaaaggactgaagggagtagaaaatgtatatacacagcatcaacctttcctacatgaaaccctggatcatctcatcaaaggaaggcttaaggaaaacctatatccttatttaggccccagcacactcagagacagacctcaggatatcattgtgtttgtaattggaggagccacctatgaagaggctctaacagtttataacctgaaccgcaccactcctggagtgaggattgtcctgggaggcaccacagtgcacaacacgaaaagtttcctagaggaagttctggcttctggactgcacagccgaagcaaggagagctctcaagtcacatcaaggtcagcgagcagaagatgaaacggtggttgggggaagggcacagcttcctctcttgtccccactacaggttttccctactaaacaaaggtgttggagagcagctttgggttctgtgctggttgttagaactcatctccaggtagcccacggatacgtggttggcacagacacaagactcccagagttgtcctaacaataagtctgagcccatctcaacccacttttctccggtagtctttatgtatctgttagcacaatcacttcagttactgatgaattttgttgggatctgacttggggaaagggttatcagagcctagaggggcttaaaaagtaatcatttgatgtacataccacactccttggcttcctttctcttcccttaaccctttctgcttttcattaaccacattcctgcacaactcatttctgaaaacctaccatgtttctttacagagccatccaaaaattttttgtccctacatagcaattttctgtggcactgagaaaccatgtatgaccacaataaaaatccattttgtgaaagga

SEQ ID NO: 3207 - DNA, 1911 bp, Homo Sapiens
  NM_007261
cggggaagtgagagtcggggatcagtcctgcaagctacggagtcactacagggagaggtctcatcactagaaatagccgaagaacctgcagcctcaaccagcgttaaggaggacgtgccgtttctagggagtcttagtcggggctcaccagcttcctgcattttctgaccggctccaggaatagaaccaaaagaagctgaacaaggaagcagcgcggcaccaagaaaagcagaagtcggggccttggaggcgtgactttcccctcgggtccaggtagggcctggagctgctgcaagtgccgcctgtgctggggaagggaccatgtggctgccttgggctctgttgcttctctgggtcccaggatgttttgctctgagcaaatgcaggaccgtggcgggccccgtggggggatccctgagtgtgcagtgtccctatgagaaggaacacaggaccctcaacaaatactggtgcagaccaccacagattttcctatgtgacaagattgtggagaccaaagggtcagcaggaaaaaggaacggccgagtgtccatcagggacagtcctgcaaacctcagcttcacagtgaccctggagaatctcacagaggaggatgcaggcacctactggtgtggggtggatacaccatggctccgagactttcatgatcccgttgtcgaggttgaggtgtccgtgttcccggcatcaacgtcaatgacacctgcaagtatcactgcggccaagacctcaacaatcacaactgcatttccacctgtatcatccactaccctgtttgcagtgggtgccacccacagtgccagcatccaggaggaaactgaggaggtggtgaactcacagctcccgctgctcctctccctgctggcattgttgctgcttctgttggtgggggcctccctgctagcctggaggatgtttcagaaatggatcaaagctggtgaccattcagagctgtcccagaaccccaagcaggctgccacgcagagtgagctgcactacgcaaatctggagctgctgatgtggcctctgcaggaaaagccagcaccaccaagggaggtggaggtggaatacagcactgtggcctcccccagggaagaacttcactatgcctcggtggtgtttgattctaacaccaacaggatagctgctcagaggcctcgggaggaggaaccagattcagattacagtgtgataaggaagacataggcttttgtcctgcctcgccatcggagctctcatgggccccaggaagtccagggacagctcccttatacctggcccacgtccttctcagcctgccctcgacaacagtgaccaacagacaggcagctgggtttcccaggccatccctctgttgccatcagcttgattggcttccccgagggccagcagggctgggggctccggagagcagcaggaagcactcccagccaccagtgcctgtcacctctttcccctttgcccctgcttcatcccagctctgtgtgtggaggacaaagcttcttcctgcgtggctccaggaaaagatgtggctcacgtaggtggcacctgccaatagctttgtcaatcacagccccataggaacgtctggaattgcttgggagttggggagaactgtcaagaagagtgaagagagtgccaaagcggagatctgttcacctgggggccatggaggggggacccactaaagatcaagatcaaagattctccccatctcacagacaaggaaactgaggccagagggaggagagaattgctcatggctccagaactggtggcaagtttctctggactcttaggtttatttttaatatgaaatataaaaacagtttcaaatatcttattgagggagaagtaaaaacttatttaaacaaaaaaaaaaaaaaaaaaaaaaaa

SEQ ID NO: 3208 - DNA, 2280 bp, Homo Sapiens
  NM_007265
aaaatgctcccgccgacgcacagcagtgacgacacacaaggtttcggggactgagtgggtttcagactttctctcaggatttccgctggcttcaggttccggtcaggcgtcgggacagagcctgatccaggcttcggcggccggtggcagctctcgatcagctctcgcagtcggagaggcggctaaggaaaggtgccacagcagagacgcgaaggagaggccctagaaccttttcaaagaagaatggaagaaaccatgaagcttgctacgatggaagacacagtggagtactgcctgttcctgataccagatgagtcaagggactcagataaacataaagagattcttcagaagtacattgagagaataatcactcggtttgcacctatgctggtcccctacatctggcagaatcagcctttcaatcttaaatataaacctgggaaaggaggtgttcctgctcatatgtttggcgtgacaaagtttggggataacattgaggatgaatggtttattgtttatgtaataaagcagatcacaaaggaatttccagagttagtagcaaggattgaagacaatgatggtgaattcttgttaatagaagctgctgactttctccctaaatggctggatcctgaaaatagcaccaatagggtatttttctgccatggggaattgtgtattatccctgcaccaagaaaatctggagcagaatcttggttacccaccacacccccaacaattccacaagcattgaatataatcacagcacattcagaaaaaatacttgcttcagaatctatacgagctgctgtgaataggcgcatcagagggtacccagaaaaaattcaggcctcacttcatcgagcacactgcttccttccagctggcattgtggcagtgctaaagcagcgccccagattggtggctgcagcagtccaggcattttacctacgagaccctattgacctgcgagcttgtcgtgttttcaagacattcttgcctgaaacacgaataatgacatcggtcacattcactaaatgtctatatgcacaattggtgcaacaaaggtttgtgccagaccggcggagtggatacaggctgcctcctccatctgatccccagtaccgagcccatgaattgggcatgaaattggctcatggatttgagatcttatgctccaaatgtagcccacatttttctgactgcaagaaatcccttgtgactgcctcaccactctgggccagtttccttgaaagtctgaaaaagaatgattactttaagggactgatagaaggttctgctcagtaccgggaaaggctagaaatggcagagaattacttccagctctcagtagactggccagaaagttctcttgctatgagccctggtgaagaaatcttaaccttattacagacaataccatttgatatagaagaccttaagaaagaagcagctaatcttcccccagaggatgatgaccagtggttagatctctcaccagatcagctggaccagctgctgcaggaagctgttggcaaaaaagaatccgagtctgtttccaaggaggagaaggagcagaactatgacttaactgaagtctcagagagcatgaaagctttcatatccaaagtctcaacccacaagggagcagagctgcctcgagaaccttctgaggctccaatcacttttgatgcagattcttttcttaattattttgataagattttagggccaaggcctaatgagtcagattctgatgatctggatgatgaagactttgaatgtttagatagtgatgatgacttggactttgaaacacacgaacctggcgaagaggcttccctgaaaggaacacttgataatctcaagtcatacatggcccagatggaccaggaactagcacacacctgcatcagcaaaagtttcaccactaggaaccaagtggaacctgtatcccagactaccgataacaattcagatgaggaagattctggtacgggagaatctgttatggcaccagtagatgtagacctgaacctggtttcaaatatattggaatcctatagctcccaagctggactggcaggacctgcttccaatcttttacaaagcatgggagtgcagctgcctgacaacaccgatcacagaccaacaagtaagccaacaaaaaattaaccagcacatttagcttctcttttttctttttaaataaatattgaatatgattctgttcaaaaaaaaaaaaaaaaaaaaaaaaaaaaaaaaaaaaaaaaaaaa

SEQ ID NO: 3209 - DNA, 1849 bp, Homo Sapiens
  NM_007266
attgcggaagtttctctacccatgcggtgtctctatggtcgggtgggtggggccaggaggaagatggcggcgtccgcagctgccgctgagctccaggcttctgggggtccgcggcacccagtgtgtctgttggtgttgggaatggcgggatccgggaaaaccacttttgtacagaggctcacaggacacctgcatgcccaaggcactccaccgtatgtgatcaacctggatccagcagtacatgaagttccctttcctgccaatattgatattcgtgatactgtaaagtataaagaagtaatgaaacaatatggacttggacccaatggcggcatagtgacctcactcaatctctttgctaccagatttgatcaggtgatgaaatttattgagaaggcccagaacatgtccaaatatgtgttgattgacacacctggacagattgaggtattcacctggtcagcttctgggacaattatcactgaagcccttgcatcctcatttccaacagttgtcatctatgtaatggacacatcgagaagtaccaacccagtgaccttcatgtccaacatgctctatgcctgcagcatcttatacaaaaccaagctgcctttcattgtggtcatgaataaaactgacatcattgaccacagctttgcagtggaatggatgcaggattttgaggctttccaagatgccttgaatcaagagactacatacgtcagtaacctgactcgttcaatgagcctggtgttagatgagttttacagctcactcagggtggtgggtgtctctgctgttctgggtactggattagatgaactctttgtgcaagttaccagtgctgccgaagaatatgaaagggagtatcgtcctgaatatgaacgtctgaaaaaatcactggccaacgcagagagccaacagcagagagaacaactggaacgccttcgaaaagatatgggttctgtagccttggatgcagggactgccaaagacagcttatctcctgtgctgcacccttctgatttgatcctgactcgaggaaccttggatgaagaggatgaggaagcagacagcgatactgatgacattgaccacagagttacagaggaaagccatgaagagccagcattccagaattttatgcaagaatcgatggcacaatactggaagagaaacaataaataggagactttagcacacttcacttgtttctagaagtccagaattttggacctccacgtgaaagaactgttcttacctctgaactgggggctcccataagggataattttcctcagagtagcaaagtttctcttattagagaaatcttgtgactcagatgaagtcagggatagaagacccttggacctggcaggttaatgctgattattccttggcctttcccttgtatttatgcaaggaaggatatactgagctgatactcttccaagcctacaacttcaagttttatcatttgaactcaagtacttttgctgctgaggaatggaatcaaaagaacgtagtctcctggtgaccacctcagatctctattattaggctagatgtatagcctctactcccccagcttcttgctcttgaccctgcactgtaagttgcccttctattagcagccaaggaaaagggaaacatgagcttatccagaacggtggcagagtctccttggcaatcaaccaacgttgctatgaaatatgcctcacactgtatagctcattataggacgtcaggtttgttgaaaaaagtgggcaagacatgattaatgaatcagaatcctgtttcattggtgacttggataaagactttttaattttaaaaaaaaaaaaaaaaa

SEQ ID NO: 3210 - DNA, 2789 bp, Homo Sapiens
  NM_007267
aggaagcggaggaaggtgaagtaggaccgaattcctgtgccgaagaggcctgcagtgggagagcaggatgggggctccggaggtggcgcccaggctctgagctaccctaggtctgcagactagcgggcattggccagagacatggcccagccactggccttcatcctcgatgtccctgagaccccaggggaccagggccagggccccagcccctatgatgaaagcgaagtgcacgactccttccagcagctcatccaggagcagagccagtgcacggcccaggaggggctggagctgcagcagagagagcgggaggtgacaggaagtagccagcagacactctggcggcccgagggcacccagagcacggccacactccgcatcctggccagcatgcccagccgcaccattggccgcagccgaggtgccatcatctcccagtactacaaccgcacggtgcagcttcggtgcaggagcagccggcccctgctcgggaactttgtccgctccgcctggcccagcctccgcctgtacgacctggagctggaccccacggccctggaggaggaggagaagcagagcctcctggtgaaggagctccagagcctggcagtggcacagcgggaccacatgcttcgcgggatgcccttaagcctggctgagaaacgcagcctgcgagagaagagcaggaccccgagggggaagtggaggggccagccgggcagcggcggggtctgctcctgctgtggccggctcagatatgcctgcgtgctggccttgcacagcctgggcctggcgctgctctccgccctgcaggccctgatgccgtggcgctacgccctgaagcgcatcgggggccagttcggctccagcgtgctctcctacttcctctttctcaagaccctgctggctttcaatgccctcctgctgctgctgctggtggccttcatcatgggccctcaggtcgccttcccacccgccctgccgggccctgcccccgtctgcacaggcctggagctcctcacaggcgcgggttgcttcacccacaccgtcatgtactacggccactacagtaacgccacgctgaaccagccgtgtggcagccccctggatggcagccagtgcacacccagggtgggtggcctgccctacaacatgcccctggcctacctctccactgtgggcgtgagcttctttatcacctgcatcaccctggtgtacagcatggctcactctttcggggagagctaccgggtgggcagcacctctggcatccacgccatcaccgtcttctgctcctgggactacaaggtgacgcagaagcgggcctcccgcctccagcaggacaatattcgcacccggctgaaggagctgctggccgagtggcagctgcggcacagccccaggagcgtgtgcgggaggctgcggcaggcggctgtgctggggcttgtgtggctgctgtgtctggggaccgcgctgggctgcgccgtggccgtccacgtcttctcggagttcatgatccagagtccagaggctgctggccaggaggctgtgctgctggtcctgcccctggtggttggcctcctcaacctgggggccccctacctgtgccgtgtcctggccgccctggagccgcatgactccccggtactggaggtgtacgtggccatctgcaggaacctcatcctcaagctggccatcctggggacactgtgctaccactggctgggccgcagggtgggcgtcctgcagggccagtgctgggaggattttgtgggccaggagctgtaccggttcctggtgatggacttcgtcctcatgttgctggacacgctttttggggaactggtgtggaggattatctccgagaagaagctgaagaggaggcggaagccggagtttgacattgcccggaatgtcctggagctgatttatgggcagactctgacctggctgggggtgctcttctcgcccctcctccccgccgtgcagatcatcaagctgctgctcgtcttctatgtcaagaagaccagccttctggccaactgccaggcgccgcgccggccctggctggcctcacacatgagcaccgtcttcctcacgctgctctgcttccccgccttcctgggcgccgctgtcttcctctgctacgccgtctggcaggtgaagccctcgagcacctgcggccccttccggaccctggacaccatgtacgaggccggcagggtgtgggtgcgccacctggaggcggcaggccccagggtctcctggctgccctgggtgcaccggtacctgatggaaaacaccttctttgtcttcctggtgtcagccctgctgctggccgtgatctacctcaacatccaggtggtgcggggccagcgcaaggtcatctgcctgctcaaggagcagatcagcaatgagggtgaggacaaaatcttcttaatcaacaagcttcactccatctacgagaggaaggagagggaggagaggagcagggttgggacaaccgaggaggctgcggcaccccctgccctgctcacagatgaacaggatgcctagggggacggcgatgggcctcacgggcccgcccagcaccctgagaccacactgttgcctcccagtgaccctgctgggacaccaggacaaggaagacagtttcgcctctcgaaagccgcagctgcgcctaggctggagctggaagggtgggtgaatccggcttgggcatccccaatgaactctgccctgcctgggactctatttattctgattaaaggggttttgcaaatggg

SEQ ID NO: 3211 - DNA, 1869 bp, Homo Sapiens
  NM_007268
ggagtttgagtgagagatatagggaaggaagggaagtaagcagtcacagacgctggcggccaccagaagtttgagcctctttggtagcaggaggctggaagaaaggacagaagtagctctggctgtgatggggatcttactgggcctgctactcctggggcacctaacagtggacacttatggccgtcccatcctggaagtgccagagagtgtaacaggaccttggaaaggggatgtgaatcttccctgcacctatgaccccctgcaaggctacacccaagtcttggtgaagtggctggtacaacgtggctcagaccctgtcaccatctttctacgtgactcttctggagaccatatccagcaggcaaagtaccagggccgcctgcatgtgagccacaaggttccaggagatgtatccctccaattgagcaccctggagatggatgaccggagccactacacgtgtgaagtcacctggcagactcctgatggcaaccaagtcgtgagagataagattactgagctccgtgtccagaaactctctgtctccaagcccacagtgacaactggcagcggttatggcttcacggtgccccagggaatgaggattagccttcaatgccaggctcggggttctcctcccatcagttatatttggtataagcaacagactaataaccaggaacccatcaaagtagcaaccctaagtaccttactcttcaagcctgcggtgatagccgactcaggctcctatttctgcactgccaagggccaggttggctctgagcagcacagcgacattgtgaagtttgtggtcaaagactcctcaaagctactcaagaccaagactgaggcacctacaaccatgacataccccttgaaagcaacatctacagtgaagcagtcctgggactggaccactgacatggatggctaccttggagagaccagtgctgggccaggaaagagcctgcctgtctttgccatcatcctcatcatctccttgtgctgtatggtggtttttaccatggcctatatcatgctctgtcggaagacatcccaacaagagcatgtctacgaagcagccagggcacatgccagagaggccaacgactctggagaaaccatgagggtggccatcttcgcaagtggctgctccagtgatgagccaacttcccagaatctgggcaacaactactctgatgagccctgcataggacaggagtaccagatcatcgcccagatcaatggcaactacgcccgcctgctggacacagttcctctggattatgagtttctggccactgagggcaaaagtgtctgttaaaaatgccccattaggccaggatctgctgacataattgcctagtcagtccttgccttctgcatggccttcttccctgctacctctcttcctggatagcccaaagtgtccgcctaccaacactggagccgctgggagtcactggctttgccctggaatttgccagatgcatctcaagtaagccagctgctggatttggctctgggcccttctagtatctctgccgggggcttctggtactcctctctaaataccagagggaagatgcccatagcactaggacttggtcatcatgcctacagacactattcaactttggcatcttgccaccagaagacccgagggaggctcagctctgccagctcagaggaccagctatatccaggatcatttctctttcttcagggccagacagcttttaattgaaattgttatttcacaggccagggttcagttctgctcctccactataagtctaatgttctgactctctcctggtgctcaataaatatctaatcataacagcaaaaaaaaaaaaaaaaaaa

SEQ ID NO: 3212 - DNA, 2522 bp, Homo Sapiens
  NM_007269
accccaacgccgcttctgcggccaaagtaggttgggagtggaaggtggtggctgctgctccgcagtgtcgggaagatggcgccgccggtggcagagagggggctaaagagcgtcgtgtggcagaagataaaagcaacagtgtttgatgactgcaagaaagaaggcgaatggaagataatgcttttagatgaatttaccactaagcttttggcatcgtgttgcaaaatgacagatcttctagaagaaggtattactgttgtagagaatatttataagaaccgtgaacctgtcagacaaatgaaagctctttatttcatcactccgacatcaaagtctgtagattgtttcttacatgattttgcaagtaaatcggagaacaagtataaagcagcatatatttacttcactgacttttgccctgataatctctttaacaaaattaaggcttcttgctccaagtcaataagaagatgtaaagaaataaatatttccttcattccacatgaatctcaggtgtatactcttgatgtaccagatgcattctattactgttatagtccagaccctggtaatgcaaagggaaaagatgccattatggaaacaatggctgaccagatagttacagtgtgtgccaccttggatgaaaatcccggagtaagatataaaagtaaacctctagataatgccagtaagcttgcacagcttgttgaaaaaaagcttgaagactactacaagattgatgaaaagagcctaataaagggtaaaactcattcacagctcttaataattgatcgtggctttgatcctgtgtccactgtcctgcatgaactgacctttcaggcaatggcatatgatctactaccaattgagaatgatacatacaaatataaaacagatggaaaagaaaaggaggccatccttgaagaagaagatgacctctgggttagaattcgacatcgacatattgcggttgtgttagaggaaattcccaagcttatgaaagaaatttcatcaacaaagaaagcaacagaaggaaagacatcacttagtgctcttacccagctgatgaaaaagatgccccatttccgaaaacagattactaagcaagttgtccatcttaacttagcagaagattgcatgaataagttcaagcttaatatagaaaagctctgcaaaactgaacaggacctggcacttggaactgatgcagaaggacagaaggtgaaagattccatgcgagtactccttccagttctactcaacaaaaatcatgataattgtgataaaataagagcaattctactttatatcttcagtattaatggaactacggaagaaaatttggacaggttgatccagaatgtaaagatagaaaatgagagtgacatgattcgtaactggagttaccttggtgttcccattgttccccaatctcaacaaggcaaaccgttaagaaaggatcggtctgcagaagaaacttttcagctctctcggtggacaccttttatcaaagatattatggaggatgctattgataatagattagattcaaaagaatggccatattgttcccagtgtccagcagtatggaatggttcaggagctgtaagtgctcgccagaaacccagagctaattatttagaagaccgaaaaaatgggtcaaagctgattgtttttgtaattggagggatcacatactctgaagtgcgttgtgcttatgaagtttctcaggcacataaatcctgtgaagttattattggttctacacatgttttaacacccaaaaagctgttggatgatataaagatgctgaataaacccaaggataaagtctccttaattaaagatgaatagcatttctttttggagggtttagagattcttactaatatgttgaactaaaatagaaagaaaatgttgctgtcatgtaatttaaacaatgtaaatattttatggaataatggcttttcaaatacatttcttaaggaactgtttatgattattactggatttgtcatttttgataatttaaatattgctgctgctttgtagatgatgagaagaaatgttaaagtgctttctaaaaggaaattttttcacctttggaggagaatatattagagttgtgggtaatttttcacagccacctatgtacatactaattacccattggatacttatatctaaaagtctcatgctgaagtatagtttttgggaaagaatgattttaaataaagagattgtaaaagtaaaaaactgtaaatgtatatgtatgatagaattgtttcctctaagtgtagtttttctttcaactaaaattcagtttatgtgtaaaataattcagtcattaatagaaatggagtgatttcacagtgtgtactgttttgccacatacttctaaagaacacaattttatataattttgaaatcatgtatgtttaaattagaaaaccaaaaatcatgaacattctaagagaaaataaatatagaatttaaaaaattaaaaaaaaaaaaaaaaaaaa

SEQ ID NO: 3213 - DNA, 1416 bp, Homo Sapiens
  NM_007273
aagttcgggtccgtagtgggctaagggggagggtttcaaagggagcgcacttccgctgccctttctttcgccagccttacgggcccgaaccctcgtgtgaagggtgcagtacctaagccggagcggggtagaggcgggccggcacccccttctgacctccagtgccgccggcctcaagatcagacatggcccagaacttgaaggacttggcgggacggctgcccgccgggccccggggcatgggcacggccctgaagctgttgctgggggccggcgccgtggcctacggtgtgcgcgaatctgtgttcaccgtggaaggcgggcacagagccatcttcttcaatcggatcggtggagtgcagcaggacactatcctggccgagggccttcacttcaggatcccttggttccagtaccccattatctatgacattcgggccagacctcgaaaaatctcctcccctacaggctccaaagacctacagatggtgaatatctccctgcgagtgttgtctcgacccaatgctcaggagcttcctagcatgtaccagcgcctagggctggactacgaggaacgagtgttgccgtccattgtcaacgaggtgctcaagagtgtggtggccaagttcaatgcctcacagctgatcacccagcgggcccaggtatccctgttgatccgccgggagctgacagagagggccaaggacttcagcctcatcctggatgatgtggccatcacagagctgagctttagccgagagtacacagctgctgtagaagccaaacaagtggcccagcaggaggcccagcgggcccaattcttggtagaaaaagcaaagcaggaacagcggcagaaaattgtgcaggccgagggtgaggccgaggctgccaagatgcttggagaagcactgagcaagaaccctggctacatcaaacttcgcaagattcgagcagcccagaatatctccaagacgatcgccacatcacagaatcgtatctatctcacagctgacaaccttgtgctgaacctacaggatgaaagtttcaccaggggaagtgacagcctcatcaagggtaagaaatgagcctagtcaccaagaactccacccccagaggaagtggatctgcttctccagtttttgaggagccagccaggggtccagcacagccctaccccgccccagtatcatgcgatggtcccccacaccggttccctgaacccctcttggattaaggaagactgaagactagccccttttctgggaaattactttcctcctccctgtgttaactggggctgttggggacagtgcgtgatttctcagtgatttcctacagtgttgttccctccctcaaggctgggaggagataaacaccaacccaggaattctcaataaatttttattacttaacctg

SEQ ID NO: 3214 - DNA, 3148 bp, Homo Sapiens
  NM_007279
ggagagcgcgccacagaacgacttttacgcaggcgcagaagcctgtttcccctcacccgcggcttccaccctgcgcaggcgcaaaaagccgcgctggcaacctccgcagcggtcgcgcgcacccttcacccctcttgctgcttttgtctggcacaaccttctcaggccctccgcgaggccggccctttttttctttcactttccccacccggagagccaggtgccgagaactaggacctcgtccccttctctatcccttcccctgatccatctcgtctctgttctccttcccttttccgttcccgaagccggaaggagccgaggtacccacggaaaaagtcgaagctgtccccggagagtgaggccttcacgaagcggtggcggaaggagccgaagttctctgatcggaggcgtgagcaagtggcatctccggaaagagccgaaacacggactcgagcttaatcccaggaggggcccgagggcgagatccggaaatctccggaaagagccgaaggccgggacggttaggattgtcggaagtggccgattgcttggacagggccggcggagaagatcggagcaagtccgtggaagaagccaaagactgggacggattgaattgttggaagaacccgaactcgcagaggggactgggcgcagtggcacacgaggacacacggaaacctccgaacgttgaggagataatctcggaaaagttacggaaacctgggaagtcggcgaaaccctacgttcgggtgttttcggaagcagccgaagcggccgcctgcttcgccttcgtccagtatccggagatagccgaggcgcttcggagccaggctcggggggaggggcaagctcgcgggcgggcgggcgggtgagggggcggagcccgggcggggcggggagggctgccggaggcttgattaggtaggaggtggcgaagcgccggcggcggccggaagtagccgaagccagcggcggaagtagccgaagcggctggagcgggcggcaaggcgaggcgaaagctgcacagggccctacgcggccgcctcagcatgtcggacttcgacgagttcgagcggcagctcaacgagaataaacaagagcgggacaaggagaaccggcatcggaagcgcagccacagccgctctcggagccgggaccgcaaacgccggagccggagccgcgaccggcgcaaccgggaccagcggagcgcctcccgggacaggcgacgacgcagcaaacctttgaccagaggcgctaaagaggagcacggtggactgattcgttccccccgccacgagaagaagaagaaggtccgtaaatactgggacgtgccacccccaggctttgagcacatcaccccaatgcagtacaaggccatgcaagctgcgggtcagattccagccactgctcttctccccaccatgacccctgacggtctggctgtgaccccaacgccggtgcccgtggtcgggagccagatgaccagacaagcccggcgcctctacgtgggcaacatcccctttggcatcactgaggaggccatgatggatttcttcaacgcccagatgcgcctgggggggctgacccaggcccctggcaacccagtgttggctgtgcagattaaccaggacaagaattttgcctttttggagttccgctcagtggacgagactacccaggctatggcctttgatggcatcatcttccagggccagtcactaaagatccgcaggcctcacgactaccagccgcttcctggcatgtcagagaacccctccgtctatgtgcctggggttgtgtccactgtggtccccgactctgcccacaagctgttcatcgggggcttacccaactacctgaacgatgaccaggtcaaagagctgctgacatcctttgggcccctcaaggccttcaacctggtcaaggacagtgccacggggctctccaagggctacgccttctgtgagtacgtggacatcaacgtcacggatcaggccattgcggggctgaacggcatgcagctgggggataagaagctgctggtccagagggcgagtgtgggagccaagaatgccacgctggtgagccccccgagcaccatcaatcagacgcctgtgaccctgcaagtgccgggcttgatgagctcccaggtgcagatgggcggccacccgactgaggtcctgtgcctcatgaacatggtgctgcctgaggagctgctggacgacgaggagtatgaggagatcgtggaggatgtgcgggacgagtgcagcaagtacgggcttgtcaagtccatcgagatcccccggcctgtggacggcgtcgaggtgcccggctgcggaaagatctttgtggagttcacctctgtgtttgactgccagaaagccatgcagggcctgacgggccgcaagttcgccaacagagtggttgtcacaaaatactgtgaccccgactcttatcaccgccgggacttctggtagaggcggctgggggagggtgggggcagggctggctgggggcttctccccactcccgccccccccttatccccctctgaagacgatgggcagaggagtgacagccgcagacacacgacagccggcagcaactggaatggcagcaattaagggtggggggcgggggttggggggttggggggttagggcagggaggggactggggaagtgcgcacacagcccacacagacaacacgcacccacacagacacagagggaaggggttgggatggggacagggtgcacagcagggcggggtaggaccccagcccctcccaaaacagcctctccttctcccatagacccctttcttctccccttccccacggtaggaacatagcgtgtttatattttatggccaaactattttgaattttgttgtccggccctcagtgccctgccctctcccttaccaggaccacagctctgttccttcggcctctggtcctctctggtcccctcctgggtttcttacgtagttgatttttcctctttagtctcccccgacctgcgcccagccccgtggcccctgcccctctcctactctctgtggcagtttcatatttgctaagacgaatttgctcattaaacattttgttgtattttactttaaaaaaaaaaaaaaaaaa

SEQ ID NO: 3215 - DNA, 1249 bp, Homo Sapiens
  NM_007280
gagctgtgcttggggcggggcctggcgtgtattcgaaaggaaggcgccggctgcgggaagatggcggctcagccgctgcggcatcgctcacgttgtgcaacgccgccccggggggacttttgtggtggcactgagagggcgattgaccaagcttcttttacgacctccatggagtgggatacgcaggtggtgaaggggtcctcgccgctcggccccgcagggctgggggctgaggagccagccgccggcccgcagctgccgtcttggctgcagcctgagaggtgcgctgtgttccagtgcgcacagtgtcacgcagtgctcgccgactcggtgcacctcgcctgggacctgtcgcggtccctcggggccgtggtcttctccagagttacaaataacgtcgttttggaagcgcccttcctagttggcattgaaggttcactcaaaggcagtacttacaaccttttattctgtggttcttgtgggattcccgttggtttccatctgtattctacccatgctgccctggctgccttgagaggtcacttctgcctttccagtgacaaaatggtgtgctatctcttaaaaacaaaagccatagtaaatgcatcagagatggatattcaaaatgttcctctatcagaaaagattgcagagctgaaagagaagatagtgctaacgcacaatcgcttaaaatcactaatgaagattctgagtgaagtgactcctgaccagtccaagccagaaaactgatcctgtaccaaagcttgagtgtcaggttcaggctttattgctgtcttcaacaacaggtgctgcttagtcatttcttgaaaaagattggcttcaagaatggaggggaaatgcagtttctatttacctttaggctgattttccaaattatttgtgaagctgtttttagaagatgagagactaaggattcttctcttttatagctatttgccttaagaacttactttagattcttattgaattcataatacttatctctgaaaatgtctttgactgtaaatttaggaattaagatgcagagtcccatgtgtcctctgatctaaagttgcatggttggtctgaaaatagagttgggcttaatgttgacttctattactcctgcatggagcagttgttatgaatactaatacatcactttttaacttctgtaaaatacagatcataatattctataggtaatgtttaataaattgcctgaataatatacaaaaaaaaaaaaaaa

SEQ ID NO: 3216 - DNA, 4617 bp, Homo Sapiens
  NM_007283
ctccatctttctagtccccaccttccccggtgcagacacccggcgaagcccacccggttttcccagcggcatttccgatgacagcttcggggctacgtgtcctgtgctgtcggagacgcacaggaagcaaagtttgtgagaagccttgggggcgactttgccttgggcacccgcatttgtgcgtctgcgaggtgcctcggtgtgcgcggagctagtttcccagtttcccgggcccctcccttctccgagcccctctagcgatttgtttaggaaaagtgatgacatgaactagtagtggagaatcgcagcgccgctccccgccctggggagggaggggagccccggagagcctgccggtgggagctggaagcaggctcccggctgagcgccccagcccgaaaggcagggtctgggtgcgggaagagggctcggagctgccttcctgctgccttggggccgcccagatgagggaacagcccgatttgcctggttctgattctccaggctgtcgtggttgtggaatgcaaacgccagcacataatggaaacaggacctgaagacccttccagcatgccagaggaaagttcccccaggcggaccccgcagagcattccctaccaggacctccctcacctggtcaatgcagacggacagtacctcttctgcaggtactggaaacccacaggcacacccaaggccctcatctttgtgtcccatggagccggagagcacagtggccgctatgaagagctggctcggatgctgatggggctggacctgctggtgttcgcccacgaccatgttggccacggacagagcgaaggggagaggatggtagtgtctgacttccacgttttcgtcagggatgtgttgcagcatgtggattccatgcagaaagactaccctgggcttcctgtcttccttctgggccactccatgggaggcgccatcgccatcctcacggccgcagagaggccgggccacttcgccggcatggtactcatttcgcctctggttcttgccaatcctgaatctgcaacaactttcaaggtccttgctgcgaaagtgctcaaccttgtgctgccaaacttgtccctcgggcccatcgactccagcgtgctctctcggaataagacagaggtcgacatttataactcagaccccctgatctgccgggcagggctgaaggtgtgcttcggcatccaactgctgaatgccgtctcacgggtggagcgcgccctccccaagctgactgtgcccttcctgctgctccagggctctgccgatcgcctatgtgacagcaaaggggcctacctgctcatggagttagccaagagccaggacaagactctcaagatttatgaaggtgcctaccatgttctccacaaggagcttcctgaagtcaccaactccgtcttccatgaaataaacatgtgggtctctcaaaggacagccacggcaggaactgcgtccccaccctgaatgcattggccggtgcccggctcatggtctgggggatgcaggcaggggaagggcagagatggcttctcagatatggcttgccaaaaaaaaaaaaaaaaaaaaatcagaaattggagaaatccttagcacaattttctaaaaaataacagacatttttgttatacattagactatcagacactggacctaccttaatggttagacactttatgcaaaaaaagagaaaggtcccaggtgattttccacaaagaatgtgctaaaatgtccactgaaaacaaagccaagcctctgccctgcctctcccagctcccacaagggttccaggaattcctggtgttcccaggacaccagactgcaataactggaggcgcctccttcctgcccacccttcgctcacgccccagcgccctctctgaccagcctccgcttggtggccttcctctggccgtgtgatgaggtggttgctgtctccataggggccagctccccagggcagactcacgtgcccctctgaggctcagaaaatgcccagcccttcctcaaaatgagcagccacccatgactttgtgggctccttgttagcctgagaccaggctttgcagaggggcggggggtgaggcttagcccagaaggagaactgagcaggaaaccaaggctcttctctgtcccctgcccttcccctcctgccagggggaggctcaggttggtccccgagtgccgcctgtactcacaaaggctgcctttcctctagagtcactaattttacctgatgctatgagagaatcatattgaagatgaaatgtctaatatataatgtatattttaaagcagagactattttggtggataggtgggagggagcaaggggagtttgagggaatcagagcttgatgctactgtacagaactggacaggttgggccggcagtggtggggccagagggctctgtgctctaggagctaagccagcagcccccgagaggggacttggctgggcctttcctatgggcaaggcccagtgctcttcctgcccaccagggaccatggagcagtggcaccctatggggctatgatccctaggcctgggcctgggcctgcctatggcccagagctaccctgggagtgtcagtgctagcagcacagctacctctggtggcaggagaagagaggcccagcacagcagcaggccaggccttcctgtccaggtctgcatggagcactcggtgacccagagcagggactggaggcacccccagccctgccccaggccacagcaggacaggccgggacaggcctcacccaaggccaaggctggcatcagccaatcattcagagctgaggccctgggcctagcctgcccttctcaggtgccaataccaccccagccctgcccttggcctcactttttcccagcaataagtggggttcaccacccgcctcgggaatactttccccttctaaatgggacttgctgttacctcaggaggctccttagtgcaaatatgaccctggtcagggctttgccaccgttgaagccctgcagaaggtgcaatgtaggggttctggggccacagaggagaggccacttcccaccaggacccccaacatgaagtctaggcctcaggggctcccgcccttcttcctccagcagcgggaactgccactgctctcccaggccctgttctggaggctaaccttggttcctggagagtgtgcccctccaccctccctccagcagccctgatcacaccatgagagccaggaacgggtcaccctgctgaagatcactctgtgccctgggggaggagccaagccctcaccccacaaggggcaggtgggggcttggttgctgacccggcccaagtccccacagagcaccttctgtagctccagcttgtctccctggcttctctttgaaggagaaaaatgtaaaatatgcactgagaaagccagccccgcctgcttagtcagccccggcagcagggcagccatgggaactcaggaaaagcaggaaccctttccaaaagcccagagatgccctgggctcagatctgtaattctcccaggagctgtgatagagcaggccacacaaagtccctacgcctccctgctgcctcccccagatgcatgtggtggcatcaccattccccaaattgaatatcagcatgcggcctgaccagggactctttagatgcatgaatttatttatatgaaggctctcacagagacacacacagcacttcagtagcatttgcattcctggttaaagaatcaccaatatttaaaataaaaactttcctgaaattgggactgtcatgttatccagaagggctggtacatccgcccaccatgtccccctgctgggtcaggagccaacacaggaccctgcgtgtgagcgtgcctgacatctcacgcacggccactccagagccggtccctgtccttggaaagctgtgaagccttgcgttgagttccttctcgatactgacggctccgtgctgacattctgagctctggagtcacaccagcgcaggggcgtggaggaactgaggtttggaaggaatgccaggtctcgcacagcttggcctcgagaaggtgagaggaaggcaaaggccagggaggggacccagagaggcctggcacacaaggcccaagcaccaccgtcaacacagcccagtccatacagaaatgggtttcatgcctgaaaagctttttacagaaagatgccgcctgtagccagtgacagccgcaaccctacaggcctcagttccttgcagaggtgaggggtagagagtcagcctccctcccttccagcagcgacccagcttccctccacttccaggtggtgctgggctcaccgagggagcactggtgggtgctctgaaaacccacaggatcccacctccaggcccacctgggtcccatctcactctcttcttctttcaccaattgctaacatagaccttgttgggatcacgatggcttcacaagccagctgttgggtttgctatgtcactgtggctcagtcacatccctgcgtgtatactgtctgcggggcacatatgtatccatttagagctaaaggaatcagtgtacactacagctaatcctaataaatccgatgttttcggaaaaa

SEQ ID NO: 3217 - DNA, 1659 bp, Homo Sapiens
  NM_007284
gctgggggcgggtcctgcggcaccgcccgggaagctgcgcgagggtcgacagcctccgccacatcctccacctctcttggtccagcgagcgttgccgggccagggtcaagcggagggctccgacggcgcggacggagcgaagcgccgagccatggcgcaccaaacgggcatccacgccacggaagagctgaaggaattctttgccaaggcacgggctggctctgtgcggctcatcaaggttgtgattgaggacgagcagctcgtgctgggtgcctcgcaggagccagtaggccgctgggatcaggactatgacagggccgtgctgccactgctggacgcccagcagccctgctacctgctctaccgcctcgactcacagaatgctcagggcttcgaatggctcttcctcgcctggtcgcctgataactcccccgtgcggctgaagatgctgtacgcggccacgcgggccacagtgaaaaaggagtttggaggtggccacatcaaggatgagctcttcgggactgtgaaggatgacctctcttttgctgggtaccagaaacacctgtcgtcctgtgcggcacctgccccgctgacctcggctgagagagagctccagcagatccgcattaacgaggtgaagacagagatcagtgtggaaagcaagcaccagaccctgcagggcctcgccttccccctgcagcctgaggcccagcgggcactccagcagctcaagcagaaaatggtcaactacatccagatgaagctggacctagagcgggaaaccattgagctggtgcacacagagcccacggatgtggcccagctgccctcccgggtgccccgagatgctgcccgctaccacttcttcctctacaagcacacccatgagggcgacccccttgagtctgtagtgttcatctactccatgccggggtacaagtgcagcatcaaggagcgaatgctctactccagctgcaagagccgcctcctcgactccgtggagcaggacttccatctggagatcgccaagaaaattgagattggcgatggggcagagctgacggcagagttcctctacgacgaggtgcaccccaagcaacacgccttcaagcaggccttcgccaagcccaagggcccagggggcaagcggggccataagcgcctcatccgcggcccgggtgaaaatggggatgacagctaggaggctggagcagggccggccacgtgtggactgtggggctgcccaccttccgctccctgccaccatcctccttcctgggctccaggaaagtgtttctgggaggtcaggagggctggcagctgaacgcacttgcagcgtccgagggccaccgggctggcattttgtgacccttccctgttgctgtccctgcatctcgtctgtgtgcccagggtgtccggggaccctgcctggctggcttaagggggctgggtcaggggcctggcatgaacctggcctcccggggagctgagactagggtcccagcacagcccagaaacctttggccacaagaagtggggtcagtcagggctggggcaggggtcactgcagtttgggatggttgaatgctgtattttctaaagaataaaatatttttaaatcaagaaaaaaaaaaaaaaaaaaaaaaaaaaaaaaaaaaa

SEQ ID NO: 3218 - DNA, 1031 bp, Homo Sapiens
  NM_007285
cgacagccggaagtcccgcctgccgtgtagtcgccgccgtcgctgccgctgccgctgccgccgtcgttgttgttgtgctcggtgcgctgagctccgcggctccgcgagccggttccgtccccttcccgccgccgccatgaagtggatgttcaaggaggaccactcgctggaacacagatgcgtggagtccgcgaagattcgagcgaaatatcccgacagggttccggtgattgtggaaaaggtctcaggctctcagattgttgacattgacaaacggaagtacttggttccatctgatatcactgtggctcagttcatgtggatcatcaggaaaaggatccagcttccttctgaaaaggcgatcttcctgtttgtggataagacagtcccacagtccagcctaactatgggacagctttacgagaaggaaaaagatgaagatggattcttatatgtggcctacagcggagagaacacttttggcttctgagggccattgctgggctaggtgcaccgtaactgcttgtgtatcttgtaaatagccagccattttcagttattataccagaacctcttcacatagacctattagtgcatttgtaactggatttatttcttaatatattggaaggttttgtttccttagactagtaaattatcatacagagttttattttgagtttttctttttgtgcattgtcctcatgcctgtattctccaggaaacttgtccttctggaaatcatattgaatgatatttctatatcgaagtgaggtaggtgcggtattaaagtgaaagggaaggtgatgcatttattctgggttatgcttgaagtgttagatggctaagtattaaaattatccaaattaaatccttagcagtcagaacacttgcttcactagaatatgccaactgccaatcatgttggactgagctaatttgttcctctttctgaaactattaaggtaaataattaacaataaaaattctcttataaaggcaaaaaaaaaaaaaaaaaaaaaaaaaaaaaa

SEQ ID NO: 3219 - DNA, 7585 bp, Homo Sapiens
  NM_007292
aaaaagtgctttattttcccactccccggacgcccagcagggcagtttcttgaccttcggagcccctttcccgaggatccgctcgggagcctcccctggccaggagcaggggattagtctgccccgcgaccggccccagccacgacgcggacatcgccccctctgtctgggccgctgtcactcacgcgccaaagggccacggagaaagaaggggcgggccggggcgggccgggcgagcggaggcggggacttgcgccgtcctgaggctgcctcctagggtccggccggcgctggagctgcggatttagattgtcactgccacctcggtcggtgcttacttcgctgccagctggtcgtcgccatgaacccggacctgcgcagggagcgggattccgccagcttcaacccggagctgcttacacacatcctggacggcagccccgagaaaacccggcgccgccgagagatcgagaacatgatcctgaacgacccagacttccagcatgaggacttgaacttcctcactcgcagccagcgttatgaggtggctgtcaggaaaagtgccatcatggtgaagaagatgagggagtttggcatcgctgaccctgatgaaattatgtggtttaaaaaactacatttggtcaattttgtggaacctgtgggcctcaattactccatgtttattcctaccttgctgaatcagggcaccactgctcagaaagagaaatggctgctttcatccaaaggactccagataattggcacctacgcccagacggaaatgggccacggaactcaccttcgaggcttggaaaccacagccacgtatgaccctgaaacccaggagttcattctcaacagtcctactgtgacctccattaaatggtggcctggtgggcttggaaagacttcaaatcatgcaatagttcttgcccagctcatcactaaggggaaatgctatggattacatgcctttatcgtacctattcgtgaaatcgggacccataagcctttgccaggaattaccgttggtgacatcggccccaaatttggttatgatgagatagacaatggctacctcaaaatggacaaccatcgtattcccagagaaaacatgctgatgaagtatgcccaggtgaagcctgatggcacatacgtgaaaccgctgagtaacaagctgacttacgggaccatggtgtttgtcaggtccttccttgtgggagaagctgctcgggctctgtctaaggcgtgcaccattgccatccgatacagcgctgtgaggcaccagtctgaaatcaagccaggtgaaccagaaccacagattttggattttcaaacccagcagtataaactctttccactcctggccactgcctatgccttccagtttgtgggcgcatacatgaaggagacctatcaccggattaacgaaggcattggtcaaggggacctgagtgaactgcctgagcttcatgccctcaccgctggactgaaggctttcacctcctggactgcaaacactggcattgaagcatgtcggatggcttgtggtgggcatggctattctcattgcagtggtcttccaaatatttatgtcaatttcaccccaagctgtacctttgagggagaaaacactgtcatgatgctccagacggctaggttcctgatgaaaagttatgatcaggtgcactcaggaaagttggtgtgtggcatggtgtcctatttgaacgacctgcccagtcagcgcatccagccacagcaggtagcagtctggccaaccatggtggatatcaacagccccgaaagcctaaccgaagcatataaactccgtgcagccagattagtagaaattgctgcaaaaaaccttcaaaaagaagtgattcacagaaaaagcaaggaggtagcttggaacctaacttctgttgaccttgttcgagcaagtgaggcacattgccactatgtggtagttaagctcttttcagaaaaactcctcaaaattcaagataaagccattcaagctgtcttaaggagtttatgtctgctgtattctctgtatggaatcagtcagaacgcgggggatttccttcaggggagcatcatgacagagcctcagattacacaagtaaaccagcgtgtaaaggagttactcactctgattcgctcagatgctgttgctttggttgatgcatttgattttcaggatgtgacacttggctctgtgcttggccgctatgatgggaatgtgtatgaaaacttgtttgagtgggctaagaactccccactgaacaaagcagaggtccacgaatcttacaagcacctgaagtcactgcagtccaagctctgaagtgtcacaaggacaagtttaatctgcttcagaaagcgcctgtgtgcaactcaaattttgtggaatctttttcgaattcaaatagctatagagcaaatgataaattgacccctttttataaatggagggaaaaaatgaacagatttcagagattaaatgaaaaaaagcagatgttttaagtgcaattaacactgaaagagacctgttaaaccattcagaaaaagcttaagaaatgcgatatgacttccttttgtaatgctgctgatcccagtagactatgacttttgataattagcagaatttaactactgagtagttgattattttcacattttaattgctaatcactggctatataagtgtttttaagcaaaggtatttttgaagtggtgtagaacccttccaagctttcctgctcagtgttctaccagacttaccctggggcctggcttaaaagcaggattgaagaaaagggactgggggaaggaaacttattggaaaacttgatgcgaatgagtttctgcttggcacagtctctgcctgcttgctctcctttgctgatggattgcatttatcaaactattcatgctagcatttttccaacgagggaacttattccgcacgggcctactgtaggaccattgtctcgtgtaattaggaattttccatttgaaggattgctaaattgtcacagtagtaggaagtatagggaaacctctcagctgtggcactgttgtagctttggagtgcagagtgtaactctgggacaatcagatttcacatattctgtcatcttggcataagccattaaaagcttggagattactgtatttggcattaaaaaaaaatgtcacttaggtcagcactcccagacgtagcacagaaaaaccctttgacacaaaccatgtgttctgatttttggttcagaaaatattgaaactgtgagttgttttttttttaacaactgggaaaaaacaaaaacaaaaaactatagttagaaaaatggaagttccataggttctatttcttactctatgtatggctttgttttcagtctatttctaggagctttctctgaatcgctaattgtcctttcagttgaaatctaatttatacaatcattctatacttaaaggttaaatacatcttaattaattttttcttaaagtcaatgtaagtcactttgttttgtttttttttaatctacgccatatgcctcatgaaaccagctgttctagaatcagtcctgagaatatggcttaattccatggaaacataactcctatcttgggacctgacataatatctatctatcctggggaactggtaatatgagacttataggttacagcagaaatgctacatgttgacaaaagccttaatcgttccactgggagaactaattgataattgtgttaagattgaagattaaccctgtgttaatctcacttgagtctatcctgacagtagttcagattctggaaaatgataaactgacctgctagatgtagaattgtttcaaaattagtgttgaaataccttgttcacagatgaatatctgggcaggatctgagggtgtttggaatgacaccccccaatccagttgcatagatgggatgtctttgcaggtttgaggagatcatcgacctgcagagccccctttgacccagtacctcacgttttatttaaaatctaaatctggggccaggcgtggtggctcacgcctgtaatccaagcactttgggaggccgaagcgggtggatcacctgaggtcaggagtttgagaccatcctggccaacatggtgaaaccccgtctctactgaaaaaaatacaaaaattagctgggcatggtggtagcacgcgcctgtagtcccagctactcgggaggctgaggcaggataatcgcttgaacttggcgggtagaggttgcagtgagccaagatggtgccactacactgcagcctgggtggctgagcgagactccgtctcaaaaaaaaaatctaaatctgacatttgatgctatttttattaatattggaatgttctgtcttgaactttattcaatataatcaagaataaagatagagtaaacgtcactgatttgtactattaagagagaaaaaatatgccacacaactaaacataggtttaaattatgaagaaatttagaatagaggtttattagatttagggaacactaagaacaaaaaaggaaggagtgatacctgcctgagtggacagctgtaaatcagctgtaattactgcagttgtaccaatagttgtgagtggctccagtcactttaggagtccttggaagtacttggtacacatttgttggctgtaccttaaaggaagtggcaagtccagtttgttctctctaccacactagactgccactgacaagtttgggtctgttggattcaaaattttgtaagccattttcacaagtacaaagatacattttaaccttgtcttctccaaaattactgagtaggaattttatttttatctttttgagacagggtatcactgtcacccagactggagtgcagtggtgggatcttggcttactgtgacctctgcctcccgggttcaaatggtcctccctcctcagtctcctgagtagctgggacgacaggcacgtgccaccatgcccagctaatttgttctattttttctgtagagacggggttttgccatgttgcccaggctggtctcagactcctgggctcaagcgatcatttcgcctcagcctcccaaagtgctgagattataggtgtgagccacagcatctggcccagagtgaggagaattaatgagattttttgtgtgtgttagataatattgatttaagcctttttttaaaaagtactctcaaccaaatacaaaattgaaaatgtgaggtttaatagaaatgtgttggctatttgcaatggattttcttcttgcccaagtgtttggagttctactttatgctctgtatttaaaaattagtgacctcaaagcagagttgatgacacaggctttggggccctcatgttcttgtctttagaacatatcactactaagtatcagcttatcttcagaacattacaacattcaccgtgttcatatgctttctgagaagtcaccacttgtaatttcagatcacatacacctgaaggcattttatagttcctaaagttaacatgttagatcttttttttccaccccatgagggtctcactctcacccaggctggaatgcagtggtgtgattgtagcacactttggccaccaactcctgggctcaagtgatcctcctgctttggcctcctctgagaagctgggattactggtgcacaccaccacacctggctaattttttatttttttttatttttggaaatagggtatggctatgttgccttgggcccgtcatgaactcctagcctcaggtgaccctcccacctcaggcctcccaaagggttgggattacaggagtgagctactgcactgggccaacatgttaatttttttttttttttttttgagatggagtctcccaggcgggaatgcaatggtgcgatctcgacttcactgcaatcttcacctcccgggttcgagcgattctcccacctcagcctcctgagtagctgggattacaggcacctgccatcacgctcggctaatttttgtattttgagcagagatggagtttcaccatgttggccaggtgatctgcactcccactccccccacacttcccaaagtgctgggattacaggcataagccacaagccacctcacccagccaacatgttacatcttaattcttggattttcttcactgcagggctttgggtggagaaataaaactcttcaaatgcatgatcttggagatccctgtgaatcaataattctttagacaactgcggctcaaaatccctcctttcccttttccgagttattccatccatcttattagaaaggaagtgaattaggtgtaggtggtctgtaacacctgcacatctttttatacgtgtagagggtatgcctgggatatataggttgtcttcaagcagtagctgctactacagctagagagaggaggagtgccaggaaactgatgacctgagaccaagagtcttgttgatgttctgacttagataaaggttttgatcattttcatgaaataatgcagggaagtcatttctgctgtttctttactactccattcttggaggattagaacaagtcacactgtaattgactaaaacgactttttattttaaaatattgatggtggggttttgcttttttttttttttttttttttgagacgttgtcttgctctttcacccagggtagagtgcagtggcgaaatcttggctcactgcaacctctgcctcccgggttcaagcaattctctgcctcagcctcctgagaagctgggattacagcgcctgccaccatgcctgtctagtttttttgtatttttagtagagacaggggtttcaccaagttggccaggctggtcttgaactcctgacctcgtgatccacccacctcggcctcccaaagtgctgggattacaggcgtgagccaccgtgccgggccagtgtttttaactgtccacacttactaaattttccagtacttcttcctatggttcatgatagtaaacacagaaacatataaggaacattattagagttaccagatgttagctgttgcatatgtgcacattcctagattcaagggtgtttttgccttaaatttaagtgggtcattggttgtcttgggaagatcatggaaaattcgggattttttagaattctgaaccaaaatatgttttgagtgtttcttagtaaatgtgtgatcttccaccttccacattcagactgcggactacacttcataaatgcctttttatttccagttatggattcaactaaatgactgccttgggagcacataattactttgctacctttttccccctttgctgttgtggctcgagtttggttctcacctgagaagatgcattgagcatatgttgttacccagccctggcttaatggtgtcctgtggggtaggggtgggaggacgaggggcacggggccagagcatgtgaatggatcatggttggacagctgtgacctgccagcactgcgggtaagcaaaactacaaaccgttctttcctctgtgacattgaataaaccttaataaaattcataattagcacatactagaaaaaa

SEQ ID NO: 3220 - DNA, 3127 bp, Homo Sapiens
  NM_007308
gccattcgacgacaggttagcgggtttgcctcccactcccccagcctcgcgtcgccggctcacagcggcctcctctggggacagtcccccccgggtgccgcctccgcccttcctgtgcgctccttttccttcttctttcctattaaatattatttgggaattgtttaaattttttttttaaaaaaagagagaggcggggaggagtcggagttgtggagaagcagagggactcagtgtggtgtaaaggaattcattagccatggatgtattcatgaaaggactttcaaaggccaaggagggagttgtggctgctgctgagaaaaccaaacagggtgtggcagaagcagcaggaaagacaaaagagggtgttctctatgtaggctccaaaaccaaggagggagtggtgcatggtgtggcaacagtggctgagaagaccaaagagcaagtgacaaatgttggaggagcagtggtgacgggtgtgacagcagtagcccagaagacagtggagggagcagggagcattgcagcagccactggctttgtcaaaaaggaccagttgggcaaggaagggtatcaagactacgaacctgaagcctaagaaatatctttgctcccagtttcttgagatctgctgacagatgttccatcctgtacaagtgctcagttccaatgtgcccagtcatgacatttctcaaagtttttacagtgtatctcgaagtcttccatcagcagtgattgaagtatctgtacctgcccccactcagcatttcggtgcttccctttcactgaagtgaatacatggtagcagggtctttgtgtgctgtggattttgtggcttcaatctacgatgttaaaacaaattaaaaacacctaagtgactaccacttatttctaaatcctcactatttttttgttgctgttgttcagaagttgttagtgatttgctatcatatattataagatttttaggtgtcttttaatgatactgtctaagaataatgacgtattgtgaaatttgttaatatatataatacttaaaaatatgtgagcatgaaactatgcacctataaatactaaatatgaaattttaccattttgcgatgtgttttattcacttgtgtttgtatataaatggtgagaattaaaataaaacgttatctcattgcaaaaatattttatttttatcccatctcactttaataataaaaatcatgcttataagcaacatgaattaagaactgacacaaaggacaaaaatataaagttattaatagccatttgaagaaggaggaattttagaagaggtagagaaaatggaacattaaccctacactcggaattccctgaagcaacactgccagaagtgtgttttggtatgcactggttccttaagtggctgtgattaattattgaaagtggggtgttgaagaccccaactactattgtagagtggtctatttctcccttcaatcctgtcaatgtttgctttacgtattttggggaactgttgtttgatgtgtatgtgtttataattgttatacatttttaattgagccttttattaacatatattgttatttttgtctcgaaataattttttagttaaaatctattttgtctgatattggtgtgaatgctgtacctttctgacaataaataatattcgaccatgaataaaaaaaaaaaaaaagtgggttcccgggaactaagcagtgtagaagatgattttgactacaccctccttagagagccataagacacattagcacatattagcacattcaaggctctgagagaatgtggttaactttgtttaactcagcattcctcactttttttttttaatcatcagaaattctctctctctctctctctttttctctcgctctctttttttttttttttttacaggaaatgcctttaaacatcgttggaactaccagagtcaccttaaaggagatcaattctctagactgataaaaatttcatggcctcctttaaatgttgccaaatatatgaattctaggatttttccttaggaaaggtttttctctttcagggaagatctattaactccccatgggtgctgaaaataaacttgatggtgaaaaactctgtataaattaatttaaaaattatttggtttctctttttaattattctggggcatagtcatttctaaaagtcactagtagaaagtataatttcaagacagaatattctagacatgctagcagtttatatgtattcatgagtaatgtgatatatattgggcgctggtgaggaaggaaggaggaatgagtgactataaggatggttaccatagaaacttccttttttacctaattgaagagagactactacagagtgctaagctgcatgtgtcatcttacactagagagaaatggtaagtttcttgttttatttaagttatgtttaagcaaggaaaggatttgttattgaacagtatatttcaggaaggttagaaagtggcggttaggatatattttaaatctacctaaagcagcatattttaaaaatttaaaagtattggtattaaattaagaaatagaggacagaactagactgatagcagtgacctagaacaatttgagattaggaaagttgtgaccatgaatttaaggatttatgtggatacaaattctcctttaaagtgtttcttcccttaatatttatctgacggtaatttttgagcagtgaattactttatatatcttaatagtttatttgggaccaaacacttaaacaaaaagttctttaagtcatataagccttttcaggaagcttgtctcatattcactcccgagacattcacctgccaagtggcctgaggatcaatccagtcctaggtttattttgcagacttacattctcccaagttattcagcctcatatgactccacggtcggctttaccaaaacagttcagagtgcactttggcacacaattgggaacagaacaatctaatgtgtggtttggtattccaagtggggtctttttcagaatctctgcactagtgtgagatgcaaacatgtttcctcatctttctggcttatccagtatgtagctatttgtgacataataaatatatacatatatgaaaata

SEQ ID NO: 3221 - DNA, 2035 bp, Homo Sapiens
  NM_007310
gctgttggcagctgtgttgctgggcctggtgctgctggtggtgctgctgctgcttctgaggcactggggctggggcctgtgccttatcggctggaacgagttcatcctgcagcccatccacaacctgctcatgggtgacaccaaggagcagcgcatcctgaaccacgtgctgcagcatgcggagcccgggaacgcacagagcgtgctggaggccattgacacctactgcgagcagaaggagtgggccatgaacgtgggcgacaagaaaggcaagatcgtggacgccgtgattcaggagcaccagccctccgtgctgctggagctgggggcctactgtggctactcagctgtgcgcatggcccgcctgctgtcaccaggggcgaggctcatcaccatcgagatcaaccccgactgtgccgccatcacccagcggatggtggatttcgctggcgtgaaggacaaggtcacccttgtggttggagcgtcccaggacatcatcccccagctgaagaagaagtatgatgtggacacactggacatggtcttcctcgaccactggaaggaccggtacctgccggacacgcttctcttggaggaatgtggcctgctgcggaaggggacagtgctactggctgacaacgtgatctgcccaggtgcgccagacttcctagcacacgtgcgcgggagcagctgctttgagtgcacacactaccaatcgttcctggaatacagggaggtggtggacggcctggagaaggccatctacaagggcccaggcagcgaagcagggccctgactgcccccccggcccccctctcgggctctctcacccagcctggtactgaaggtgccagacgtgctcctgctgaccttctgcggctccgggctgtgtcctaaatgcaaagcacacctcggccgaggcctgcgccctgacatgctaacctctctgaactgcaacactggattgttcttttttaagactcaatcatgacttctttactaacactggctagctatattatcttatatactaatatcatgttttaaaaatataaaatagaaattaagaatctaaatatttagatataactcgacttagtacatccttctcaactgccattcccctgctgcccttgacttgggcaccaaacattcaaagctccccttgacggacgctaacgctaagggcggggcccctagctggctgggttctgggtggcacgcctggcccactggcctcccagccacagtggtgcagaggtcagccctcctgcagctaggccaggggcacctgttagccccatggggacgactgccggcctgggaaacgaagaggagtcagccagcattcacacctttctgaccaagcaggcgctggggacaggtggaccccgcagcagcaccagcccctctgggccccatgtggcacagagtggaagcatctccttccctactccccactgggccttgcttacagaagaggcaatggctcagaccagctcccgcatccctgtagttgcctccctggcccatgagtgaggatgcagtgctggtttctgcccacctacacctagagctgtccccatctcctccaaggggtcagactgctagccacctcagaggctccaagggcccagttcccaggcccaggacaggaatcaaccctgtgctagctgagttcacctgcaccgagaccagcccctagccaagattctactcctgggctcaaggcctggctagcccccagccagcccactcctatggatagacagaccagtgagcccaagtggacaagtttggggccacccagggaccagaaacagagcctctgcaggacacagcagatgggcacctgggaccacctccacccagggccctgccccagacgcgcagaggcccgacacaagggagaagccagccacttgtgccagacctgagtggcagaaagcaaaaagttcctttgctgctttaatttttaaattttcttacaaaaatttaggtgtttaccaatagtcttattttggcttatttttaa

SEQ ID NO: 3222 - DNA, 665 bp, Homo Sapiens
  NM_007311
cggggcggatgcggggacagcggcctggctaactcctgccaggcagtgcccttcccggagcgtgccctcgccgctggtacggctcctacctggtctggaaagagctgggaggcttcacagagaaggctgtggttcccctgggcctctacactgggcagctggccctgaactgggcatggccccccatcttctttggtgcccgacaaatgggctgggccttggtggatctcctgctggtcagtggggcggcggcagccactaccgtggcctggtaccaggtgagcccgctggccgcccgcctgctctacccctacctggcctggctggccttcacgaccacactcaactactgcgtatggcgggacaaccatggctggcgtgggggacggcggctgccagagtgagtgcccggcccaccagggactgcagctgcaccagcaggtgccatcacgcttgtgatgtggtggccgtcacgctttcatgaccactgggcctgctagtctgtcagggccttggcccaggggtcagcagagcttcagaggtggccccacctgagcccccacccgggagcagtgtcctgtgctttctgcatgcttagagcatgttcttggaacatggaattttataagctgaataaagtttttgacttcctttaaaaaaaaaaa

SEQ ID NO: 3223 - DNA, 3211 bp, Homo Sapiens
  NM_007320
agatggctcgtgcgcaggtgcgtgctaggagcgcggctcgtcagggcaggctgctctgcagggcaggcgatccggggctcgcctccgcgcggcattcagcgcgcaggcgcgagctggccgcctcacacggagtcggcttgttaagtgcgcacgcgcgggagtttctggcagaaagcaggcgagcctgggccggcgcggggccttgtgggagggcttaaggaagtaaaatggcggacctggcgaacgaagaaaagcctgccattgctccgcccgtctttgtgtttcagaaggataaaggacaaaagaggtcagctggcggctccagtcctgaaggcggagaagattctgacagagaagatggaaattactgccctcctgtcaagcgagaaagaacatcctctttaacccagttcccaccctcacagtcagaggaaaggagcagtggcttccggttgaagccaccaacgctgatccacggccaagcccccagcgcaggtctgccaagccagaagcccaaggagcagcagcggagcgtgcttcgcccggcagtgttacaagctccgcagccaaaggcgctgtcccagactgtccccagcagtggcaccaacggggtcagcctcccagcagactgcacgggggcagtgcccgcagcatcccctgacactgctgcatggagaagtccttccgaagctgccgatgaggtgtgtgcacttgaggagaaagagccccagaaaaatgagtccagcaatgcctctgaagaggaagcctgtgagaaaaaagaccccgccacacagcaagcctttgtatttgggcagaacttgagggacagagttaagctgataaatgagagcgtggacgaagccgacatggagaatgctggacaccccagcgcagacacgccaaccgcaacgaactatttcctccagtatatcagttccagtttagagaactcaaccaatagtgccgacgcctccagcaacaaatttgtatttggccagaacatgagcgagcgagttttgagccccccaaaattaaacgaggtcagttcagatgccaacagggaaaatgcagctgccgagtcagggtctgagtcctcgtcccaggaggccacccctgagaaagagtccctggctgagtcggcagccgcctacaccaaggcaacagcgcggaagtgtttgttggaaaaagtggaagtcatcaccggggaggaggcggagagcaatgtgttacagatgcagtgcaagctgtttgtctttgacaagacctcacagtcctgggtggagagaggccgggggctgctcagactcaatgacatggcgtccaccgatgacggcacactacagtcccgactagtgatgcggacccaggggagcctgcgactgatcctcaacaccaagctgtgggcccagatgcagatcgacaaggccagcgagaagagcattcgcatcacagccatggacaccgaggaccagggcgtgaaggtcttcctgatctcggccagctccaaggacacaggtcagttgtatgcagccctgcaccaccgcatcctggccctgcgcagccgcgtggagcaggagcaggaggccaagatgcccgcgcctgagcctggggcagccccatccaacgaggaggacgacagcgacgatgacgatgtcctggctccttcaggggccaccgcagctggtgctggtgacgaaggggacgggcagacgaccgggagcacatagcggccgggagcccggctgcacaccaggctgctgctttgtccgtctatccacccgcccacccgcccccaccccaccggcagcgtccaggtgcggggccgggaaccacacaccccactgggccggccacagtctggacccgcacgtcctgttcaaaagcagactcgggaactgcctgaatgtggtttgggacacgagacctcatcatattgatgagcgaacaaacaagaacatttcctccctcccctcctttgaattgaaatggcacattaagacttgtcacggcttctcactgggactggagacctcgttccttcaccccgcgtgtcgccagcctctgggtccagccagagcccctggcttctccgccacccacacccttcccaccctgctgtggggccctgcctttgtggggagcagccagccctctgcccctgcccagggctccccaactataggcctgggacccccgcccagcttggggggctgctcgtacgagtgtagacactgggcccattggacgtgctgttaactactatcttcatttcccacttcccctctctgattgggggtgtatattttacatctttttttctttttattttcgaaggctttgttttggtttcttaggttaagatgctctcgagcgttgagcaggcacagctctgtcgaggtccctgtcccccacctgtggttctggcctctgaggttgggggactacttgtttcccaccccaggttcctccaggccaagtcatggggtgatgaggagttggggccctgtctgtcctaggcctggagagtgcctgtctgggaaaaggtcactggacctggaagggtccccagggtcccctgactcccgtctccatctgtcacgtggttcaccatcatcaggcaccaggcgcaaactgcttcccgctgttggccatcccttccccagccacaggtgtccctgcccccaggacagtccagggccaggggcttctgtgagaggcagagggggaccctcaccaaatcttggtggaagagcccaggggctggtcccagaacaggcagtctcacaagcacgcagcacactggagtggacgcctgtgcccacccgagcctggagcatggccaagagccagcttgcaccacccacctgggaggccgaggaggaggtcccctgggcacagggcctctttgggacttcagaggaaatctcccagtcccactctcggagggttaagagaaggcctcctgcagctgtgccgtccacacctctaggtcgccagagccctggcccccagcccccagcaagcctgagcccgggaagaaccagaggccctcccgagagacccagtcacacgtctctgctttaagccttagccagctagtgacgagtacaacgagataacgcccatgtgttttggaacatttatgtaagattgtcatatgaaatgtatttgggaactacattaaacttttaactaaaaaaaaaaaaaaaaa

SEQ ID NO: 3224 - DNA, 2922 bp, Homo Sapiens
  NM_007326
agccacactgggaaaacattggagcttggtctgccatcctgaactgtggttcccctgcctcccagcccggctgtgagtgctcagcgaccctgacaggctgacagttgggccatatggtgctcttcccagtctggttcctgtacagtctgctcatgaagctgttccagcgctccacgccagccatcaccctcgagagcccggacatcaagtacccgctgcggctcatcgaccgggagatcatcagccatgacacccggcgcttccgctttgccctgccgtcaccccagcacatcctgggcctccctgtcggccagcacatctacctctcggctcgaattgatggaaacctggtcgtccggccctatacacccatctccagcgatgatgacaagggcttcgtggacctggtcatcaaggtttacttcaaggacacccatcccaagtttcccgctggagggaagatgtctcagtacctggagagcatgcagattggagacaccattgagttccggggccccagtgggctgctggtctaccagggcaaagggaagttcgccatccgacctgacaaaaagtccaaccctatcatcaggacagtgaagtctgtgggcatgatcgcgggagggacaggcatcaccccgatgctgcaggtgatccgcgccatcatgaaggaccctgatgaccacactgtgtgccacctgctctttgccaaccagaccgagaaggacatcctgctgcgacctgagctggaggaactcaggaacaaacattctgcacgcttcaagctctggtacacgctggacagagcccctgaagcctgggactacggccagggcttcgtgaatgaggagatgatccgggaccaccttccacccccagaggaggagccgctggtgctgatgtgtggccccccacccatgatccagtacgcctgccttcccaacctggaccacgtgggccaccccacggagcgctgcttcgtcttctgagggccgggcacggtcacacggccacccgccccgcgcaccccacgccctgttcacgctcacccagtcacctccccacatcgcacactggggccccgggttcagcctggcctgcccgtgccctggtgaatcacctggctgagcagttcccctggagccccttcgggagcagggctgtgtcccagatgggccacggctgagccttcagagtacgtcctgcctggcacttactggtccttaccagagacgcccagccccatccctgtcctcatgacccctcgtccaccccccacacacactataaggctgagggctgccagcagccccgtctgcccaccattcccggccgtggaccatagtcgggatgtcagcagacacacatgggcagcccaaagctgcaggtgccagggcccaccccagcctcgcctgtcacccccactcccgcctcagggccaggcccaggcctcaccacctgacgctgcatgagacattgacaccagaaagccctcttgggggcactgctccctaccccagggccctggccagccgggagcttggctctcctctggctagagtgggaagagggggctggccatggggccctcccagaacctcagcatttccttccagcccatccaaacactgaggcagccttggggaaccccgagctggggggttggcagcccactgcaccgcctcagggttttggggtcctgggctggggccaccatccctgatggcagaactcccacaaccacatgtatttattcctctgtcctaaaccgtcccctccttccctcacccccagcacagggggattctgagcagtgcctcttgtctgagggacatatcagtgacctcgacgttgcctttagactacagttgtgttagcctcttgcgtattggctttttcagagtcatttatgagcagaaaaaaaaaaagtaaaactttgctaatattaacccttctctagctcctcgagggtctgtgacctgcaacacaaggggtggggtcaggaaagggctggggaagacctagcattttttttttcttttttttttttttttgagacggagtctccctttgtcacccaggctggagtggcatgatctcagctcactacaacctccacctctcgggttcaagcgattctcctgcctcagcctcccgagtagctgggactaaaagtgcccaccaccacacccagctagtttttgtatttttttttttttttttttgagacggagtctcgctctgtcgcccaggctggagtgcagtggcgggatctcggctcactgcaagctccgcctcccgggttcacgccattctcctgcctcagcctcccaagtagctgggactacaggcgcccgccactacgcccggctaattttttgtatttttagtagagacggggtttcaccgttttagccgggatggtctcgatctcctgacctcgtgatccgcccgcctcggcctcccaaagtgctgggattacaggcgtgagccactgcgcccggctccagcatttatttctgatgtatctttgtggtagaaaatttggaaagtgcagagaagtatacacaggaagaaaaattcccaacccccagaggcaaaccagctgaaaccacgcaaccccagtcaccccaatgcaccgcgaggctgctgcctcctgtcagggtcagatgagcctcgaggctcaggaaagtcagaggatgccatctgcatggtggtaaattacagaggtgatgaggcaaggtgggtgtggggctgttcttaaaacggggcagcaggaaggccccaaggagatggatttgggctgggacgggaagagagagctggccatgctggggtgggtgggtgttcaaatggtggaaacagcagacgcaaaggccctgccgttggaaccagcttgtggaataaactttcagaaacaga

SEQ ID NO: 3225 - DNA, 3165 bp, Homo Sapiens
  NM_007334
ctgtattgtggttcctggaacacttcagaggcttgtgattctactgcttcttattcacactataatacatgtctcaccaatagatgattcaagaacatcatttaaatacacaatttttcattctctatttttgctaaatttcttcatactcaactttcagattctttaatctccagctcagcttcaacaattcaacgctgttctttctgaaaaagtacacatcgtgccttctctacttcgctcttggaacataatttctcatggcagcttttactaaactgagtattgagccagcatttactccaggacccaacatagaactccagaaagactctgactgctgttcttgccaagaaaaatgggttgggtaccggtgcaactgttacttcatttccagtgaacagaaaacttggaacgaaagtcggcatctctgtgcttctcagaaatccagcctgcttcagcttcaaaacacagatgaactggattttatgagctccagtcaacaattttactggattggactctcttacagtgaggagcacaccgcctggttgtgggagaatggctctgcactctcccagtatctatttccatcatttgaaacttttaatacaaagaactgcatagcgtataatccaaatggaaatgctttagatgaatcctgtgaagataaaaatcgttatatctgtaagcaacagctcatttaaatgtttcttggggcagagaaggtggagagtaaagacccaacattactaacaatgatacagttgcatgttatattattactaattgtctacttctggagtctataaaatgtttttaaacagtgtcatatacaattgtcatgtatgtgaaacaatgtgttttaaaattgatgaaattcgttcacctacatttgagaattataaaattaacataaagaattttgtattttcatttaatgtatatatttaatgttaaattcaatgtagttttattacacatttatgtaattttatttacattcttgctaattctcagcagaaatttaaataagatttaattcacatcaaataaaatttagaaaataaaatttaactcacactgcccaggctggagcatagtggcaagatcatagctcattgcaagctcaagtgatcctcctgactcagcctcccaagtagctaggactgcaggcaccatgtcactatgcccgactaatttttaatttttaattttttgtcaagacaaggtcttgctatgttgcccaggctggtcttgaactcctggcctcaagggattctcccaccttggattcccaaagtgctgggattataggtgtgaaccaccatccctggccctcttcacattcttgtatgaagattgatttgggaaaaatgcatttcaggtaactgacaaaagatataggatgaaaaataatatctttcaaatgtttaatttgaactaagagagcttatgcattgcactttctggagatttgtaatgttttggttttgttgtccatgtgactacaaaataatatattttttaattaaaaaatttaaaataatacaggcaagcatgtaatgattatcaatatttttttccaccaactatcctatacccctgacctcctttcattaggcattatcttctgttttgattttaacacttagagtggttttctctgttatgaatcaaagctgatctattttcatcatttttgtgatgaaaaaattaattttgattgacttaggatggaaggatttggactgggtgtggtggtttatgcctgtaatcgcagcactttgggaggccaaggcgggtggatcacttgaggtcaggagtttgagaccagcctggccaacatggtgaaaccctgtctctactaaaaatacaaaaattggctgggtgtggtagtgcacacctgtaatcccagctatttgggaggctgagtcgagaggatcgcttgaacctaggaggtggaggttgcagtgagtcgagattgcaccactgcactccagcctgggtgacagagccagactcctctccaaaaaaaaaaaaaaaaaaaaaagatgaaaggatttggaaccttaattgcatctgaaaaactgcctcacctttgttatttagtgtactccaaccacggagtaacatcccatcataatcccaaatcctactcaaacaaaaggggaagggattatgcaggtgtacactaggccactggtgtaccaattagaaaccactttagagttatgcctactgtacccacataatcctaaaaatatgttacaactgctacttcatagtttatgccacttattttattttttacttttattatttttttttctgagacacggtttcattcccattgcccaggctgtagtgcaatgatgcaatcatggttcactgcagcttcaacttcccaggctcaagggatcctcccacctcagccttctgagtacttgggactcaggtgcgagccatcatgctcagctaattttttgtatcatttgtagaaatggggttttgtattgttgcccaggctgatcttgaactcctggggtcaaggattctgcccgccttggcctcctaaagggctggaattacaggcataagccactgtgcccggccagtttatataatttaaacactgccttttggttccttgattcccatatgctaggacaagtaattattattttattttattttactttaagttctgggttacatgtgcagaacctgcaggtttgttacataggtatacatgttccaaggtggtttgctgcacctattgacccatcatctaggttttaagtcccacatgcattaggtatttgtcctaatgctcttcctccccttgccccccaccccccgacaggccttggtctgtgatgttcacctccctgtgtccatgtgttctcattgttcaactcccacttattagtaagaacatgtggtgtttggttttctgttcctgtgttagtttgctgagaatgatggtttccagcttcatccatgtcgctgcaaaggacatgaactcattctttttatggctgcatagtattccatggtgtatatgtgccatattttctttatccagtctatcactgatgggcatttgggttggttccaagtctttgctatggtaaatagtgctgcaataaacatacgtgtgca

SEQ ID NO: 3226 - DNA, 5508 bp, Homo Sapiens
  NM_007337
gttagcggcgtctcggttgccatggagaccaggagctccaaaacgcggaggtctttagcgtcccggaccaacgagtgccaggggacaatgtgggcgccaacttcgccaccagccgggtccagcagccccagccagcccacctggaagtcctccttgtattcctccctcgcctactctgaggccttccactacagcttcgcagcccggccccgccgcctcacgcagcttgcgctggcgcagcgtcccgagcctcagctgcttcgtctgcgcccctcctcgctgcgcacccaagatatctcgcacttgctcaccggcgtcttccgcaacttgtactcagccgaggtcatcggcgacgaagtgagcgcaagcttgatcaaggcccgcggcagcgagaatgagcgccacgaggagttcgtggaccagctgcagcagattcgggagctctataagcagcggctggatgagtttgaaatgttggagagacatatcactcaggcccaagcacgggctattgcggaaaatgagcgggtcatgagccaggctggagtacaggacctcgagagccttgtcaggttgcctccagtgaagagtgtctccagatggtgtatagacagcgagttgctacggaaacatcatttgatctccccagaagattactacaccgatacagtgccgtttcactctgcacctaaaggcatctccctacctggatgttcaaaactgacatttagctgtgagaagcgttccgtccagaagaaagagctgaacaagaagcttgaagattcatgcaggaagaagcttgctgagttcgaagatgagttagaccacactgtggacagcctgacatggaatttaactcctaaggccaaagaaaggaccagagaacctctcaagaaagcaagtcaaccaaggaataaaaactggatgaaccacttacgtgtgccacagagagagctagacagacttctgcttgccagaatggagagtcggaaccacttcctaaaaaatccccgtttttttcctcctaacactcgatatggaggcaagtctcttgtttttcctccaaagaagccagcaccgataggagaattccagagtacagagccagaacagagttgtgctgatactccagtgtttctagctaagccaccaattgggtttttcacagattatgaaattggtccagtttatgagatggtaattgcgctgcagaacaccaccacgaccagccgctacctgcgagtcctcccgccttccacgccatacttcgctctgggactggggatgttcccaggaaaaggtggaatggtggctcctggaatgacctgccagtacattgtccagttttttcccgactgccttggggattttgatgattttattttagtggagacccagtcagcccacacacttctgatccccctgcaggcccggaggccgccccccgtgctgacattgtcaccggtgttggactgtggttactgcctcattgggggagtcaagatgaccagattcatctgcaaaaatgtgggtttcagtgttggcaggttctgcattatgcccaaaacaagctggccaccactaagtttcaaggccattgcaaccgtcggctttgttgaacaacctccttttggaatcctgccttcggtgtttgagctggccccgggacatgctatattagtggaggtcttgttttccccaaagagcctaggaaaggcagagcagaccttcatcatcatgtgcgacaactgccagataaaggagctggtgaccataggaattgggcagctgattgctttggatctgatctatatttctggtgaaaaaagccagccagaccctggagagctcacagacttaacagcccagcacttcatacgatttgagcctgaaaaccttcggtccacggctaggaagcagctgattattagaaatgctacgcacgtggagctggccttctactggcagatcatgaagcccaacctgcagcccctcatgcctggagaaaccttcagcatggacagcatcaagtgctaccccgacaaggagactgccttctccatcatgcccagaaagggggttctaagcccccacacagaccacgagttcatcctgagcttttctcctcatgagctgagggattttcacagtgtgctccagatggtgctagaggaagtcccagagcctgtaagttcagaagcggagagcctggggcactcctcctactctgtggatgatgtgattgtcctggaaatcgaggtgaaaggctcagtagaacctttccaggttctcttagagccatatgccctcatcatcccaggggagaactacattgggataaatgtgaagaaggcttttaagatgtggaacaacagcaagtcacccatcagatacctgtgggggaagatcagcgactgccacatcattgaagtggagcccggcacaggggtcatagagcccagtgaggtcggggattttgagttgaactttactgggggtgtccctggccccacaagccaggacctgctgtgtgaaatcgaagactcgccctcgccagtggtgttacacattgaggctgtctttaaggggcctgccctcatcatcaacgtctcagcccttcagtttggtctgctccgcctggggcagaaagccacaaactccatccagatccggaacgtcagccagctcccagccacatggcgcatgaaggagagcccagtctccctccaggaaaggcctgaggatgtgtctcccttcgacattgagccttcgagtggccagcttcactctctgggggagtgcagggtggacatcaccttggaggccctgcactgccagcatctggagaccgtcctggagctggaggtggaaaatggtgcctggagctaccttcctgtgtatgctgaggtacagaagccccatgtgtacctacagagcagccaggtggaggttagaaatctctacctgggtgtgcccacgaagacaaccatcacacttatcaatggcacgctcctgcctacccagttccactggggcaagctcctcggacaccaagcagaattctgcatggtgacagtctcccccaaacatggcctgctgggcccaagtgaggagtgccagctcaagttggagttgactgctcatacccaggaagagctgacccatctggccctcccttgtcacgtgtcaggcatgaagaagccactggttctaggcatttctgggaagccccagggactgcaagtggccattaccatctctaaggagagctctgattgcagcacagagcagtggccaggccacccaaaggagctccgcctggactttggctcagcggtgccactgaggacccgtgtgactcgccagctcattctcaccaatcgctccccaatacggacccgtttctccctcaagtttgagtatttcgggagcccccaaaacagcctgagcaaaaagaccagccttcccaacatgcctcctgccctgctaaagacagtgcggatgcaagagcacctggccaagcgagagcagctggattttatggagagcatgctatcccacgggaaaggagctgctttcttccctcacttttcccagggcatgctggggccctaccagcagctgtgcattgacatcacaggctgtgccaacatgtggggcgagtactgggacaacctcatctgcacggtgggagacctgctgccggaagtcatcccagtgcacatggcagcggtgggctgccccatcagctccctgaggaccacctcctacactattgaccaggcccagaaggaaccagccatgaggttcggcacccaggtctccggaggagacacagttacccgaacccttcgcctgaataactccagcccctgtgacatccgcctggattgggagacctatgttccagaagacaaggaagaccggctggtggagctgctggtgttttatgggccacctttcccgctgcgggaccaagccgggaatgagcttgtgtgccctgatacccctgagggtggctgcctcctctggtccccaggcccctccagttcatcggaattcagccatgaaactgactcatcagttgagggcagctccagtgccagcaatagggtggcacagaagctcatctcagtcatcctgcaggcacatgagggggtgccctccggccacctgtactgtatcagccccaagcaggtggtggtccctgctgggggcagcagtaccatctacatctccttcacccctatggtgctcagccctgagatcctgcacaaggtggagtgtactggctacgccctgggtttcatgagcttggacagcaaggtggaaagggagattccagggaagaggcatcgcctgcaggactttgcggtgggacccctgaaactggacctgcatagctacgtgaggcctgcacagctaagtgtggagctggactacggcggcagtatggaattccagtgccaggccagtgacctcattcccgagcagccctgctctggggtgctgagtgagctggtgaccacccaccacctgaagctgaccaacactacagagatcccacactacttccggcttatggtctccaggcccttctccgtttctcaagatggggcgagccaggaccacagagctcctggccctggccagaagcaggagtgtgaggaggagacagcctcagcggacaagcagctggtgctccaagcacaggagaacatgctggtgaacgtgtccttctcactctccctggagctgctctcctatcagaagctcccagctgaccagacactgcctggggtggacattcagcagagtgcgagtggagagagagagatggtgtttactcagaacctgctcctggagtacaccaaccagaccactcaggtggtgcccctgcgggctgtggtggccgtgcctgagctgcagctctccaccagctgggtggactttgggacctgctttgtgagccagcagcgagtccgggaggtctacctgatgaacctgagcgggtgccgaagctactggactatgctgatgggagtagtgagctgtacgagtccacgatggtggtggaaggtgtgctcggtgagaagtcctgcaccctgcggctccggggccaaggctcctatgatgagagatacatgttgcctcaccagccctgaggctccgccccagccctcagccccaggccccagctggagaaaaaacattgcccagggattaggagcagctcttcagcacaaagacacagacttggggacctggggacctctgggcagctcctggaatggaagaacccccttccacaatggtctcagcctaggccctcatgatatgtcctcagagctaacataaaggacaggccacaccacagcagagaccaccacattgagatcactactcagtgcatagcgaagaccagtatggcaaaattagtcttggaaaaaaaccacagccactaagataaattcatgcacttttactatgaaaaaaaaaaaaaaaaaa

SEQ ID NO: 3227 - DNA, 1799 bp, Homo Sapiens
  NM_007342
acgtaaccgttcaagcatccctccttcccaggacacactcaaagcgtcagagcggtccgctcttctcaagtcctattggctcaagtccatgcgtctcatggcactgccgggtgagaggcggaaaaaggccttcccaggcgcgagaagatgacgtcacagtagcccggccgggcgccgaggttgccttagggctctctgcccagtaacaggcatcgaacggtgcagactgaagacgccctccgtcagcgacgccgtcgcaatggccatttgtcaattcttccttcaaggccggtgccgctttggagatcggtgctggaacgaacatcccggtgctaggggtgcaggaggaggacggcagcaaccgcagcagcagccttcaggtaataatagacgtggatggaatacaactagccagagatattccaatgtcatccagccatccagtttctccaaatccacaccatgggggggcagcagagatcaagaaaagccatatttcagttcttttgattctggagcttcaactaacaggaaggaaggctttggattgtctgagaacccatttgcttcacttagtcctgatgagcagaaagatgaaaagaaacttctggaaggaattgtaaaagatatggaggtttgggaatcatcagggcagtggatgttttctgtttattcaccagtgaaaaagaaacctaatatttcaggttttacagacatttcaccagaggaattgaggcttgaataccataacttcttaaccagcaataacttacagagttatctaaattctgtccaacgtttaataaatcaatggaggaacagggtaaatgaactgaaaagtctaaatatatcaactaaagtagctttgctctctgatgtaaaggatggagtaaatcaagcagcacctgcatttggatttggcagcagtcaagcagcaacatttatgtcgccaggctttccagtcaataacagcagcagtgataatgctcagaactttagttttaaaacaaactctggatttgctgctgcctcttctggaagccctgctggttttgggagttccccagcatttggagctgcagcctctaccagttcaggtatctctacttctgctccagcttttggatttgggaagcctgaagtcacatcggctgcatcattttcattcaaaagccctgcagcttccagttttggatcacctggattttcaggacttccagcttccttggcaacaggtcctgtcagagctccagtggccccagcctttggaggtggcagttctgtggctggttttggtagtccgggctcacattctcacactgctttttctaagccatccagtgacacttttggaaatagcagcatatccacttctctgtcagcctcaagcagcatcattgcaacagataatgtgttattcacacccagagataaactaacagtagaagaactggaacaatttcaatccaagaaatttactctgggaaaaattccattaaagcctccacctctggaacttctaaatgtttaaaagggcaattttaaatacaaaaaagaatgatgtttaaaattgctttgagtgattcatacagagatgtatatatgcatacatgtatatattcataaggaatataagcttccatcaatagtgattttaaatttgatttttttcttaactctaaatatttaagtaaaaagtaacaaaaactctgcaagcaagggaatttttttgtactgtaattttgaatggaactgaaaaattatgcacgaataaagtacttttctcatgccataccaaa

SEQ ID NO: 3228 - DNA, 3137 bp, Homo Sapiens
  NM_007344
agcagcacttccgggttgggagaaaggtggcggcgctttcggagggaataaaatggaaggagaatcaagcagatttgaaatccacactccagtttctgacaagaaaaagaaaaagtgttctatacataaggaaagacctcagaaacattcccacgaaattttcagagactcctccctggtgaatgaacagtctcaaataactaggaggaaaaagaggaaaaaagatttccagcatctcatttcttctcctttgaaaaaatccagaatctgtgatgagactgcaaatgccacttccacactcaaaaagagaaaaaagagaagatatagtgctttggaggtggacgaggaagcaggtgttacagttgtccttgtggataaagaaaatattaacaacacaccaaagcattttagaaaggatgttgatgttgtttgtgttgatatgagcatagaacagaagttaccaagaaagcctaaaacagacaaatttcaggtacttgctaagtcacatgcacataaatcagaagccctgcacagtaaagttagggagaaaaagaataaaaagcatcagaggaaagctgcatcctgggagagccagcgggcaagggacaccctgcctcagtcagaatcccaccaggaggagtcctggctttctgtgggtccagggggtgaaattacagaactaccagcatctgctcataaaaacaagtctaagaaaaaaaagaaaaagtccagtaaccgggaatatgagacactggccatgcctgaaggatcgcaagcaggcagagaggccgggactgatatgcaggaatcccagcctactgtgggcttggatgatgaaactccacaactactaggacctactcacaaaaaaaagtctaagaaaaaaaagaagaaaaagtccaatcaccaggaatttgaggcattggccatgcctgaaggatcacaagtgggcagtgaggttggggctgatatgcaggaatcccggcctgctgtgggcctgcatggtgaaactgcaggaataccagcacctgcttataaaaacaagtctaagaaaaaaaagaaaaagtccaatcaccaggaatttgaggcagtggccatgcctgagagcctcgagagtgcataccctgaaggatcacaggtgggcagtgaggttgggactgtggaaggcagtacagctcttaaagggttcaaggaatccaacagtacaaagaagaagtctaagaaaaggaagcttacgtctgtcaaaagggcacgagtgtctggtgatgatttttcagtgcccagtaagaactctgagagcacactctttgattcagtagaaggtgatggcgccatgatggaagaaggtgtgaaatctaggccccgacaaaagaaaacccaggcctgtttggcaagcaagcacgtgcaagaggcgccaaggttagaacctgcaaatgaagaacacaatgtggaaacagctgaagattccgaaataagatacttatctgcagattcaggagatgccgatgattcagatgcggatttgggttctgccgtgaaacagcttcaggagttcattcctaacatcaaggacagggccaccagcacaatcaagcggatgtaccgggacgacttggaacggtttaaggaatttaaagcacaaggtgtcgctattaaatttggcaagttttctgtaaaggaaaataagcagttagagaaaaatgtggaagactttctagccctgacaggcattgagagtgcagacaagctgctgtacacggacagatatcctgaggaaaaatctgtgatcaccaacttaaaaaggagatactcgtttagattacacattggtaggaacattgcccggccctggaaacttatatactatcgagcaaagaagatgttcgatgtcaacaattacaaaggcaggtatagcgaaggagatactgagaagttaaagatgtaccattctctccttgggaatgactggaagacgattggtgagatggtggcccgaagtagcctctccgtggccctcaagttctcacagatcagcagtcaaagaaatcgtggtgcttggagtaagtctgaaacccggaaactaatcaaggctgtcgaagaagtgattctgaagaagatgtctccccaggagttaaaagaggtggattccaaactccaagaaaatcctgaaagttgcctatcaattgttcgggaaaaactctacaagggcatatcttgggtagaagtagaagctaaagtgcaaaccagaaattggatgcagtgtaaaagtaagtggacagaaattctaaccaagaggatgactaatggtcggcgtatctactatggcatgaatgccctgcgggccaaggtcagccttattgaaaggttgtatgaaataaatgtggaagatactaatgaaatagactgggaagatcttgctagtgccataggtgatgttcctccatcttacgttcaaactaaattttctaggctgaaagctgtctatgttccattttggcagaaaaagacttttccagagatcatcgactacctttatgagacgactctacctttgctgaaggaaaagttagaaaaaatgatggagaaaaaaggcactaaaatccagactcctgcagcacccaagcaagttttcccatttcgagacatcttttattatgaagacgatagtgaaggagaggacatagaaaaagaaagcgaaggccaggcgccatgcatggctcacgcctgtaattccagtactttgggaggccaaggccggtggatcatctgaggtcaggagttcgagaccggcctgaccaacatggtgaagacctgtcactattaaaaatgcgaaaattagccgggtgtggtagtgcacacctgtaatttcaactacttgggaggctgaggcaggagaattgcttgaacccaggaggtggaggttgcagtgagccaagatcgcaccaccgcatgagagagagagattactatttcttgtccctttttctcagtttgattatatttatatacatatgtcagtaaatctgttttcagtattgatgtttaataaagaatgtacaatggccagagttctactctttcctctggagcattaaaatatattgccattcctattaaaacgtatttgaatgtgaaaa

SEQ ID NO: 3229 - DNA, 6682 bp, Homo Sapiens
  NM_007347
gcggcggcggcatcgcgggcggcggcggcgatgagcgacatagtggagaagacgctgacggcgctgccgggactctttctgcagaaccagcccggtggtgggcccgcggccgccaaggcgtccttctcctcgaggctgggcagccttgtccgcggcatcacagccctcacctccaagcacgaagaagaaaaattaatccagcaggaactgagtagtctgaaagcgactgtttctgctcctactacaacactgaaaatgatgaaggaatgtatggtgagacttatatattgtgaaatgcttggatatgatgcttcctttggctatattcatgcaatcaagttagcccaacaaggaaacctcttagaaaaaagagtaggttatttggctgtttccttatttctacatgaaagtcatgaattattgcttctccttgtgaatacagttgtaaaggatctgcagagcactaacctagtagaagtgtgtatggcactgactgttgttagccagattttcccctgcgaaatgattccagctgttcttccattaatagaagataaacttcaacattctaaggagattgtacgaagaaaagctgttctggcattatacaaattccatctcattgctcctaatcaagtacaacatattcatattaagtttcggaaagcactttgtgacagagatgttggggtcatggctgcctccttgcatatatatcttagaatgattaaggagaattcatctggatataaagacttgactgggagttttgtaaccattttgaagcaagtagttggaggaaagctcccagtagaattcaattaccacagtgtgccagcaccatggttacaaattcagctcttgagaatactgggacttctaggaaaagatgatcaaaggacaagtgaattaatgtatgatgttcttgatgaatccttacgaagagctgagttaaatcacaatgtcacatatgctattttgtttgaatgtgtgcatacagtctattctatttatcctaaatcggaattacttgagaaggctgccaagtgcattggaaaatttgttctgtcacctaaaataaatctaaaatatttaggactgaaggctcttacctatgttatccaacaggatcctactctggctcttcaacaccagatgacaataattgaatgtttagatcatcctgatcccattattaaaagagagactctggaacttctttacagaattactaatgcacagaatataacagttattgtccagaaaatgcttgaatatttacatcagagcaaagaagagtatgtcatcgtcaatttggtcggcaaaatagcagagctggctgagaaatatgctcctgataatgcatggtttattcagacaatgaatgctgtgttttcagtaggaggagatgtaatgcatcctgatattcccaataactttctgagactactagcggaaggttttgatgatgaaacagaagatcagcaattaagactctatgcagttcagtcttatctcactttactggatatggaaaatgtgttctatccacagagatttcttcaagttatgagttgggtattaggggaatattcctacctcttagataaggaaacgccagaggaagttatagctaagctctacaagttacttatgaatgactctgtgtcttcagaaacaaaagcctggttaattgctgctgtgaccaaattgacatctcaggcgcactcttctaatacagttgagagattaatccatgaatttaccatatctttggatacttgtatgagacaacatgcatttgaattaaaacatttgcatgagaatgtggaacttatgaagagcttgcttccagttgacaggagttgtgaagacttggtggtagatgcttctttatcttttctggatggttttgtggctgaaggactcagtcagggtgcagcgccttacaaacctccccatcaacgccaggaggaaaagctttctcaggaaaaagttctcaattttgaaccatatggactctccttttcttcatctggcttcactggacgacagtctcctgctggcatttctcttggttcagatgtatctgggaatagtgctgagacaggactgaaagagacaaatagcttgaagctggaaggtataaagaaattgtgggggaaagaaggctatcttcccaagaaggaaagcaaaactggtgatgaaagtggagctctgcctgttcctcaagagagtataatggagaatgtagatcaagctataactaaaaaggatcaatctcaagttcttacccaatctaaagaggagaaagaaaagcagctgctggcatcatcattatttgttggtctaggatcagaaagtacaatcaacctgctgggaaaagcagatactgtctctcacaagttcagaaggaaatcaaaagtcaaagaagctaaaagtggcgaaacaaccagtactcataatatgacctgttcttcctttagttctttgtcaaatgtggcatatgaagatgattattattcgaatactttgcacgatacaggagacaaggaattaaagaaattttctctcacttcagaacttttggattctgagtcactcacagaactgcccttggttgagaaattctcatattgtagtctgtctacaccttcattgtttgctaataacaacatggaaatttttcaccctcctcaatctactgcagcctcagttgccaaggaaagctctttagcttcatcttttttggaagaaactactgaatacatacactcaaatgctatggaagtctgtaataatgaaactatatcagtgtcttcttataaaatttggaaagatgattgtttattgatggtctggtcagtcactaataagagtggtttggaattgaaaagtgctgacttagaaatttttcctgcagaaaatttcaaggtgactgagcaacctggatgctgtttgcctgtaatggaagcagaaagcaccaaaagctttcaatatagtgtgcagatagaaaaaccttttacagaaggaaatcttactggttttattagttatcatatgatggatactcattctgctcagctggaattttctgtaaacttatcactattagatttcattagaccattaaaaatctcaagtgacgactttgggaaactctggttatccttcgcaaatgatgtgaaacaaaatgtaaaaatgtcagaatctcaagctgcacttccttctgcactaaagactctgcaacagaaactaagactccatattattgagattataggcaatgaagggctattggcctgtcagctgctcccatccatcccctgcttactgcattgccgagttcatgcagatgtattagccctgtggttcagatcctcctgttctactcttcctgactatttactgtatcagtgtcaaaaggtgatggagggatcctagcagaagccctgctaaattttactccatcaagatcaatggtttacatagataaacttatttaccaaagtaaaaagaactcatggtacttctaatgaaaatggggattattacaagtgtggtttatatgttttctttgtgattcctggtcaagaaagatccccaaaactgtatccctaacctttaactcaggattgtacagtatgtttaggtccctcaaaaagtgacctaagctaatgttataaactgctaatgatttatatatcacttagtgtgtagagggactgaaaatatttattttgttataaataattttatagcacgtttactctagtgctagctaatttgtaataaagccaagtctcagttttctgcattaaatggaagggagacatgaaattgataatctcaaacttaattcatatttggctttggaatgtagtgtatggtttttggtagggaagtcaatattttcgattatgttttgcttagatcagtgttgaactaagttggcatagcacacactaacagttgtaggagatccatgagcatgctggatattgaggggatccaatctgtgatctattttttattatagataactgttacacataatttcagatcgtttggctgtaaaatttgtctgttttccacttggagttattttaaaattcaaagtaaatcactctattcttattttgaaaactcagagccattttatatagaaacaaaacccataagagcacacagtaacaaagcaaacagatacaaaaatgactttttagttatgacaaatattttagttggttactacttaggtccttttggcaaatgaaaatttgtgattagagtataaatggcaaaactatcttttcctggcctttgaatccactagtacttaatggatatagctgaagcagagactaagtataacatacaggttcttcagtaaaatatatcattttcatgttatagttatgcctgtgtggcctctgtcagaactattatcagtaaaagaggttaagcctatatatgaatgatggaccaaaaccttgaggttgtacattaactgaaatagtattttataaaatcttatggtgctgtggaaaatatttattatttcaccttttctgacacttcaccatggagactattcaggtaatacaattttaagtcattgcagttaatactctggttaattggtactgttaatcacccaggtcaggaattctgattttaggttatctcattaatcatggctgataaagaagctaaggggattctccagatctaatagatttcattagtcatttgtgtcgagtattcctccctaaaaacaaaagcagtattttctttctcaattaatttttaagttattcattaaaaaatatataacatcttaattttattcttttaaaaacatacagtgaagccttgctacaagagtcataagtgactggaatttcttgcataataggttcctccttttgaatagatcagattcatccccaggctctcagcagtgtcatgatgaaatgagtgtgctgacttcaggggtgtggtggacactggtagctagccttatcagctccctccttattcctacctctgtcagcagcatgcctcgccccttacctaattctgctgtgactctgacagagaggaagtgccttctcactttgcaaaggaatgcagcatgtcacaaaggaggtgctccaattttttgtgtccttacttccctatgtttgcctagttactgaggctaggtcgagtgtgaagcaataggtgtaagatgctgagagcacatggacagctaccagggagatctgttgcttggttacagggtgtattcatgagtggtagctgcagttgtcgtgagagacatgcttggcatacagagctgtctaatgggtgggagacatgtaatggtagatttagggctgggagcatgattttgggtctgcccaaaggaacatggtgtcacttttgttctttctgacccactaaataaaaagtagtgtaacagggtttcactggaatgtttattagaaagtttacactttttatatttttatgattttaaaaacaaacaataatagaaaaacagattttaaggaacttcagagcagtatatattctgtctaaactcactgaatattttaagttgtaaatcaggtgtccaccaacctttatttttgcattgcaggagatgtgactgtaaagtagggagtttttttttttgagacagagtttcacccttgttgcccaggctagagtgtaatggtgcaatctccgctcactgcaacctctgcctcccaggttcaagcgattctcctgcctcagcctccctagtagctgggattacaggcatgcaccaccacacccggctaatttttttatatttttagtagagacaaggtttctccatgttggtcaggctggtctcgaactcccgacctcaggtgatctgcccgcctcagcctcccaaagtgctgggattacaggcgtgagccactgcgcccggccaaattatttttgtgggtagattcattctctttacctaatagtcataatttagtcagtgaagggacaacatctggggtaagagctatggaggaggtgctcagctttgtgagttttgtgccaggcatctttgctgaaaatggagatggcagcaagtgtgaatctgggggaatataagggaagacagaaaagccttaagagtagacggaggaagaagggtaccagaatagtccctgtggaggcaggcagatcagagctcagggtttgaaagtgggcctgagtaagggtcctgctagagaaactgcagatggaagctgagcagttaccaactgctaatgtgccaagtataccaagcacagcatgtgtcctgtagaggagcattattttaaacaatgttctactatcatctaccaaaataattgtggtaaaagtgtagtattttattttttccttttatgtcagcaatattttaaaatattgatctgtttatcttatatttttatggataaatgtagtatttgcctcatgattgtgagccactgagagtgcactgaacctattcacatgtctttaagatgttttgctgtgttaaaattttaggagagaaaaatacaagtgaataattatttaataggcatttattactttattttggagttgaattctgtcatttgaaaaagttcagtaatgtaataaatacaaagtgatctgcactgtt

SEQ ID NO: 3230 - DNA, 2488 bp, Homo Sapiens
  NM_007348
ttttgtccgcctgccgccgccgtcccagatattaatcacggagttccagggagaaggaacttgtgaaatgggggagccggctggggttgccggcaccatggagtcaccttttagcccgggactctttcacaggctggatgaagattgggattctgctctctttgctgaactcggttatttcacagacactgatgagctgcaattggaagcagcaaatgagacgtatgaaaacaattttgataatcttgattttgatttggatttgatgccttgggagtcagacatttgggacatcaacaaccaaatctgtacagttaaagatattaaggcagaacctcagccactttctccagcctcctcaagttattcagtctcgtctcctcggtcagtggactcttattcttcaactcagcatgttcctgaggagttggatttgtcttctagttctcagatgtctcccctttccttatatggtgaaaactctaatagtctctcttcagcggagccactgaaggaagataagcctgtcactggtcctaggaacaagactgaaaatggactgactccaaagaaaaaaattcaggtgaattcaaaaccttcaattcagcccaagcctttattgcttccagcagcacccaagactcaaacaaactccagtgttccagcaaaaaccatcattattcagacagtaccaacgcttatgccattggcaaagcagcaaccaattatcagtttacaacctgcacccactaaaggccagacggttttgctgtctcagcctactgtggtacaacttcaagcacctggagttctgccctctgctcagccagtccttgctgttgctgggggagtcacacagctccctaatcacgtggtgaatgtggtaccagccccttcagcgaatagcccagtgaatggaaaactttccgtgactaaacctgtcctacaaagtaccatgagaaatgtcggttcagatattgctgtgctaaggagacagcaacgtatgataaaaaatcgagaatccgcttgtcagtctcgcaagaagaagaaagaatatatgctagggttagaggcgagattaaaggctgccctctcagaaaacgagcaactgaagaaagaaaatggaacactgaagcggcagctggatgaagttgtgtcagagaaccagaggcttaaagtccctagtccaaagcgaagagttgtctgtgtgatgatagtattggcatttataatactgaactatggacctatgagcatgttggaacaggattccaggagaatgaaccctagtgtgagccctgcaaatcaaaggaggcaccttctaggattttctgctaaagaggcacaggacacatcagatggtattatccagaaaaacagctacagatatgatcattctgtttcaaatgacaaagccctgatggtgctaactgaagaaccattgctttacattcctccacctccttgtcagcccctaattaacacaacagagtctctcaggttaaatcatgaacttcgaggatgggttcatagacatgaagtagaaaggaccaagtcaagaagaatgacaaataatcaacagaaaacccgtattcttcagggtgctctggaacagggctcaaattctcagctgatggctgttcaatacacagaaaccactagtagtatcagcaggaactcagggagtgagctacaagtgtattatgcttcacccagaagttatcaagacttttttgaagccatccgcagaaggggagacacattttatgttgtgtcatttcgaagggatcacctgctgttaccagctaccacccataacaagaccacaagaccaaaaatgtcaattgtgttaccagcaataaacataaatgagaatgtgatcaatgggcaggactacgaagtgatgatgcagattgactgtcaggtgatggacaccaggatcctccatatcaaaagttcgtcagttcctccttacctccgagatcagcagaggaatcaaaccaacaccttctttggctcccctcccgcagccacagaggcaacccacgttgtcagcaccatccctgagtcattacaatagcaccctgcagctatgctggaaaactgagcgtgggaccctgccagactgaagagcaggtgagcaaaatgctgctttctgccttggtggcaggcagagaactgtctcgtactagaattcaaggaggaaagaagaagaaataaaagaagctgctccatttttcatcatctacccatctatttggaaagcactggaattcagatgcaagagaacaatgtttcttcagtggcaaatgtagccctgcatcctccagtgttacctggtgtagatttttttttctgtacctttctaaacctctcttccctctgtgatggttttgtgtttaaacagtcatcttcttttaaataatatccacctctcctttttgccatttcacttattgattcataaagtgaattttatttaaagcta

SEQ ID NO: 3231 - DNA, 3723 bp, Homo Sapiens
  NM_007349
cggggccgggcgccgccgcggagcctcccgggccgccgcgatcatgtcggaccaggcgcccaaagttcctgaggagatgttcagggaggtcaagtattacgcggtgggcgacatcgacccgcaggttattcagcttctcaaggctggaaaagcgaaggaagtttcctacaatgcactagcctcacacataatctcagaggatggggacaatccagaggtgggagaagctcgggaagtctttgacttacctgttgtaaagccttcttgggtgattctgtccgttcagtgtggaactcttctgccagtaaatggtttttctccagaatcatgtcagattttttttggaatcactgcctgcctttctcaggtgtcatctgaagacagaagtgccctgtgggctttggttacgttctatgggggagattgccagctaaccctcaataagaaatgcacgcatttgattgttccagagccaaagggggagaaatacgaatgtgctttaaagcgagcaagtattaaaattgtgactcctgactgggttctggattgcgtatcagagaaaaccaaaaaggacgaagcattttatcatcctcgtctgattatttatgaagaggaagaagaggaagaggaagaggaggaggaagtagaaaatgaggaacaagattctcagaatgagggtagtacagatgagaagtcaagccctgccagctctcaagaagggtctccttcaggtgaccagcagttttcacctaaatccaacactgaaaaatctaaaggggaattaatgtttgatgattcttcagattcatcaccggaaaaacaggagagaaatttaaactggaccccggccgaagtcccacagttagctgcagcaaaacgcaggctgcctcagggaaaggagcctgggttgattaacttgtgtgccaatgtcccacccgtcccaggtaacattttgccccctgaggtccggggtaatttaatggctgctggacaaaacctccaaagttctgaaagatcagaaatgatagctacctggagtccagctgtacggacactgaggaatattactaataatgctgacattcagcagatgaaccggccatcaaatgtagcacatatcttacagactctttcagcacctacgaaaaatttagaacagcaggtgaatcacagccagcagggacatacaaatgccaatgcagtgctgtttagccaagtgaaagtgactccagagacacacatgctacagcagcagcagcaggcccagcagcagcagcagcagcacccggttttacaccttcagccccagcagataatgcagctccagcagcagcagcagcagcagatctctcagcaaccttacccccagcagccgccgcatccattttcacagcaacagcagcagcagcagcaagcccatccgcatcagttttcacagcaacagctacagtttccacagcaacagttgcatcctccacagcagctgcatcgccctcagcagcagctccagccctttcagcagcagcatgccctgcagcagcagttccatcagctgcagcagcaccagctccagcagcagcagcttgcccagctccagcagcagcacagcctgctccagcagcagcagcaacagcagattcagcagcagcagctccagcgcatgcaccagcagcagcagcagcagcagatgcaaagtcagacagcgccacacttgagtcagacgtcacaggcgctgcagcatcaggttccacctcagcagcccccgcagcagcagcagcaacagcagccaccaccatcgcctcagcagcatcagctttttggacatgatccagcagtggagattccagaagaaggcttcttattgggatgtgtgtttgcaattgcggattatccagagcagatgtctgataagcaactgctggccacctggaaaaggataatccaggcacatggcggcactgttgaccccaccttcacgagtcgatgcacgcaccttctctgtgagagtcaagtcagcagcgcgtatgcacaggcaataagagaaagaaagagatgtgttactgcacactggttaaacacagtcttaaagaagaagaaaatggtaccgccgcaccgagcccttcacttcccagtggccttcccaccaggaggaaagccatgttcacagcatattatttctgtgactggatttgttgatagtgacagagatgacctaaaattaatggcttatttggcaggtgccaaatatacgggttatctatgccgcagcaacacagtcctcatctgtaaagaaccaactggtttaaagtatgaaaaagccaaagagtggaggataccctgtgtcaacgcccagtggcttggcgacattcttctgggaaactttgaggcactgaggcagattcagtatagtcgctacacggcattcagtctgcaggatccatttgcccctacccagcatttagttttaaatcttttagatgcttggagagttcccttaaaagtgtctgcagagttgttgatgagtataagactacctcccaaactgaaacagaatgaagtagctaatgtccagccttcttccaaaagagccagaattgaagacgtaccacctcccactaaaaagctaactccagaattgaccccttttgtgcttttcactggattcgagcctgtccaggttcaacagtatattaagaagctctacattcttggtggagaggttgcggagtctgcacagaagtgcacacacctcattgccagcaaagtgactcgcaccgtgaagttcctgacggcgatttctgtcgtgaagcacatagtgacgccagagtggctggaagaatgcttcaggtgtcagaagttcattgatgagcagaactacattctccgagatgctgaggcagaagtacttttctctttcagcttggaagaatccttaaaacgggcacacgtttctccactctttaaggcaaaatatttttacatcacacctggaatctgcccaagtctttccactatgaaggcaatcgtagagtgtgcaggaggaaaggtgttatccaagcagccatctttccggaagctcatggagcacaagcagaactcgagtttgtcggaaataattttaatatcctgtgaaaatgaccttcatttatgccgagaatattttgccagaggcatagatgttcacaatgcagagttcgttctgactggagtgctcactcaaacgctggactatgaatcatataagtttaactgatggcgtctaggctgccgtgcatgtcgactcctgcggtgcggggctggctgtctggctggcgaggagctgctgcgcttccttcacatgctcttgttttccagctgctttcctgggggatcagactgtgaagcaggaagacagatataataaatatactgcatctttttaagatgtgcaattttattctgaggaaacataaattatgttttgtattatatgactttaagagcccacattaggttttatgattcatttgccaggtttttaaatgttttcacaaaactgttacgggacttcaactagaaataaaatggtgtaaataaagaccttgctatctctaaattatggatgttaaagatttgaaatgttttgtactttgattatttttatttcttatactctgttttcttttatattgatatcttgcccacattttaaataaatgtacttttgaacttaaaaaaaaaaaa

SEQ ID NO: 3232 - DNA, 4973 bp, Homo Sapiens
  NM_007351
cagctatcaaaaaggccataaggattttgtccccaaatttcacatgagctaccttgcttcaaactactgagatgaagggggcaagattatttgtccttctttctagtttatggagtgggggcattgggcttaacaacagtaagcattcttggactatacctgaggatgggaactctcagaagactatgccttctgcttcagttcctccaaataaaatacaaagtttgcaaatactgccaaccactcgggtcatgtcggcggagatagctacaactccagaggcaagaacttctgaagacagtcttcttaaatcaacactgcctccctcagaaacaagtgcacctgctgagggtgtgagaaatcaaactctcacatccacagagaaagcagaaggagtggtcaagttacagaatcttaccctcccaaccaacgctagcatcaagttcaatcctggagcagaatcagtggtcctttccaattctacactgaaatttcttcagagctttgccagaaagtcaaatgaacaagcaacttctctaaacacagttggaggcactggaggcattggaggcgttggaggcactggaggcgtgggaaatcgagccccacgggaaacatacctcagccggggtgacagcagttccagccaaagaactgactaccaaaaatcaaatttcgaaacaactagaggaaagaattggtgtgcttatgtacataccaggttatctcccacagtgatattggacaaccaggtcacttatgtcccaggtgggaaaggaccttgtggctggaccggtggatcctgtcctcagagatctcagaagatatccaatcctgtctataggatgcaacataaaattgtcacctcattggattggaggtgctgtcctggatacagtgggccgaaatgtcaactaagagcccaggaacagcaaagtttgatacacaccaaccaggctgaaagtcatacagctgttggcagaggagtagctgagcagcagcagcagcaaggctgtggtgacccagaagtgatgcaaaaaatgactgatcaggtgaactaccaggcaatgaaactgactcttctgcagaagaagattgacaatatttctttgactgtgaatgatgtaaggaacacttactcctccctagaaggaaaagtcagcgaagataaaagcagagaatttcaatctcttctaaaaggtctaaaatccaaaagcattaatgtactgataagagacatagtaagagaacaatttaaaatttttcaaaatgacatgcaagagactgtagcacagctcttcaagactgtatcaagtctatcagaggacctcgaaagcaccaggcaaataattcaaaaagttaatgaatctgtggtttcaatagcagcccagcaaaagtttgttttggtgcaagagaatcggcccactttgactgatatagtggaactaaggaatcacattgtgaatgtaaggcaagaaatgactcttacatgtgagaagcctattaaagaactagaagtaaagcagactcatttagaaggtgctctagaacaggaacactcaagaagcattctgtattatgaatccctcaataaaactctttctaaattgaaggaagtacatgagcagcttttatcaactgaacaggtatcagaccagaagaatgctccagctgctgagtcagttagcaataatgtcactgagtacatgtctactttacatgaaaatataaagaagcagagtttgatgatgctgcaaatgtttgaagatttgcacattcaagaaagcaagattaacaatctcaccgtctctttggagatggagaaagagtctctcagaggtgaatgtgaagacatgttatccaaatgcagaaatgattttaaatttcaacttaaggacacagaagagaatttacatgtgttaaatcaaacattggctgaagttctctttccaatggacaataagatggacaaaatgagtgagcaactaaatgatttgacttatgatatggagatccttcaacccttgcttgagcagggagcatcactcagacagacaatgacatatgaacaaccaaaggaagcaatagtgataaggaaaaagatagaaaatctgactagtgctgtcaatagtctaaattttattatcaaagaacttacaaaaagacacaacttacttagaaatgaagtacagggtcgtgatgatgccttagaaagacgtatcaatgaatatgccttagaaatggaagatggcctcaataagacaatgactattataaataatgctattgatttcattcaagataactatgccctaaaagagactttaagtactattaaggataatagtgagatccatcataaatgtacctccgatatggaaactattttgacatttattcctcagttccaccgtctgaatgattctattcagactttggtcaatgacaatcagagatataactttgttttgcaagtcgccaagacccttgcaggtattcccagagatgagaaactaaatcagtccaacttccaaaagatgtatcaaatgttcaatgaaaccacttcccaagtgagaaaataccagcaaaatatgagtcatttggaagaaaaactactcttaactaccaagatttccaaaaattttgagactcggttgcaagacattgagtctaaagttacccagacgctcataccttattatatttcagttaaaaaaggcagtgtagttacaaatgagagagatcaggctcttcaactgcaagtattaaattccagatttaaggcgttggaagcaaaatctatccatctttcaattaacttcttttcgcttaacaaaactctccacgaagttttaacaatgtgtcacaatgcttctacaagtgtgtcagaactgaatgctaccatccctaagtggataaaacattccctgccagatattcaacttcttcagaaaggtctaacagaatttgtggaaccaataattcaaataaaaactcaagctgccctatctaatttaacttgttgtatagatcgatcgttgcctggtagtctggcaaatgttgtcaagtctcagaagcaagtaaaatcattgccaaagaaaattaacgcacttaagaaaccaacggtaaatcttaccacagtcctgataggccggactcaaagaaacacggacaacataatatatcctgaggagtattcaagctgtagtcggcatccgtgccaaaatgggggcacgtgcataaatggaagaactagctttacctgtgcctgcagacatccttttactggtgacaactgcactatcaagcttgtggaagaaaatgctttagctccagatttttccaaaggatcttacagatatgcacccatggtggcattttttgcatctcatacgtatggaatgactatacctggtcctatcctgtttaataacttggatgtcaattatggagcttcatataccccaagaactggaaaatttagaattccgtatcttggagtatatgttttcaagtacaccatcgagtcatttagtgctcatatttctggatttttagtggttgatggaatagacaagcttgcatttgagtctgaaaatattaacagtgaaatacactgtgatagggttttaactggggatgccttattagaattaaattatgggcaggaagtctggttacgacttgcaaaaggaacaattccagccaagtttccccctgttactacatttagtggctatttattatatcgtacataagttagtatgaaaaacagactatcacctttattgagaaacagccagtgttttcatttatctttgcttgcacatctgctctgttttggtttttctacaggaaatgaaaatcaacttgtttttttaatatgagtaaacttgtatgtctattttataaaattatttgaatattgtttaatgtctgaatatgaaagagttcttgatcctaaagaaatttagtggcacagaaaacaaagtgaatttgttagcataattattcctattcttatttcttcattttaagtcattgcaatggaaagtaatattataaaatggtaattacaacatattatcagtcacagttttctttccaattaaacacttaacttttgttattccctgtatataaatatataacacacattttctagattcacaaatttaaataaattactcaaaaaatgaaaattgattttgtaaacttttatttttactctttacgttgagttgatcaattttccatactaagattttcattcagaatcaaaattaagaaagttggactgaaaatatgaaaaatgcttaactattgttctcttcctataattctctaattataacatagtaatttacatgtagttggacatgtacactcaagtctaagaatatatgagtggatcatttaccgccccccgccccacaacatctataaggggcaaaaagtctttttctaataagtattcttctatggtagtacctacagatctgcccttcttcttctaaagggtaagtcataatctgtgtaatactacaatttatgggatgctcactatgccctgtttctcttctaaacaatttacatgtaatgtctcattcctcacaataacccttgtaaagtgggcatgattaccatgatttttatagttgaagaacctaagacacagagaccaaggcccatgagctcatagggctgaggcaggatttggaatcaggccatgtcttctccagagcccacatccatcctttctctatattgcctcccacagatgtgctaaaatttatttaactaatcctttatcctctatttgtgttgtctcccattttttattattacaatattactgtggtgaacatgcttaaaaatacattccttggatatctgacaacgtgtttctgaaaaacagattttcataagtaataataaaaataataataaaaaagttttggtatggtaaaaaa

SEQ ID NO: 3233 - DNA, 2567 bp, Homo Sapiens
  NM_007355
ctccggcgcagtgttgggactgtctgggtatcggaaagcaagcctacgttgctcactattacgtataatccttttcttttcaagatgcctgaggaagtgcaccatggagaggaggaggtggagacttttgcctttcaggcagaaattgcccaactcatgtccctcatcatcaataccttctattccaacaaggagattttccttcgggagttgatctctaatgcttctgatgccttggacaagattcgctatgagagcctgacagacccttcgaagttggacagtggtaaagagctgaaaattgacatcatccccaaccctcaggaacgtaccctgactttggtagacacaggcattggcatgaccaaagctgatctcataaataatttgggaaccattgccaagtctggtactaaagcattcatggaggctcttcaggctggtgcagacatctccatgattgggcagtttggtgttggcttttattctgcctacttggtggcagagaaagtggttgtgatcacaaagcacaacgatgatgaacagtatgcttgggagtcttctgctggaggttccttcactgtgcgtgctgaccatggtgagcccattggcaggggtaccaaagtgatcctccatcttaaagaagatcagacagagtacctagaagagaggcgggtcaaagaagtagtgaagaagcattctcagttcataggctatcccatcaccctttatttggagaaggaacgagagaaggaaattagtgatgatgaggcagaggaagagaaaggtgagaaagaagaggaagataaagatgatgaagaaaaacccaagatcgaagatgtgggttcagatgaggaggatgacagcggtaaggataagaagaagaaaactaagaagatcaaagagaaatacattgatcaggaagaactaaacaagaccaagcctatttggaccagaaaccctgatgacatcacccaagaggagtatggagaattctacaagagcctcactaatgactgggaagaccacttggcagtcaagcacttttctgtagaaggtcagttggaattcagggcattgctatttattcctcgtcgggctccctttgacctttttgagaacaagaagaaaaagaacaacatcaaactctatgtccgccgtgtgttcatcatggacagctgtgatgagttgataccagagtatctcaattttatccgtggtgtggttgactctgaggatctgcccctgaacatctcccgagaaatgctccagcagagcaaaatcttgaaagtcattcgcaaaaacattgttaagaagtgccttgagctcttctctgagctggcagaagacaaggagaattacaagaaattctatgaggcattctctaaaaatctcaagcttggaatccacgaagactccactaaccgccgccgcctgtctgagctgctgcgctatcatacctcccagtctggagatgagatgacatctctgtcagagtatgtttctcgcatgaaggagacacagaagtccatctattacatcactggtgagagcaaagagcaggtggccaactcagcttttgtggagcgagtgcggaaacggggcttcgaggtggtatatatgaccgagcccattgacgagtactgtgtgcagcagctcaaggaatttgatgggaagagcctggtctcagttaccaaggagggtctggagctgcctgaggatgaggaggagaagaagaagatggaagagagcaaggcaaagtttgagaacctctgcaagctcatgaaagaaatcttagataagaaggttgagaaggtgacaatctccaatagacttgtgtcttcaccttgctgcattgtgaccagcacctacggctggacagccaatatggagcggatcatgaaagcccaggcacttcgggacaactccaccatgggctatatgatggccaaaaagcacctggagatcaaccctgaccaccccattgtggagacgctgcggcagaaggctgaggccgacaagaatgataaggcagttaaggacctggtggtgctgctgtttgaaaccgccctgctatcttctggcttttcccttgaggatccccagacccactccaaccgcatctatcgcatgatcaagctaggtctaggtattgatgaagatgaagtggcagcagaggaacccaatgctgcagttcctgatgagatcccccctctcgagggcgatgaggatgcgtctcgcatggaagaagtcgattaggttaggagttcatagttggaaaacttgtgcccttgtatagtgtccccatgggctcccactgcagcctcgagtgcccctgtcccacctggctccccctgctggtgtctagtgtttttttccctctcctgtccttgtgttgaaggcagtaaactaagggtgtcaagccccattccctctctactcttgacagcaggattggatgttgtgtattgtggtttattttattttcttcattttgttctgaaattaaagtatgcaaaataaagaatatgccgttttaaaaaaaaaaaaaaaaaaaaaaaaaaaaa

SEQ ID NO: 3234 - DNA, 2977 bp, Homo Sapiens
  NM_007357
cattggccgcggcgcgggcgctgccatgttggcggaagcggacccccctgtgccgtggaaactggcggtggccgcggccgccgagtcggtctgcgcagcctcctgcgttttctcgcttggatcttggcactgagaggcggtggccggcgggatggagaaaagtaggatgaacctgcccaaggggccggacacgctctgcttcgacaaggacgagttcatgaaggaagatttcgatgtcgatcattttgtgtctgactgtaggaagcgggtccagctggaagaactgagagatgacctggagctctactataaacttcttaaaacagccatggtcgaactcatcaacaaggattatgcagattttgtcaatctttcaacaaacttggttggcatggacaaagccctcaaccagctttctgtgcctttgggacaattacgagaagaggttctgagccttagatcgtctgtcagtgaaggaattcgggcagttgatgaacgaatgtctaaacaagaggacattaggaaaaaaaagatgtgtgtattgaggcttatacaagttattcggtcagttgagaaaattgaaaaaatcttaaactctcaaagttctaaagaaacctctgcactagaagcaagcagcccccttttgactggacaaattttggagagaattgccacagaatttaatcagttacagtttcatgctgttcaaagcaaaggcatgcctcttttggacaaagtaagaccgcgtatagctggcattacagccatgttacagcagtcactggaaggtctcctattagaaggccttcagacgtctgacgtcgatataatacggcactgcttgcggacttacgccacgattgacaagacacgggacgcggaggccttagttggccaagtactagtgaaaccatacatagacgaggtgattatagagcagtttgttgaatctcatcccaatggccttcaggtcatgtataataaactcctggagtttgttcctcaccattgccgccttcttcgagaagtcacaggaggtgccatctccagtgaaaaaggcaatactgttcctggatatgactttttggtgaattctgtttggccacaaatagtacaaggattagaagaaaagttaccctcgctttttaatcctgggaatcccgatgcatttcatgagaaatataccataagtatggattttgtcagaagattggaacggcagtgtggatcacaggctagtgtaaagagattaagagcccatcctgcctatcacagcttcaataagaagtggaacttgcctgtttattttcaaataagatttagagaaatagcgggatccttagaagcagcacttacagatgtcctggaagatgccccagctgaaagtccgtattgccttttggcttctcatagaacttggagcagccttaggaggtgttggtcagatgagatgttcttgccattactggtgcatcgcctgtggagactcactctgcagattttggcacgatactctgtgtttgtcaatgagctttcactcaggcccatttctaatgaaagtcccaaggagatcaagaaacctttggtaactggtagcaaagaaccttccatcacccaaggaaacactgaagaccaaggaagtggtccttcggaaacaaagcctgtggtttccatttcccgcactcagctcgtgtatgtggttgcagacctggacaagcttcaggagcagcttccagaactcttggaaataatcaagccaaaacttgaaatgattggctttaagaatttttcttctatctcagcagccctggaggactcccagagctctttttcagcctgtgtgccctccttgagtagcaagatcatccaggatttaagtgactcttgcttcggtttcctaaaaagcgccctggaggttcccaggctttaccgaagaaccaataaggaggtcccaaccacagcttcctcctatgtggacagtgctctgaagcccttattccagcttcagagcggacacaaggataagctcaaacaagcaataattcagcagtggctagaaggcactctcagtgaaagcactcataagtactatgaaaccgtgtcagatgtattaaactctgtgaagaagatggaagagagcctgaaaaggctgaaacaagccagaaaaaccactcccgccaaccccgtcggtcccagtggtggcatgagcgacgacgacaaaatcaggctgcagttggccctagatgttgagtacttgggagagcagatacaaaagttgggactacaagcaagtgacataaaaagcttctcagctctcgcagagcttgttgctgctgccaaggaccaggcaacagcagagcagccttaagcatcttggaagatcccgaggttagattcttaagcaagagaagagttggacttccaggctgaaggggagaaagtgactctgttctcttagcaaccgtctgtagcaaagaagtgcttccagcatcactccagcaacacgcccatgcgtcttctctcagcgtatttgggtcttctttgcccaaaagaacacaaaagcctttttccattgtatggaagatagtttttaagacatttgaaactttctactatagtttacagaacaaattattttatttttattgtaaatcttagtgtggaagagctgatttctaaaatatgattaaagtaaatatatacctatgaatatcaagagtcgtctccctgagcctgtagttggaagtgacgactgtaatggaatgatgtcttgtatagaaatgcccttctctgaaataaagagaactcctgggctttctaaagaggctgcgggaagccatcctccactcccactgtgtgtgagagcagtgcttctgatcctgctgtcaccccgacctctggcaggagccggcgccagtaggaaagacctccttcctaaataaaagaagtgtctcccatgaaaaaaaaaaaaaaaaaa

SEQ ID NO: 3235 - DNA, 2175 bp, Homo Sapiens
  NM_007362
agatgctcgcctccgcgcgtttccgcttccgccatcgcggacgcagcctcgtgccgggagtcgccgcattgtggtccgcttctctgcactatgtcgggtggcctcctgaaggcgctgcgcagcgactcctacgtggagctgagccagtaccgggaccagcacttccggggtgacaatgaagaacaagaaaaattactgaagaaaagctgtacgttatatgttggaaatctttctttttacacaactgaagaacaaatctatgaactcttcagcaaaagtggtgacataaagaaaatcattatgggtctggataaaatgaagaaaacagcatgtggattctgttttgtggaatattactcacgcgcagatgcggaaaacgccatgcggtacataaatgggacgcgtctggatgaccgaatcattcgcacagactgggacgcaggctttaaggagggcaggcaatacggccgtgggcgatctgggggccaggttcgggatgagtatcggcaggactacgatgctgggagaggaggctatggaaaactggcacagaaccagtgagtggtgagagctctgtcagtgacaaacactcctttggcctgttgaatttgctgaagaacatcacctaaagtctgcacacgagcccatttttaccaagatttgatcagtgtctttactgagctggaagcctctgaaagttattaaaggacagaatccaaaagaatgcctttaattcttgtctgagaatcttggccatgtgtcagattatcagaacaattttgttaccaggtcagaaattgtgttctttgacaacagattggatctgtaatgttgattagtctttagccataaccactacacttttagaaagacagaaaaatgtaagaatttgtttttaccataatgagtcttaagtaggttcatgatctacattggggcctgggattatttttttaattttaagtttgcatgagatagcctaataaatggaggtggggccaggcatggtggctcacacgtgtaatcccaacactttgggaggctgaggaggaaggatagcttgaggccaggagtttgagactagactgggcaacatagcaagaccccgtctctacaaagcacaacgaaaaacaacaaatggagttgtgctatgttgtattgctttgcacaaaattaggaacaggtgtttgacaattgaatttgttttctgtgaattctaacctctaaaggcatgcttagaggtcaaggaccttcctgtgtagttggtgcaaaagcaatctccacaggacagcactgcttccatgcttcatacatcaggaaatgaggccagaacttgagtatttactaacacgtttttcaaaagatgtcagtgttatacctaaagctaaaaaaaagcaagggtttgtcatagagggaacctctaaataatttcaggggtaggggagatgttgtcaataggaaatgggataaaatatcaagagacaatgaaaacactgccttgacatgaggaccagcaagtttattcttttcattttcagtgatgttgggaatggactgggttttaaaagggagcttgaagagggaatgtttgacagtcacagaaggttcctgcagcagatgcctcttttagccatttctcatttttttcctcaaattttacctactgaggctcaagccttcacagtgagctgatggtctctacagggaggggagtctagggaatttatttggtatttgtaaggcaagaggtgatttctctctaatatatctgagttattgctcatttaaaactgttaagtccagtataattttccctgatatgaaaaaatgtgcatttttttcacttagcaacaaagtaccttctaatttccaatagtccgtgaaagttggggctgaagtacctaagtgtgaatgtctctcccgttaaactgagtgtagaaatctgaatttttaaaagagctgtaactagttgtaagtgcttaggaagaaactttgcaaacatttaatgaggatacactgttcatttttaaaattccttcacactgtaatttaatgtgttttatattcttttgtagtaaaacaacataactcagatttctacaggagacagtggttttatttggattgtcttctgtaataggtttcaataaagctggatgaacttatcgttaaaaa

SEQ ID NO: 3236 - DNA, 3114 bp, Homo Sapiens
  NM_007363
caggcgcagtgcaggactgctccgagcacgcctacgcgcgcattttctccccttcctctccctctttccactttcctctccctttttctcctctcctttccccctcccaccacttggtctttcagtctttcagtcagttcgtttaggtctctccttccgacccccacccccagctcctctccctttccttttccccctccccctttcctttcccgtctcacgcgccaggccgcttgcacatgcgcattaggtacaaagcctcgctctttgtccccatctgtcgttcacacgaactcaagcctttggcattcggcagccaatagaatctaagaaatggcggaaaaatgattccgcctcgggagctaaaccttgattggcagtttagctaaccaatcgagaacgccattttgtaccccttggcaggcaccgagctccgtcgtctcgtttccggcggtcgcgcgctcttttctcgggacgggagaggccgtgtagcgtcgccgttactccgaggagataccagtcggtagaggagaagtcgaggttagagggaactgggaggcactttgctgtctgcaatcgaagttgagggtgcaaaaatgcagagtaataaaacttttaacttggagaagcaaaaccatactccaagaaagcatcatcaacatcaccaccagcagcagcaccaccagcagcaacagcagcagccgccaccaccgccaatacctgcaaatgggcaacaggccagcagccaaaatgaaggcttgactattgacctgaagaattttagaaaaccaggagagaagaccttcacccaacgaagccgtctttttgtgggaaatcttcctcccgacatcactgaggaagaaatgaggaaactatttgagaaatatggaaaggcaggcgaagtcttcattcataaggataaaggatttggctttatccgcttggaaacccgaaccctagcggagattgccaaagtggagctggacaatatgccactccgtggaaagcagctgcgtgtgcgctttgcctgccatagtgcatcccttacagttcgaaaccttcctcagtatgtgtccaacgaactgctggaagaagccttttctgtgtttggccaggtagagagggctgtagtcattgtggatgatcgaggaaggccctcaggaaaaggcattgttgagttctcagggaagccagctgctcggaaagctctggacagatgcagtgaaggctccttcctgctaaccacatttcctcgtcctgtgactgtggagcccatggaccagttagatgatgaagagggacttccagagaagctggttataaaaaaccagcaatttcacaaggaacgagagcagccacccagatttgcacagcctggctcctttgagtatgaatatgccatgcgctggaaggcactcattgagatggagaagcagcagcaggaccaagtggaccgcaacatcaaggaggctcgtgagaagctggagatggagatggaagctgcacgccatgagcaccaggtcatgctaatgagacaggatttgatgaggcgccaagaagaacttcggaggatggaagagctgcacaaccaagaggtgcaaaaacgaaagcaactggagctcaggcaggaggaagagcgcaggcgccgtgaagaagagatgcggcggcagcaagaagaaatgatgcggcgacagcaggaaggattcaagggaaccttccctgatgcgagagagcaggagattcggatgggtcagatggctatgggaggtgctatgggcataaacaacagaggtgccatgccccctgctcctgtgccagctggtaccccagctcctccaggacctgccactatgatgccggatggaactttgggattgaccccaccaacaactgaacgctttggtcaggctgctacaatggaaggaattggggcaattggtggaactcctcctgcattcaaccgtgcagctcctggagctgaatttgccccaaacaaacgtcgccgatactaataagttgcagtgtctagtttctcaaaacccttaaaagaaggaccctttttggactagccagaattctaccctggaaaagtgttagggattccttccaatagttagatctaccctgcctgtactactctagggagtatgctggaggcagagggcaagggaggggtggtattaaacaagtcaattctgtgtggtatattgtttaatcagttctgtgtggtgcattcctgaagtctctaatgtgactgttgagggcctggggaaaccatggcaaagtggatccagttagagcccattaatcttgatcattccggttttttttttttttgtccatcttgtttcatttgcttgccccgcccccgagacggagtcttactctgtcgcccaggctggagtgtagtggcatgatctcggctcactgcaatctctgcctcccgggttcaagcttgtccaggttgatcttgaactcctgacctcgtgatctacccacctcggcctcccaaaatgctgggattacaggggtgagccaccgtgcccaacctcacttgcttcttatccttacactcccccagccccagagaaactgccacatacaccacaaaaaccaaacatcccccaatgaccttagccccattgctccattcactcccaggtgagaattcaggcaaacgtccacaaaggtcacaggcagcgtacatacggttctgttataccccatatattaccccttcatgtcctaaagaagacattttctcttagagattttcattttagtgtatctttaaaaaaaaatcttgtgttaacttgcctccatctttttcttgggtgaggacacccaggaatgacccttttgtgtctatgatgttgctgttcacagcttttcttgataggcctagtacaatcttgggaacagggttactgtatactgaaggtctgacagtagctcttagactcgcctatcttaggtagtcatgctgtgcattttttttttcattggtgtactgtgtttgatttgtctcatatatttggagtttttctgaaaaatggagcagtaatgcagcatcaacctattaaaatacattttaagccttttaaaaaaaaaaaa

SEQ ID NO: 3237 - DNA, 1435 bp, Homo Sapiens
  NM_007364
atccccttacatcctcctaggacccggtcggtagtcgtcgccccagcccgccgggggcgcagcgcccgagccgcggccctcgagacgggaccgagagcatcatgggcagcactgtcccgcgctccgcctccgtgctgcttctgctgctgctcctgcgccgggccgagcagccctgcggggccgagctcaccttcgagctgccggacaacgccaagcagtgcttccacgaggaggtggagcagggcgtgaagttctccctggattaccaggtcatcactggaggccactacgatgttgactgctatgtagaggacccccaggggaacaccatctacagagaaacgaagaagcagtacgacagcttcacgtaccgggctgaagtcaagggcgtttatcagttttgcttcagtaatgagttttccaccttctctcacaagaccgtctactttgactttcaagtgggcgatgagcctcccattctcccagacatggggaacagggtcacagctctcacccagatggagtccgcctgcgtgaccatccatgaggctctgaaaacggtgattgactcccagacgcattaccggctgcgggaggcccaggaccgggcccgagcggaagaccttaatagccgagtctcttactggtctgttggcgagacgattgccctgttcgtggtcagcttcagtcaggtgctactgttgaaaagcttcttcacagaaaaacgacccatcagcagggcagtccactcctagccccggcatcctgctctagggcccctcatgccccaggctggagcagctctcctaggtcacagcctgctgggctgggtcgcgtagcccagggtggaggcagaacgatgctgctgtggtagccctttgcctttcatgcccatgcttgattcttgcacctcagcagctgaaggtctcagagaccagtaatcagaaggcatccgactgcattaagtgtgcagcgctgaaaagacatttacaactaggccagggattagccactgtgggagggtggacaggcaatggttcagtggcctggctgttggcaggaactccaagtgcccaggcctcttgggcagcttagggccctgcctctgtttcatgatgcatgggtcatttgtcttgggtgtcctatcccatatggagaagaaaggggctctaagttctggctcttctttctttggggttctctgtacctgaggaaaccaggccctgggtgactttgcagatctgctcaccctcggtgagcaacagtgtcagccatgcaagcaggacagaatggtgactgggtgcccttggtgagctgtgtatttcctaggaggtagaaaactgtgggaaactgtggctaataaaaactaagtgtgagcgtcctggagaaaaaaaaaaaaaaaaaaaaaaaaaaaaaaaaaaaaaaaaaaaaaaaa

SEQ ID NO: 3238 - DNA, 4220 bp, Homo Sapiens
  NM_007368
tggcggtcttgcaggcgggcggaccctcggccgcgctcggggctccggcgccgccgctcctcctgctcggcctgagctgcccgggctcggcgcgcgcttggggcgaggctcggcgggcgcggacgcgcagcatggcggtggaggacgaggggctccgggtcttccagagcgtgaagatcaagatcggtgaagccaaaaaccttccctcttacccggggccgagcaagatgagggattgctactgcacggtgaacctggaccaggaggaggttttcaggaccaaaattgtggaaaagtcactctgcccgttttacggagaagacttttactgtgaaattcctcggagctttcgtcacctgtccttctacattttcgatagagacgttttccggagggattccatcatagggaaggtggccatccagaaggaggacttgcagaagtaccacaacagggacacctggttccagctgcagcacgtggacgctgactcggaagtgcagggcaaagtgcacctggagctgcggctgagcgaggtcatcacagacactggggtcgtctgccacaagctcgccacacgcatcgtcgagtgccagggcctccccatcgtgaatgggcaatgtgacccctacgccaccgtgacgctggcaggacccttcagatcagaagcaaagaagacgaaagtgaagaggaagaccaacaatccccagttcgatgaagtgttttattttgaggtgacccggccctgtagctacagcaagaagtcccactttgactttgaggaggaagacgtggacaagctcgaaatcagagttgacctctggaatgccagtaacctgaagtttggagatgaattcctgggagaactaaggatcccgttgaaagtcctgcggcagtccagctcctacgaggcgtggtacttcctccagccccgggacaatggtagcaagagcctaaagccagacgacctgggctccctgcggctgaacgtggtatacacggaagaccacgtgttttcttctgactattacagccctctgcgggacctgctgttgaagtctgcggatgtggagcccgtgtcagcgtctgcggcccacatcctgggcgaggtttgccgggagaagcaggaggcggccgtcccgctggtgcggctcttcctacactatggcagggtggtgccattcatcagtgccatcgccagcgcggaggtgaagcggacccaggaccccaacaccatcttccgaggaaactcactggcgtccaagtgcatcgacgagaccatgaagctggcggggatgcattacctgcatgtcaccctgaagcccgccatcgaggagatatgccagagccacaaaccctgtgaaatcgaccctgtgaagttgaaagacggagaaaaccttgaaaacaacatggagaacctacggcagtatgtggaccgcgtcttccacgccatcactgagtctggggtgagctgcccgaccgtcatgtgtgacatcttcttctccctccgggaggcggcggccaagcgcttccaggatgacccggacgtcaggtacactgcagtgagcagcttcatcttcctgaggttctttgcgcccgccattctctcccccaacctcttccagctcacgccgcaccacacggacccccagacgtccaggacgctgacattgatctccaagaccgttcagaccctcggcagcctgtccaagtccaaatctgcgagttttaaggagtcctacatggctacattttatgaattcttcaatgagcagaaatatgctgatgcggtgaagaacttcttggatctgatttcgtcctcggggagaagagaccccaagagtgttgagcagcccatcgtgcttaaagaagggttcatgatcaagagggcccaaggacggaagcgctttgggatgaagaattttaagaagagatggtttcgcttgaccaaccatgaatttacctaccacaaaagcaaaggggaccagcctctctacagcattcccatcgagaacatcctggcagtggagaagctggaggaggagtctttcaaaatgaaaaacatgttccaggtcatccagccagagcgtgcgctgtacatccaggccaacaactgcgtggaggccaaggactggatcgacattctcaccaaagtgagccagtgcaaccagaagcgcctcaccgtctaccacccgtccgcctacctgagcggccactggctgtgctgtagggcgccatccgactcggctccgggctgctcgccctgcactggcggcctcccagccaacatccagctggacattgatggggaccgtgagacggagcgtatctactccctcttcaacttgtacatgagcaagctggagaagatgcaggaggcctgtgggagcaaatctgtgtatgacggcccggagcaggaggagtattcgacgttcgtcattgacgacccccaggagacctacaagacgctaaagcaagtcatcgctggggttggggctttggagcaggagcacgcccagtataagagggacaagttcaagaagacgaaatatggaagccaggagcaccccatcggagacaagagcttccagaactacatccggcagcagtccgagacctccactcattccatttaaagtctgcgggacgcgcccagtggcgccagcaagctgcccatgcaaagccgcagcctttgggagggagaagagaaggaagagcgcagagccggcaaagtgagatgcacgccgtcccggcccatagacaagtggcgctggggtttccctctcccagaaccgctgccaccaccgccacgccctccgcagaaagcccacctggccctgtggaacgtgtcgtcatttgattctgtgctttttgctccttgtttgtggggatctggggatcagctgaaggatcaggaagtgtgggctgtgccctagccacaccacagccagcctcagggagccacggcccgtctagtcgactgtgacatgcacctccggccgtgtgtgcgtcagtctcgtgcacgtctgtcttgcgtgcacggtgcgtgtgacgctgggctctgtggctctgtgcccgggaggcctgctggccccgcctcggctttcggcttcatcacattgggaggttcagagcattactctcccactgtgcctgccatccaggcagccatgggaggcggcctccctgttccactttcgaggttcgtttgattcctggctgaggggtcagttttatggctgggaggtgcagaattacacagaagtcccagtctgaggatgtccttggtgcttgggggatacgggttctgtccacagagtcccttggagggaaaggtgtgggctccagcttctccaggcgtctgcggagcccacagttgaagcccacatcgttttgctgttgaatggggtttaaaatcagaattaacatttgccaccccccgtggaagtttgaagattttaaaaatagaaatgtacatttttcaagctgtttttctttatgtttttgaaggaccatttttaattagctctttgatacaaagtaactcagaacgtcaaaacctatacccactaaagggaaggctgccgggaaggcaaatggaacaggaatggagcctgtctcaggaaggccagctgcaggtcctccagaaaatcaaagaagggaagaaactctgagtttgaggtacaggggcttcggggtgcagacgtccctccagggcccatggtcagtattgcacctgtgttatgaacccccagatgctgtgcagggcaggggcgggggctgctgttttattggggaggggagcatcctaaaaatggggtccaggcagacccctccagacctcacactgccgaggaggcctttcccaaagggcgtcctcccgggatgcagacggcaggtgtgtgggaagcgccgtttaaatacacagcacgacgtatccttgtaccgacttctcccggttcttgtttgaaaatactgtagttcaggctcttgatctagatggcagataggaactttcttgtcacaaaaatactggaggaaaatgttgtaaaaatagacttttggacacacagctgttggggctgcactgagctgcaatttttaacatggatttataacttaatgtttctgtttataaaatactaatgatttgcaatgtattttactggccaattaaaacagatgttttattctttctgaaaaaaaaaaaaaaaaaaaaa

SEQ ID NO: 3239 - DNA, 2121 bp, Homo Sapiens
  NM_007370
gagagttgcttttgcgcgcgaactgtaagtgccagggtctcagggtcaggtcgcggctggtcactgtgcaggcgcttgggtgacgcgacgatctcagcggatctggtcaccttcgtctccccgccatggagacctcagcactcaagcagcaggagcagcccgcggcgaccaagatcaggaacctgccctgggttgaaaaataccggccacagaccctgaatgatctcatttctcatcaggacattctgagtaccattcagaagtttatcaatgaagaccgactgccacacttgcttctctacggtcccccagggacaggcaagacatctaccatcctagcctgtgcgaaacagctatataaagacaaagaatttggctccatggtcttggagctgaatgcttcagatgaccgaggaatagacatcattcgaggaccgatcctgagctttgctagcacaaggacaatatttaagaaaggctttaagctagtgatcttggatgaagcagacgccatgactcaggacgcccagaatgccttgagaagagtaattgagaaattcacagaaaataccagattctgcctcatctgtaactatctgtcaaagatcatccctgccttgcagtcccgctgcacgaggtttcggttcggtcccctgactcctgaactcatggttccccgcctggaacatgtcgtggaagaagagaaagttgatataagtgaagatggaatgaaagcactagtcactctttccagtggagacatgcgtagggctctgaacattttgcagagcaccaatatggcctttgggaaggtgacagaggagactgtctacacctgcaccgggcacccgctcaagtcagacattgccaacatcctggactggatgttgaatcaagatttcaccacagcctacagaaatattacagagttgaaaactctgaaggggttggcactgcatgatatcctgacagagatacacttgtttgtgcatagagttgactttccatcttcagttcgaatacatttattgaccaaaatggcagacattgagtacaggctttctgttggcaccaacgagaagatccagctgagctccctcattgctgcatttcaagtcaccagagacctgattgttgcagaggcctagatgctctgagggccattcacaattctcagggctcagcagtgatgggagaacagaggacagttccaggataaactgctgcctggggctgtgggatgaatcagtcaccccgaatcttggaaaaacccccttccaggagaggatgggcaggcatttaaaaagtaccatttttgtggttgtttggagcagggatgtacaaaataattttaatgtattaactcatactgcctgtcttttataggggaaaaaaataaccttttttattttaaagttataaggtttttaccttttagttgcttggatgacagggaattagcctaccccattttggtctggaacagaagactttcaaatttaatatggtccaagtgtcttcctactcaaggtaaacattatctccaaaattacatttatgattctaatatttggcattgtgtctgtatctaatttaaacagatgttaatggacgtctggccgaaactattatacttttataagatgagctgaatcctcttactttaaaaactggtctttttatttaccctctgtggtagaagagtcaccagcaggttccaaattgatgtgtatgataggaaaaaaaccttaattttaaatataatatagagccttaaactatgccactgggtggcagaggctgtataaaacgcacttgttttcatgcaggagcggggcaagtaaggttgagcctgactgtaaacctagaactgcggaaggactgggacttttgtacaaatttcacatttattttacagcaatcatgctgcatttgtgttagtgttctttataataaaaaacaaagcagcctcctggctggctgtgttacaagtgactcttccttagacagctagaaagatgctgactttgtcaaacttgcatttatatgaaaaccttctgtctctaatatcacagaataaactttctttagatgctgttctttaaaaaaaaaaaaaaaaaa

SEQ ID NO: 3240 - DNA, 5673 bp, Homo Sapiens
  NM_007371
tgccggggccggcgagccaaagaggagccggccgcgcgggccgggaggggacggccgccggagccgcgaggccaactgtcgcctggttgggcccggaaatgggacgtcgcgctttctcagggagcgtagaagcagccagggcctctccaagccgctgctgtgacagaaagtgagtgagctgccggaggatgtccaccgccacgacagtcgcccccgcggggatcccggcgaccccgggccctgtgaacccaccccccccggaggtctccaaccccagcaagcccggccgcaagaccaaccagctgcagtacatgcagaatgtggtggtgaagacgctctggaaacaccagttcgcctggcccttctaccagcccgtggacgcaatcaaattgaacctgccggattatcataaaataattaaaaacccaatggatatggggactattaagaagagactagaaaataattattattggagtgcaagcgaatgtatgcaggacttcaacaccatgtttacaaattgttacatttataacaagcccacagatgacatagtgctaatggcccaagctttagagaaaatttttctacaaaaagtggcccagatgccccaagaggaagttgaattattaccccctgctccaaagggcaaaggtcggaagccggctgcgggagcccagagcgcaggtacacagcaagtggcggccgtgtcctctgtctccccagcgaccccctttcagagcgtgccccccaccgtctcccagacgcccgtcatcgctgccacccctgtaccaaccatcactgcaaacgtcacgtcggtcccagtccccccagctgccgccccacctcctcctgccacacccatcgtccccgtggtccctcctacgccgcctgtcgtcaagaaaaagggcgtgaagcggaaagcagacacaaccactcccacgacgtcggccatcactgccagccggagtgagtcgcccccgccgttgtcagaccccaagcaggccaaagtggtggcccggcgggagagtggtggccgccccatcaagcctcccaagaaggacctggaggacggcgaggtgccccagcacgcaggcaagaagggcaagctgtcggagcacctacgctactgcgacagcatcctcagggagatgctatccaagaagcacgcggcctacgcctggcccttctacaagccagtggatgccgaggccctggagctgcacgactaccacgacatcatcaagcacccgatggacctcagcaccgtgaaaaggaagatggatggccgagagtacccagacgcacagggctttgctgctgatgtccggctgatgttctcgaattgctacaaatacaatcccccagaccacgaggttgtggccatggcccggaagctccaggacgtgtttgagatgaggtttgccaagatgccagatgagcccgtggaggcaccggcgctgcctgcccccgcggcccccatggtgagcaagggcgctgagagcagccgtagcagtgaggagagctcttcggactcaggcagctcggactcggaggaggagcgggccaccaggctggcggagctgcaggagcagctgaaggccgtgcacgagcagctggccgccctgtctcaggccccagtaaacaaaccaaagaagaagaaggagaagaaggagaaggagaagaagaagaaggacaaggagaaggagaaggagaagcacaaagtgaaggccgaggaagagaagaaggccaaggtggctccgcctgccaagcaggctcagcagaagaaggctcctgccaagaaggccaacagcacgaccacggccggcagacagctgaagaaaggcggcaagcaggcatctgcctcctacgactcagaggaagaggaggagggcctgcccatgagctacgatgaaaagcgccagcttagcctggacatcaaccggctgcccggggagaagctgggccgggtagtgcacatcatccaatctcgggagccctcgctcagggactccaaccccgacgagatagaaattgactttgagactctgaaacccaccactttgcgggaactggagagatatgtcaagtcttgtttacagaaaaagcaaaggaaaccgttctcagcaagcgggaagaaacaggcagccaagtcgaaagaggagctagctcaggaaaagaagaaggagctggaaaagcgtctgcaggatgtcagcgggcagctgagcagcagcaagaagcccgcccggaaagagaagcccggctcagcaccctcagggggcccgtccaggctcagcagcagcagctcctccgagtctgggagcagcagctccagcgggtccagctctgacagcagtgactcagaatgaactggcttcggacagaacaggacagatggatgtcgcacacgccgagactctgccgtacccctctgtggttcatattactacttctgttccatggtgtgcaggtctgcttcttaattcagtgttatgatatcttccagtttttgctttcataggtcagagatctatcttgtgtgtgcgttagacttgatgagaaggtgtgaactctgcagaaagtctcttcttcatcactgaattcagtcacttggagatgacaacttcaaatgctaacccgatgaccccagaaaaccgtgtgagattcgtaccgaagaaccttgtggaatccctttgcttaggcccaacctggtcgatagctcgagaaagaattttttccaaggaaatgtctcggatatgggtactgtatttgaaagctgttagctttgtcaacacgcattgtccttgtcatttgggccccgagctctgaccctcgtgtctgacgcggccacctctttctggaggggctgaggacagatgtgcctgcttgtggagaccaggctgggcctaagcgaagggtcatcgcagccccagcccggagcgtggagcccttggggggtggtcgggtgggatgtgcgttctccgctcgtggtgatgtcaggagctcctcggagggaacagagcggctgtgtatgcagcctgcaggtttccatacactgaagcttttacctcaactttaaaaaaaaaaaaagaagaaaagatttaaaaaaaaaaaaaaaggagactttttttgtaaggttcggcaattttctacggaagtccagcccgctgtgagtccccgcctggctagcgctgcccctgctgctgctgccgcgccacccttgggaaccacttcccgagcttatgtgtatataaatagttatttattaacatcattggtcatttttaaaaaaaagaaaataagaaaaaaccgcagaagaaatgcattcacacagtcgcagagatgcaggccttgccagtggtgtgccgggcgcgggtcctgtctggcggcggcctgtcgtctccaggtgctaactcctgccaccgcgcggtgctcacccacgtctgttcgcgcgctcgcccctgggtttgttgggttttttggtttttttctttgtggtttttttttttttttttttttgtatgaaacttggaggcttacaggtatagacagctttcagctacagcacattctaattttttattttgtttagttcttttgtattcacttctggtctctttaagactgttttaaaagaaatcaatttagggaaccccagttatataatataaactttgtaatctgagagaaaaaatgtatagtaaatctaagtcttgatttttaactttctattgtaaaaaataataatatacagagtttaatagaaggtgatgttttggttttgttttcccagaggctgccatatggtctttgagtacggggatgtcccaaactggcccaccaatgagcatggcggctccggccaggaatgccagagttagcctcccaggcttgcgggtggacatgcctgctccctgccagcctccagtggcctggccaggccctcccgagcctgtctgccctccccaggggtggaggagtctctgggccccaggaggattccctcccggagactcgcacggtgctccctgctcacgcgttgtcacagttagtccggaaatgactgaaaccaggcattctcccggacctcagcgtgggggagcctccaggcagacgctgggtatggagctgtggtgtggtctgtcctgtatggtggccagtgctttctgccagcatttctggatggatatagggactatcattagtatcctaatacacggtgattttaaaacaaccataaaattgattcagagtccactgacccttacagatgtaggtatacccttactggagagggaactctgatgaggagatgctggtaaattatcattttttaaattgctggtgagtctgacacttggtgagttttcagccagtttgttaaacttttaattaagttttgtttataataaaaatataaatggatttgaaagtttccattttttaaagttaccctcgttttcaaaggtattttctaaacagatctttaatggactatttaaaccgaatttaaggaattcacacacgacagttgacaggtcttcacgcaggctggttggtaacgtgctgccagcacagggctgggtgatacgtacaccctaagccgggggtgcctggggctggggggcgctccttgcaatgcccctccagccacagggcagtgaggtgctgcctgtgtgagccgtcgggggagcggccggctgtgggggcagcgcagcaggagcatcgtggggcctttccttctcggctggttctctgtgacggtggcgtcggctcgcctctgctcctttcatctagaaagaagccactgaccctgacagcccacggcgggtacactgagcagctgcattggtgctgtcacttttttaaggctttctgtccagacttcaacactggtttcttttcagagtttcgaaggattaatgacttcctcagcgcccttgctggcgggctgagggtgacagtcacgtccgtttcttctgtattagaaggctgcggtgattcaattagattgtcccactgctgagacctgtagggcagcttctaacatgcttttttcaaggggagaggagtagtgacaagtcgtgtgtcggaattggatttgagaacactctgaatgacccctggaggccgagggggcaggcttcgggcgtgaactgaactccagacccctctttgtgttgggcagtgtcatcttgcttacaaactgtaagacacatttttttgtgtgtttgtttttgttgttgttcttttgcagcactcacgcctctgacagtcttttgggaaagagtaacacccacatacagaatttgtcacatccagagtagcactgttccttaatactggcataatgcttccaggaagtttttcttttttatatttaaaatgttacttttctgtatgatgtgcatgcaagtttaccgtaacttttcttaaactttttagtgccgtttctagtatattcctgtaaatgtcagttactgaaaatgagtccaatgtaagtagtttagcttgtttattgcaatgctggcctcaacacaacagaataaaaatggtagaaagtactctttgatgtttctggtaatcatggacccttctcctggggcatttgttttgttttcataataaaaagcaaaaaaaaaaaaaaaaaaaaaaaaaaaaaaaaaaaaaaaa

SEQ ID NO: 3241 - DNA, 3962 bp, Homo Sapiens
  NM_007373
gagtgggggaggggcgggcggggggcggcggttgggcagcgtcgcttcttaggaggaggaggaagaggaggaaggagggcgagcgaggaggatggcggagtcggggctcctgacggaactctaatgaatcattgattgaccagcactattttaccagttggaatgaatgatcagaaatgggcatagtgcttttagatccaacatgtaacagatggatgttactccatgctgattacttcttcaagccagtacttttttgattgtgtaggatctttgtctcttcatctttgaattcaattactggaaaataaaaggagttcatgtagtttttgtccaggcttgagtcaccatgagtagtagtttaggaaaagaaaaagactctaaagaaaaagatcccaaagtaccatcagccaaggaaagagaaaaggaggcaaaagcctctggaggttttgggaaagagagcaaagaaaaagaacctaagaccaaagggaaagatgccaaagatggaaagaaggactccagtgctgcccaaccaggggtggcattttcagttgacaatacgatcaaacggccaaacccagcacctgggactagaaaaaaatccagcaatgcagaggtgattaaagagctcaacaaatgccgggaagagaattcaatgcgtttggacttatccaagagatctatacacatattgccatcatcaatcaaagagttgactcaattaacagaactttatttatacagtaacaaattgcagtccctcccagcagaggtgggatgtttagtaaatctcatgacactggctctaagtgaaaattcacttaccagtttgcctgactctcttgataacttgaagaagctgcggatgcttgatttacggcataataaactgagagaaattccttcagtggtgtataggctggattctctcaccactctttaccttcgctttaatcgtataactactgtggaaaaggacatcaaaaacttgtcaaaactcagcatgcttagcattcgagagaacaaaattaaacaactacctgctgaaattggtgaattatgtaacctcattacgctggatgtagctcacaatcaacttgaacaccttccaaaggagattggaaactgtacacagataaccaaccttgacttgcagcacaatgaactgctagacctcccagatactataggaaacctgtccagtttaagtcgtcttggtctgagatataacagactgtcagcaatacccagatcattagcaaaatgcagtgcacttgaagaattaaatttagagaacaataacatttctactttaccagagagtcttttatcaagtcttgtgaaactgaatagtttgaccttagctagaaattgcttccagttgtatccagtgggtggtccatctcagttttctaccatctattccctcaacatggaacacaatcgaatcaacaaaattccatttggaattttctccagagcaaaagtattaagtaagctgaatatgaaggacaatcagttaacatcacttcccttggattttggaacttggaccagtatggtagaattgaatttagccactaatcagctcacaaagatccctgaggatgtgtctggtctcgtttctcttgaggttcttatcttatcaaacaatcttctaaagaagcttccccatggtcttggaaaccttaggaagttaagagagttggatctagaagagaacaaattggaatccttgccaaatgaaattgcatatcttaaggatttacagaaattagtcttgacaaacaaccagttgaccactcttcccagaggcattggtcaccttactaatctcacacatctgggccttggagagaacctacttactcaccttcctgaagaaattggtacactggagaacctagaagaactgtatttgaatgacaaccccaacctgcatagccttccctttgagctggcactctgcagcaagctttcaatcatgagtattgagaactgtccactcagtcaccttccacctcagattgttgctggggggccttctttcatcattcagttcttaaagatgcagggtccatatcgtgccatggtctgatataaatctgctggtcccacacactgttcaaaaatagactgccattaatgtttcttatctatatctgtatctatttatgtagatattggtatatggcagatttataaaaattgcattatgtgtttctgctaatagaggaatcatagccatttagaattttttttaaattctgtacaaaaggcttatataagttttctttgctgaatttgatggatgtttttctgttgtgtaatctgatatgccagtttgcttaaaacatttgccaacacattatgaagttattaaatttaagggacagaggtagtatagttagatatactttctcttaggaaaaataatgggcaaaaatttttgttgcaacttttcatatatattttccccttaccaattgttttatccttatagtattgtaggccctgaaagtagaatttttctttaacttattttgagatttgagatttaaattttatgtattgtttacagtcagagtaaatcactggatttcttttgtttgttttgatttgctctgttttattcagtcaaatctagagtttgaatcctctgctaaagaatttgcatccactggtgtaaacagtgaaaggtatttgcttgttgaaaaaaaaaactggcaaagtgaaaagatacagtcaaaaatctagaatttctttaattttgcttctctgacgagttgtgaagcaaaatacctgaagtgagtctttgggtaggggaagggtattgagaccttttctagtatgaatattttttaagtttgggggaagagaaacttgcagtgaaaaggagttttttcattcctgaaagttgcagatccacaaaactaacaggataattgggcaaataaattacatataaacacacacaatctatatatgtatatacaatgctatatagatatgtatttattatatcataaactacagtaggtaactttaaggatttcttcctatccttgtacaatgacatgaatgtctttctttgaaaactgcaatgtatgtatgtttcaaggttatttaacagtgtactatggttttatatcttgacttgccttgtacatctttcaattctggaatatctgtgtctaagcacaatatcttcacactgtgctgtattgctgctgaactaaatgcacttttccccacatatggggcactggcttcaaacaattcagttcagtatcattacttttaatctcatctttcctttcttggtagttgttaatacagttatggaaaagaggcacattgcatagaagccattggggagttcagtggaagttctgtaagatgtgcatgtactatttgatgcgttttctttgcttcactgcttttaatacttagcagtattgttggtctaagtcaatttgattattgaggagtctcagagcaaggtgcgttctagatgtcatcctaaaaaacacttcatatataattaatcactattttgtataattacatattgctgcttgtgtgtttttttttttttccatttagttgggcgttgtgttttacacaaaaccatttttgaattaaggctatgatattaagatagaaatttggactgttgttctgcttttcctggcactcaaattcatgactagttttgaggtcaaacctatgttcgtaatgagagattttataaggatcaactaagaaatggaaggcaggtgaagatataaaaccctagaatgcttaaatgtgctgtaaaactattgtagatgtcactggattttaccaagtaatatcctttcttttttttttccccccatctgctgtggcttttcagttaaaattttgtttataaaaggaatttgtttattacagctctacctagaaaaaaaaaaaaaaaa

SEQ ID NO: 3242 - DNA, 4236 bp, Homo Sapiens
  NM_007375
ggtgggcggggggaggaggcggccctagcgccattttgtgggagcgaagcggtggctgggctgcgcttgggtccgtcgctgcttcggtgtccctgtcgggcttcccagcagcggcctagcgggaaaagtaaaagatgtctgaatatattcgggtaaccgaagatgagaacgatgagcccattgaaataccatcggaagacgatgggacggtgctgctctccacggttacagcccagtttccaggggcgtgtgggcttcgctacaggaatccagtgtctcagtgtatgagaggtgtccggctggtagaaggaattctgcatgccccagatgctggctggggaaatctggtgtatgttgtcaactatccaaaagataacaaaagaaaaatggatgagacagatgcttcatcagcagtgaaagtgaaaagagcagtccagaaaacatccgatttaatagtgttgggtctcccatggaaaacaaccgaacaggacctgaaagagtattttagtacctttggagaagttcttatggtgcaggtcaagaaagatcttaagactggtcattcaaaggggtttggctttgttcgttttacggaatatgaaacacaagtgaaagtaatgtcacagcgacatatgatagatggacgatggtgtgactgcaaacttcctaattctaagcaaagccaagatgagcctttgagaagcagaaaagtgtttgtggggcgctgtacagaggacatgactgaggatgagctgcgggagttcttctctcagtacggggatgtgatggatgtcttcatccccaagccattcagggcctttgcctttgttacatttgcagatgatcagattgcgcagtctctttgtggagaggacttgatcattaaaggaatcagcgttcatatatccaatgccgaacctaagcacaatagcaatagacagttagaaagaagtggaagatttggtggtaatccaggtggctttgggaatcagggtggatttggtaatagcagagggggtggagctggtttgggaaacaatcaaggtagtaatatgggtggtgggatgaactttggtgcgttcagcattaatccagccatgatggctgccgcccaggcagcactacagagcagttggggtatgatgggcatgttagccagccagcagaaccagtcaggcccatcgggtaataaccaaaaccaaggcaacatgcagagggagccaaaccaggccttcggttctggaaataactcttatagtggctctaattctggtgcagcaattggttggggatcagcatccaatgcagggtcgggcagtggttttaatggaggctttggctcaagcatggattctaagtcttctggctggggaatgtagacagtggggttgtggttggttggtatagaatggtgggaattcaaatttttctaaactcatggtaagtatattgtaaaatacatatgtactaagaattttcaaaattggtttgttcagtgtggagtatattcagcagtatttttgacatttttctttagaaaaaggaagagctaaaggaattttataagttttgttacatgaaaggttgaaatattgagtggttgaaagtgaactgctgtttgcctgattggtaaaccaacacactacaattgatatcaaaaggtttctcctgtaatattttatccctggacttgtcaagtgaattctttgcatgttcaaaacggaaaccattgattagaactacattctttaccccttgttttaatttgaaccccaccatatggatttttttccttaagaaaatctccttttaggagatcatggtgtcacagtgtttggttcttttgttttgttttttaacacttgtctcccctcatacacaaaagtacaatatgaagccttcatttaatctctgcagttcatctcatttcaaatgtttatggaagaagcacttcattgaaagtagtgctgtaaatattctgccataggaatactgtctacatgctttctcattcaagaattcgtcatcacgcatcacaggccgcgtctttgacggtgggtgtcccatttttatccgctactctttatttcatggagtcgtatcaacgctatgaacgcaaggctgtgatatggaaccagaaggctgtctgaacttttgaaaccttgtgtgggattgatggtggtgccgaggcatgaaaggctagtatgagcgagaaaaggagagagcgcgtgcagagacttggtggtgcataatggatattttttaacttggcgagatgtgtctctcaatcctgtggctttggtgagagagtgtgcagagagcaatgatagcaaataatgtacgaatgttttttgcattcaaaggacatccacatctgttggaagacttttaagtgagtttttgttcttagataacccacattagatgaatgtgttaagtgaaatgatacttgtactccccctacccctttgtcaactgctgtgaatgctgtatggtgtgtgttctcttctgttactgatatgtaagtgtggcaatgtgaactgaagctgatgggctgagaacatggactgagcttgtggtgtgctttgcaggaggacttgaagcagagttcaccagtgagctcaggtgtctcaaagaagggtggaagttctaatgtctgttagctacccataagaatgctgtttgctgcagttctgtgtcctgtgcttggatgctttttataagagttgtcattgttggaaattcttaaataaaactgatttaaataatatgtgtctttgttttgcagccctgaatgcaaagaattcatagcagttaattccccttttttgacccttttgagatggaactttcataaagtttcttggcagtagtttattttgcttcaaataaacttatttgaaaagttgtctcaagtcaaatggattcatcacctgtcatgcattgacacctgatacccagacttaattggtatttgttcttgcattggccaaagtgaaaatttttttttttcttttgaaatctagttttgaataagtctgggtgaccgcacctaaaatggtaagcagtaccctccggctttttcttagtgcctctgtgcatttgggtgatgttctatttacatggcctgtgtaaatctccattgggaagtcatgccttctaaaaagattcttatttgggggagtgggcaaaatgttgattattttctaatgctttgtagcaaagcatatcaattgaaaagggaatatcagcaccttcctagtttgggatttgaaaagtggaattaattgcagtagggataaagtagaagaaaccacaaattatcttgtgcctgaaatccattaagaggcctgatagctttaagaattagggtgggttgtctgtctggaagtgttaagtggaatgggctttgtcctccaggaggtgggggaatgtggtaacattgaatacagttgaataaaatcgcttacaaaactcacactctcacaatgcattgttaagtatgtaaaagcaataacattgattctctgttgtacttttttgtaactaattctgtgagagttgagctcattttctagttggaagaatgtgatatttgttgtgttggtagtttacctaatgcccttacctaattagattatgataaataggtttgtcattttgcaagttacataaacatttatcaatgaagtcatcctttagacttgtaatcgccacattgtttcattattcagtttcctctgtaaagggatcttgagttgttttaattttttttttctgcatctgaatctgcatgatttccaaaccctgtaccatctgaattttgcattttagcacttgcactattactcagcagcagtaacatggtaacacttaaaatggtactcggggacctccaaagactaaactgacaagccttcaaggagcccaggggtaagttaacttgtcaacggcatggtttaatcccttctttacacttgtgtaaatttcagttactggtcatagaaggctttcaatgttgagtggccttttattaacatgtttatggtactgcatagatacgggtatttattttaccctaagaagattttgaagtttaaaagtacttaaactatttggcaaagatttgtttttaaaaatctatttggtcaatctaaatgcattcattctaaaaaattttttgaaccagataaataaaatttttttttgacaccacaaaaaaaaaaaaaaaaaaaa

SEQ ID NO: 3243 - DNA, 4612 bp, Homo Sapiens
  NM_012062
gcatggcctgccgggagggggcaggtagccggcgggcccggtccaatgggtgccggcttccgaggagagggcggaggagaggaggaaggaggcgaactgtgggccccggccccattcattgccgtggccggcgggcactggggccccgtgttttcagagtcatggaggcgctaattcctgtcataaacaagctccaggacgtcttcaacacggtgggcgccgacatcatccagctgcctcaaatcgtcgtagtgggaacgcagagcagcggaaagagctcagtgctagaaagcctggtggggagggacctgcttcccagaggtactggaattgtcacccggagacctctcattctgcaactggtccatgtttcacaagaagataaacggaaaacaacaggagaagaaaatggggtggaagcagaagaatggggtaaatttcttcacaccaaaaataagctttacacggattttgatgaaattcgacaagaaattgaaaatgaaacagaaagaatttcaggaaataataagggagtaagccctgaaccaattcatcttaagattttttcacccaacgttgtcaatttgacacttgtggatttgccaggaatgaccaaggtgcctgtaggtgatcaacctaaggatattgagcttcaaatcagagagctcattcttcggttcatcagtaatcctaattccattatcctcgctgtcactgctgctaatacagatatggcaacatcagaggcacttaaaatttcaagagaggtagatccagatggtcgcagaaccctagctgtaatcactaaacttgatctcatggatgcgggtactgatgccatggatgtattgatgggaagggttattccagtcaaacttggaataattggagtagttaacaggagccagctagatattaacaacaagaagagtgtaactgattcaatccgtgatgagtatgcttttcttcaaaagaaatatccatctctggccaatagaaatggaacaaagtatcttgctaggactctaaacaggttactgatgcatcacatcagagattgtttaccagagttgaaaacaagaataaatgttctagctgctcagtatcagtctcttctaaatagctacggtgaacccgtggatgataaaagtgctactttactccaacttattaccaaatttgccacagaatattgtaacactattgaaggaactgcaaaatatattgaaacttcggagctatgcggtggtgctagaatttgttatattttccatgagacttttgggcgaaccttagaatctgttgatccacttggtggccttaacactattgacattttgactgccattagaaatgctactggtcctcgtcctgctttatttgtgcctgaggtttcatttgagttactggtgaagcggcaaatcaaacgtctagaagagcccagcctccgctgtgtggaactggttcatgaggaaatgcaaaggatcattcagcactgtagcaattacagtacacaggaattgttacgatttcctaaacttcatgatgccatagttgaagtggtgacttgtcttcttcgtaaaaggttgcctgttacaaatgaaatggtccataacttagtggcaattgaactggcttatatcaacacaaaacatccagactttgctgatgcttgtgggctaatgaacaataatatagaggaacaaaggagaaacaggctagccagagaattaccttcagctgtatcacgagacaagtcttctaaagttccaagtgctttggcacctgcctcccaggagccctcccccgctgcttctgctgaggctgatggcaagttaattcaggacagcagaagagaaactaaaaatgttgcatctggaggtggtggggttggagatggtgttcaagaaccaaccacaggcaactggagaggaatgctgaaaacttcaaaagctgaagagttattagcagaagaaaaatcaaaacccattccaattatgccagccagtccacaaaaaggtcatgccgtgaacctgctagatgtgccagttcctgttgcacgaaaactatctgctcgggaacagcgagattgtgaggttattgaacgactcattaaatcatattttctcattgtcagaaagaatattcaagacagtgtgccaaaggcagtaatgcattttttggttaatcatgtgaaagacactcttcagagtgagctagtaggccagctgtataaatcatccttattggatgatcttctgacagaatctgaggacatggcacagcgcaggaaagaagcagctgatatgctaaaggcattacaaggagccagtcaaattattgctgaaatccgggagactcatctttggtgaagagaactatgtaatactgagactttgttgactcaaaacttgctagttactgcctacctgagtagaatcttatttatgaactcctgtgtattgcaatggtatgaatctgctcatgtggagactggctataaactgaaaagtgtattccaaattgcagaacacatcacacatttaatccaaataataaatggctgtttctaaagtttcccagtatatataaaatacatcaagtctgtcttgtgacagtttcatctgaacttaacttaaaaacaactgttaatgttctagttgtgcaaagcagtttgcctgtggataagatgacctgtgtaataatctttgttagtagtcttaaagctgctgccatagtcctccaagaagaaagcaccaagacaacatttcatatgactataatgcatgtactatataagctgatctggctttgaaagatgtgagttggcaagttcctcacatagagtcattgtattccacctgtccttcaatttagttttttctgagcttctttgcagcctttgatgtgtttttaagaaagctgaatgcacaagaggatctgtgacactgacatggctgtggtgtgcatactgtgtagttacatagcccttccaattctgggtccatttgcactagcaaattaaaatatgctttgattcatacttaaacctgaaagcaggaatgcctacattaattcctacattaaaaacagccatctacccttgattatctagaaagacttggtaatgatggtcagttccttttagatttcagaaaatcaaatgatgacctaaatttcccttaatttgcaaatacagtagtaattaaggtacatctctaaagtggagcacttacaccaggctctaagattcactttgaggtggaacttaaaaccagtgtactgtatgtatgcattggtaatagctacttttgcttcatagcttcataccaacaaaatatatttattagaatagtatgaaagtactggaggagctgaaagaaaaacacccaaggctgggcgtggtggcacacgcctgtaatcccagcactttgggaggccgaggcaggtggatcacctgaggttgggagttggagaccagcttgaccaacatggagaaaccccgtctctactaaaaatacaaaattggccgggcgtggtggcgcatgcctgtaatcccagctactcgggagggtgaggcaggagaattgcttgaccctgggaggtggaggttgtggtgagctaagatcgtgccattgcactccagccttggcaacaagagcgaaactccgtctcaaaaaaaaaaaataaaacaacacccagatagatacacatactccttcagacttacagacctaagctgcatttatggggtagtgatgaggtttagaacatatacatattttgttaaaattccccagatgattcttggtatgaacgactatattataaattttaagatgtacttagaaatccttaagacatctagccccgtctctaatagacaacacatttatattgcagatattacttttttttcagtttatgaccaggtatttatgaaggactattggcagggaaaatatgaatatgttaactttagcttatggcatcaatttactaaggaacaacaggctcaccaactgatgtcaaacataaaaacccccacatcagtctgatacgatatggtactactttgaatctgttactagtaccatcttgacagaggatacatgctcccaaaacgtttgttaccacacttaaaaatcactgccatcattaagcatcagtttcaaaattatagccattcatgatttactttttccagatgactatcattattctagtcctttgaatttgtaaggggaaaaaaaacaaaaacaaaaacttacgatgcacttttctccagcacatcagatttcaaattgaaaattaaagacatgctatggtaatgcacttgctagtactacacactttgtacaacaaaaaacagaggcaagaaacaacggaaagagaaaagccttcctttgttggcccttaaactgagtcaagatctgaaatgtagagatgatctctgacgatacctgtatgttcttattgtgtaaataaaattgctggtatgaaatgacactaaagtttgtcaaaaaatgaattcttaacttttctcccagagaaagggagacaaaaggagctttttaatacctaatctactttggaacataaccgtatagag

SEQ ID NO: 3244 - DNA, 1301 bp, Homo Sapiens
  NM_012067
gccgcccgctccgagcctggtgcttccgaccgctgcgcgcggctcctgggctgtcacagtctcccgttgccgccgtcatgtcccggcagctgtcgcgggcccggccagccacggtgctgggcgccatggagatggggcgccgcatggacgcgcccaccagcgccgcagtcacgcgcgccttcctggagcgcggccacaccgagatagacacggccttcgtgtacagcgagggccagtccgagaccatccttggcggcctggggctccggctgggcggcagcgactgcagagtgaaaattgataccaaggccattccactgtttgggaactccctgaagcctgacagtctccggttccagctggagacgtcactgaagcggctgcagtgtccccgagtggacctcttctacctgcatatgccagaccacagcaccccggtggaagagacactgcgtgcctgccaccagctgcaccaggagggcaagttcgtggagcttggcctctccaactatgcagcctgggaagtggccgagatctgtaccctctgcaagagcaacggctggatcctgcccactgtgtaccagggcatgtacaatgccatcacccggcaggtggaaacggagctcttcccctgcctcaggcactttggactgaggttctatgccttcaaccctctggctgggggcctgctgaccggcaagtacaagtatgaggacaagaatgggaaacagcccgtgggccgcttctttgggaatacctgggcagagatgtacaggaatcgctactggaaggagcaccactttgagggcattgccctggtggagaaggccctgcaggccgcgtatggcgccagcgcccccagcatgacctcggccaccctccggtggatgtaccaccactcacagctgcagggtgcccacggggacgcggtcatcctgggcatgtccagcctggagcagctggagcagaacttggcagcggcagaggaagggcccctggagccggctgtcgtggacgcctttaatcaagcctggcatttggttactcacgaatgtcccaactacttccgctaggcccatcgtttctcaggctgcccaaggctcttctgtaacatcttttgttactcacattttctttaatttagaactgcctcagtaaattcttagggatggaagtatttggacaaaaacctaatagaagagtcaccaccaaatgaagaataaaactcccagggtgctgtgaaaaaaaaaaaaaaaaaaaaaaaaaaaaaaaaaaaaaaaaaaaaaaaaaaaaaaaaaaaa

SEQ ID NO: 3245 - DNA, 2155 bp, Homo Sapiens
  NM_012080
ctcagtgcgcgtgcgcggggcgggcgggtgcgcgcgcacttcctcctcgcccccacccagacccagaaggcgccaccatggcggcgcccccgcagcccgtcacccacctcatctttgacatggacggacttcttctggatactgaacggctgtattcagtggtgtttcaagaaatatgtaatcgctatgacaagaaatacagctgggatgtaaagtccctggttatgggtaagaaggcattagaggcggcacagattataatagacgtcttgcagctcccgatgtccaaagaggagctggtggaagaaagccaaacgaagttaaaggaagtgttccccacggctgcgctcatgccaggggcggagaaactcatcatccacctgcggaaacatggcatcccctttgcactggccaccagctcggggtccgcgtcgttcgatatgaagacaagccgccacaaggagttcttcagcttgttttcccacattgtgctgggagatgaccccgaagtgcagcatggcaagccagacccggacatcttcctagcttgtgccaagaggttctctccccctcctgctatggagaagtgccttgtctttgaagatgctcccaatggggtggaggcggccctggcagctgggatgcaggtggtcatggttcctgacggaaacttgagccgagatctgacaacaaaggccaccctggtgctgaattccctgcaggacttccagcccgagctgtttggtttgccctcctatgagtgagagggagggcctcagtcttccgcccccagcccactctcatggtccacactgctgggggaaagggaaaggaaatcagcaactcttcaatcccaacctgcgctgtgattttagcctcctgagattggagtttccatcccatgttggtttgtcccagtctaacgtgttgataaaatgtgacttgacggttgagacaaaaaatacagtagagacagaaacgaagcccagaacaaagatgaaacttgaattaccatctcagaagtcaagctgatggagtatgtgataaagtgaatgtacatgtatatacacacacacctccatatatacatgtgtgtatcagtttggtaatatgcaggtaggcattacatgcatatgtatgtagacatatgcatgcatgtatatgtaaaatatatacttttccaagacaaaatggaacatcacttctctcttctagtttttctgaacactggctgggaaatgtaaactgtgtatgcatataagtatatgctttatgtatgcatatgtatgtagatatgtttatatctatcgtctgcatcactctcctcagtgttgatgtcaacatgcaatgacaactgataaagcgagatggtagttctgcctggtttgcagtctgagtgggaaagtcctgtttttgatgagcactccttgttagctaacatttaaattctttttgtgacctcagaatgtctctggatctttcctcattgactgactctgtgccacgtcatccatagtttattgttagtatgaacacaactgtaacatttacctggtatctacatccttacctgcattggaaaatgtttgctacctcacaacaaccatttgcctcctttaagaacactgatgggctgcactttttggatagaaatagaatttgatttcagaatgtatgcttggtgagtctcagtgcccaggaacacttttggaataatttatcagacattgaacttctgtgattaatcgcttttatagatttactcagtctttaaaattcgtctctgatttgccagagaaaaacggtggtagccatggaaatcgggagtgaaggagcactgcttcattgtggctcagcccttcctaggggcctctgccctttgatgtccttgagctactcttcagctctggaagttgtggacaaaccgtaggaatgtatgtgtgcgtgtggtggagtgattgtctgtgaatgacaggccctggctattgattgatgttgcatcaatttagcaaattcatttcctcattcttgatggcctgaatatatgtctgcacttttaatgctcctcttaaccagttgtaacatcttaccatttccctaacaaattgaattagtttaataaaatcttttgacacatgttaaaaaaaaaaaaaaa

SEQ ID NO: 3246 - DNA, 6063 bp, Homo Sapiens
  NM_012081
taagttggcgcgtcacctagacgtcagcctcttacctctcggacgtcccgtcccaggagcaaaactctagtgactttgggcccgcccccgtgagagtggagggcggccgatgagggcggttctgaagggaacaagaccaatgagacgagcccggggcggggcgcggggccggagggtggggcgggtggcggcggtggcagtccgaggtctggctccgcgcagtatatgacagtacgtcagcagcgggatggccctagcagtggcggcggctgcagaagcccaagcagccgcggccgcagtggaggctagagccggagcggcggcggcggcggcaccccggggagtttaagatggcggcgggggggacagggggcctgcgggaggagcagcgctatgggctgtcgtgcggacggctggggcaggacaacatcaccgtactgcatgtgaagctcaccgagacggcgatccgggcgctcgagacttaccagagccacaagaatttaattccttttcgaccttcaatccagttccaaggactccacgggcttgtcaaaattcccaaaaatgatcccctcaatgaagttcataactttaacttttatttgtcaaatgtgggcaaagacaaccctcagggcagctttgactgcatccagcaaacattctccagctctggagcctcccagctcaattgcctgggatttatacaagataaaattacagtgtgtgcaacaaacgactcgtatcagatgacacgagaaagaatgacccaggcagaggaggaatcccgcaaccgaagcacaaaagttatcaaacccggtggaccatatgtagggaaaagagtgcaaattcggaaagcacctcaagctgtttcagatacagttcctgagaggaaaaggtcaacccccatgaaccctgcaaatacaattcgaaagacacatagcagcagcaccatctctcagaggccatacagggacagggtgattcacttactggccctgaaggcctacaagaaaccggagctacttgctagactccagaaagatggtgtcaatcaaaaagacaagaactccctgggagcaattctgcaacaggtagccaatctgaattctaaggacctctcatataccttaaaggattatgtttttaaagagcttcaaagagactggcctggatacagtgaaatagacagacggtcattggagtcagtgctctctagaaaactaaatccgtctcagaatgctgcaggcaccagccgttcagaatctcctgtatgttctagtagagacgctgtatcttctcctcagaaacggcttttggattcagagtttattgatcctttaatgaataaaaaagcccgaatatctcacctgacgaacagagtaccaccaacactaaatggtcatttgaatcccaccagtgaaaaatctgctgcaggcctcccgctgccccctgcggctgctgccatccctacccctccaccgctgccttcaacctatctgcccatctcacatcctcctcagattgtaaattctaactccaactcccctagcactccagaaggccgggggactcaagacctacctgttgacagttttagtcaaaacgatagtatctatgaggaccagcaagacaaatatacctctaggacttctctggaaaccttaccccctggttccgttctactaaagtgtccaaagcctatggaagaaaaccattcaatgtctcacaaaaagtccaaaaagaagtctaaaaaacataaggaaaaggaccaaataaaaaagcacgacattgagactattgaggaaaaggaggaagatcttaagagagaagaggaaattgccaagctaaataactccagtccaaattccagtggaggagttaaagaggattgcactgcctccatggaaccttcagcaattgaactcccagattatttgataaaatatatcgctatcgtctcctatgagcaacgccagaattataaggatgacttcaatgcagagtatgatgagtacagagctttgcatgccaggatggagactgtagctagaagatttatcaaactagatgcacaaagaaagcgcctttctccaggctcaaaagagtatcagaatgttcatgaagaagtcttacaagaatatcagaagataaagcagtctagtcccaattaccatgaagaaaaatacagatgtgaatatcttcataacaagctggctcacatcaaaaggctaataggtgaatttgaccaacagcaagcagagtcatggtcctagaactctgcttggaccagaagatgtgaataaacttaagcttatttatttaaaattccaaatgagttgctctagattctaaaaaggtgaaactttggctgttgaaagtttcagtattagtaaacttgagttactttttcttttccattttactttgcttccctgcatttcgaagctgctctttctggtcctccccaccaccccacccccaagacttgtgtttgttaatagaaataatttttttaggtattggggatccattgtctatatttcaaatcagttttttttcctcaaaaacttgtgtttgttattagaaatgattttttagatattggggatccagtgtccacacttaaaagttgtatgtgtttaaaaaacaacaacagtaatgtgcaaggtgaaatgcttttggataaacgtaagcctattttctgacgtttcttaatgcaaactctttgccttaaatggtagaatatttagaaatttgcacaaaattaaaaaaataaacattgtcttggagggttaaaaaatagaaaggtgtatgtgtatagattcacatacacatatgtatatacaggctgacttgatctagaacattaaatccgccctgcaagttaaccccccattgcaatggttgccttaaggtgtttgctagttgtgtacatagtgtggttaatcattagctacactgcttcccacttgattagagcaatgggaagcatactgtggcctaccagcatctggaagtgtgtgctcgatctgtatgtgtgcagaggtggtgtggatgtgagcgtgcatgaaggaaaaaaagctgctactcctagtaggccaaacgctcaggttaaacaactgacgagtgttactgtagggtgtttttttgtttttttgttttttttcttctatcaaattgctacttttgttgtggaagacaaaagcatttccatttcaacgagtttgtcagctttattaatgttgggcaaaaattgatatgtcatgaaaatgaaacagatctatagttttgggacaaaattataaaatgaaatgtgtaggtaacctatttatatactgctataaagtattttttgaagagagatatgcaaagaagctattacctacataagaggtatatttaaagattttttttttcatcctggtgccaggaatataaaaaagagtggatatatttaaccataacatactgtgattcatcaaacagcacaaactttcatttcatggagtttatctgttgacattgatttaaactgtcacttgttttatcatgtgggaacataagttatgtggtcaaaaatataaggattttgaattaatgttgattcaagttgtattgtcttattgtattgtcttttcaaagtgctgccagttgaaaagggaagcattatgtttacaaatctgttttgaaatgtttgccaaaattttggtagtgtctttaataaagatgtttgtctccagcatccagaaaaataaatgaataactttgttgtgtatcactgtaaaccagaaaaatgttggttatctagaaaacttgagagagcatgtagattaacttttctctttggagttctaaaacattaactggaaagattagataatatactaaatgtatacagaagtatacagactatacaaagactgaaacaagtcccttttgcactacaactctataacattaccgcagaaattttggttctatgtagcatggacctcctaaggaattctgtttcttttagcattgagatccctggtgctctttttttacctcagaattggtacaatcattattaaacgttaatttatttcaaactttttaattgaaaaaaggaaagggaaacttaattggggataaattcaggcatcatattattatgatagagtctcctgagtggttcgtctataggtaatgaactcattggtgttatttcttggacatcttggccttttaatcaaagactgtgtgctgctatttgctatgagcaaggtttctcaaaagcaaaaggtgcttggaccatttggatcacctgagttagaatctctaggtatagggcccaagtatctgcattttcacaggtttcttgtaggtgactttctgcaagctaaagtatgagaaccattggcttggatgtagttctaaacttttaggtctgtaaatcttgaaatcttgaactgaaggtcaactattggcttttttttttttttaatgtccatcatgtcagcaggtgcaaatcacttttcccctttgcatgatctgaggcacctcctcagttgtttcactgccaactcttgtttcagaacctgtttacaaacaagccttccagttggtgaatggttagccattggagctcctaccctgtacatcagcacatcttctggtttacaagttgggtaacaatgaaagctggagatgctaaatggaaatccagcattgcatacccttagacctgatcacataccagtaaaagccttaatttagatgttagttgtatgtgttggacagatccttgcaaaagtgtgtctgtctattagttgtaaatttgaaaattataaatctctgaatctgctactatccaagtttcatcccttttgaagatgaggcatgagcctattaaaatatttataatcatttttcgtcccctactgcaagacttttagattcttacaaatgattactacaggaatagtggccacttaatgtcagttactccggtggaagaatttatctagttttttttcttttcttttttggaaggatggtgtgaaaaatagcaagattagagaatgagttgtatagttttttctatcacatttcatctaaaatgatttgaaggacttttgaagatttttaccaacatccttaaatcaactccaggttggatgaacaactgatttaaaacaaactaagagaacattaactagatgtgggctttttaaaatatataggtattgcatttcctaccttgttatttattccactttgaatactttagagggcttaactttcaactctttaaggtagtaatggatagttttatacttgttctcacaaaattgttatggtcagtttatatcattgctccatgcattgattataaaaattcagtattaattttttctgatcttataagctttataggagttttcttttctcttataaagtgtttcaccttatgtaaaacaaatgcctgcttgcatattggaagatgttgaaattagttttagacaaaagtggtccatcaattcagacactctgcttggatgccttacccttttcattagtgcattctttgcttctgaaacttggcagaaactcgttagccagtccactgcctttctgacaatgtgtggagtcacgtatgcttggtatatgcctttactacttttaaagttctacagtttattacttgcccaagtgttactaaatccttttcttatgtgtactggatggagaaaaaattatagccagcactttgagaggaaagttttcagaaacaatattaactggcactactaactgaaggccacaggagatgctatcaatgttatttgtaatctgaagattgaacaaggctgtgaggctcatttcaaactattttgaggtgttaaaatatatatatgctgtttctcagctgttccactcaaaccgtgttaggactctcaaaggtaaaatgtcacaggggcttttcagttgttacagagctcagcagctgtggttgcccctgttctacaccaatttcagttcaataaaaatgttaactttgcaaaaaaaaaaaaaaaaaaa

SEQ ID NO: 3247 - DNA, 2222 bp, Homo Sapiens
  NM_012083
ggctcgagtgcctggcgggctccggcttccgcgtccgcccctgctccggcttcgcccgcagctccgcgcccgcgggcaaccaagcccccagcgaagcccgcacagctccgggtgccaggacggggggccatgccgtgccggagggaggaggaagaggaagccggcgaggaggcggagggggaggaagaggaggacgacagcttcctcctgctgcagcagtcggtgacgctgggcagctcgggcgaggtggaccggctggtggcccagatcggcgagacgctgcagctggacgcggcgcaggacagcccggcctcgccgtgcgcgcccccgggggtgccgctgcgggccccggggcccctggctgcggcggtgccggcggacaaggcccggcccccggcggtgccgctgctgctgccgcccgcttcggctgagacggtgggcccggcgccctctggggccctgcgctgcgccctaggggaccgcggccgcgtgcgcggacgcgctgcgccctactgcgtggcggaggtcgccgcaggccccagcgcgctgccggggccgtgccggcgaggatggctcagggacgcggtcacctcccgccgcttgcagcagcgccgatggacccaagccggggcacgcgccggcgacgacgacccgcatcggctcctccagcagctcgtgctctcgggaaacctcatcaaggaagccgtgcggagactccaacgagccgtcgccgcggttgcagccacgggccccgcaagcgcccctgggcccgggggaggccgcagcggacctgaccgcattgccctgcagccctcaggctccttgctctgacgcaggcctcctggaggaggaagtggaggccgctgcgtagacccaacagcgtccagttcctactaactctgagctgaagccgacgtcgccagcctgggagcgaccactttggctgcggggaggcgcgtggggagagatctcaaccagagaagttaccagccgcggcgaggccgtcggagaaaacttaagcgtggagaaatgtatgcgccagggtgcttccgtggggcatgagaatttcccgggccatccaagcccaaggacctgggataaactgggagaactatggcagctacttgcatcgacttgtacctcacttagcccttgggggcgtcgtgagcttggattgtttaaggagggctcaggggtaggaatcgcgatggctttataacaatacttgaaaactaacgacacgcatacattttcttattttctggtggaggagcttagtaagtggtgctacaattgctgtgcaaagaaattccagaggggagaagaatgtaaaagtttggtggtgggtggcttggcattgcccctttttcccaccgattcggtggctggtgaaggtgggagatgtgaactccaattaagggactggagagaggtgaagaattttgcaggtgggagatttggatttgaatgtggacttgtaaatgacttgaccttgccatctgtgttcaaggtcacggtttgctgtggggttcctgggagagcttactcaccccggagtcttttctttctcttgctccaagaagagccctgttggtgctttaccaccgcttggagtctcccgaggacacaaacaggcagagagggacgtgtagggagagttctttcctgttttctgtgctttcctttttacaggactcccggaaggccactcatggccatgccaggagctttctcagaaacagtcataaacgatctcttgagtctctttcttgtcctcccagctgagctttcttattccaccctttctggtgtctataggaatgcatgagagaccctggacgtttttctgctctcttctggccctccatggagtcatgggcctcggcctcggcggctcctcaccctcacaatttatttcctcctcccgtgccagcccttcttttgtgtctgaaaccggttttaaaatgtgactctcccagagaagaagccgctggctgtatgaaacttgacggcgcttttgtaaggtgccacccccaaactttaaggtagctaaaccaatttttaaaagattcaatggcttgttcatcctccagatgtagctattgatgtacacttcgcaacggagtgtctgaaattgtggtggtcctgatttataggatttcataattaaaatgtctgctgaataaatttggcttttgttttggaaaaaaaaaaaaaaaaaa

SEQ ID NO: 3248 - DNA, 2348 bp, Homo Sapiens
  NM_012084
ttccttcctagtcgcggggagtctgagaaagcgcacctgttccgcgaccgtcacgcacccctcctccgcctgccgcgatgtaccgctacctggccaaagcgctgctgccgtcccgggccgggcccgctgccctgggctccgcggccaaccactcggccgcgttgctgggccggggccgcggacagcccgccgccgcctcgcagccggggctcgcattggccgcccggcgccactacagcgagttggtggccgaccgcgaggacgaccccaacttcttcaagatggtggagggcttcttcgatcgcggcgccagcatcgtggaggacaagttggtgaaggacctgaggacccaggaaagcgaggagcagaagcggaaccgggtgcgcggcatcctgcggatcatcaagccctgcaaccatgtgctgagtctctccttccccatccggcgcgacgacggctcctgggaggtcatcgaaggctaccgggcccagcacagccagcaccgcacgccctgcaagggaggtatccgttacagcactgatgtgagtgtagatgaagtaaaagctttggcttctctgatgacatacaagtgtgcagtggttgatgtgccgtttgggggtgctaaagctggtgttaagatcaatcccaagaactataccgaaaatgaattggaaaagatcacaaggaggttcaccatggagctagcaaagaagggctttattggtcctggcgttgatgtgcctgctccagacatgaacacaggtgagcgggagatgtcctggattgctgatacctatgccagcaccatagggcactatgatattaatgcacacgcctgtgttactggtaaacccatcagccaagggggaatccatggacgcatctctgctactggccgtggtgtcttccatgggattgaaaacttcatcaatgaagcttcttacatgagcattttaggaatgacaccagggtttagagataaaacatttgttgttcagggatttggtaatgtgggcctacactctatgagatatttacatcgttttggtgctaaatgtattgctgttggtgagtctgatgggagtatatggaatccagatggtattgacccaaaggaactggaagacttcaaattgcaacatgggtccattctgggcttccccaaggcaaagccctatgaaggaagcatcttggaggtcgactgtgacatactgatcccagctgccactgagaagcagttgaccaaatccaacgcacccagagtcaaagccaagatcattgctgaaggtgccaatgggccaacaactccagaagctgataagatcttcctggagagaaacattttggttattccagatctctacttgaatgctggaggagtgacagtatcttactttgagtggctgaagaatctaaatcatgtcagctatggccgtttgaccttcaaatatgaaagggattctaactaccacttgctcctgtctgttcaagagagtttagaaagaaaatttggaaagcatggtggaactattcccattgtacccacggcagagttccaagacagtatatcgggtgcatctgagaaagacattgtgcactctgccttggcatacacaatggagcgttctgccaggcaaattatgcacacagccatgaagtataacctgggattggacctgagaacagctgcctatgtcaatgccattgaaaaagtcttcaaagtgtacagtgaagctggtgtgaccttcacatagatggatcatggctgacttcctcactaacctcttcacgtgtaacttctgcagacctaccacaagtttacatgtaaccacagaaatccctttctctcctgactcattactaatggataccattctcaacaagtcaatccaaatcagcccgttaaggagaaagaaattaatatacaagctgagtgtgaaagtagaaatcacctacaccagagagctattttggtattttgcctttaaataaaaagcctcctccatatggctgtgcagccttgctctgtggcttttcccagcacaatcagtgctagtgctggggaagggacagtcaagagcagtcagttgcttacttattttgctctggatgagtctgggacacgctgtaactttaacacatttaagaagaaggtgtgtggccttttcagaaggtggcatggtcctcaagtgagttcttagtattttatatcagcaaaataactcaattttgcagattgcaaacaaatataaaagctgtttctgtttatgaattttattcttttagaatagaataagtacatgctgctgtaataaaattgcctttaatcacttaaaaaaaaaaaaaaa

SEQ ID NO: 3249 - DNA, 2958 bp, Homo Sapiens
  NM_012086
tgctggccccggcgaggtagcttctggaaggcgctgctcttccggttctctgtcccggttcctggggttgcacagacagaccctgtaaacatgtcagggttcagtccggaactcatcgactacttggaagggaaaatctcctttgaggagttcgaacggcggagagaagagagaaaaacccgcgagaagaaaagtcttcaggaaaaaggcaagttatcagctgaagaaaatcccgatgactctgaagttccatcatcatcaggaattaactctaccaaatcccaagacaaagatgtcaatgaaggagaaacatcagatggagtgaggaagtcagttcacaaggtctttgcttccatgcttggagagaatgaagatgatgaggaggaagaggaagaagaggaggaggaggaggaggaggaagaaacacctgagcaacccactgcgggcgatgtatttgtattggagatggttctcaatcgtgaaaccaagaaaatgatgaaagagaaaaggcctcggagtaaacttcccagagctctgagaggtctcatgggtgaagccaacattcgttttgctcgaggagaacgtgaagaggcgatattgatgtgcatggaaatcataagacaagctcctctggcttatgagccattctctactctagccatgatatatgaggaccaaggtgacatggaaaaatcattgcagtttgagttgattgctgcgcatttaaatcccagtgacacagaagaatgggttagactggcagaaatgtctctggaacaagacaatattaagcaggctattttttgctatacaaaagctcttaaatatgaacctactaatgtccgttatctgtgggagcgatcaagcctttatgaacagatgggtgatcataaaatggccatggatggttataggcgtattttaaaccttttgtctccatctgatggcgaacgttttatgcagctggctagagatatggcaaagagttactatgaagccaatgatgttacttctgctattaacataattgatgaagctttctcaaagcaccagggcctagtctccatggaagatgttaacatagcagctgaactatatatttctaacaaacagtatgacaaagctttggagataattacagatttttctggaattgtgctggaaaaaaaaacttcagaagaaggcacctcagaagagaataaagctcctgagaatgttacctgcactatacctgatggcgtgccaatagatatcacagtgaagttgatggtctgccttgtacatctcaacattcttgaaccacttaatcctctcttgacaacactagtagaacagaatcctgaagatatgggagacctatacctagatgttgctgaagcttttctggatgttggtgaatataattctgcacttcccctcctcagtgctcttgtttgctctgaaagatacaaccttgcagtagtttggcttcgtcatgcagaatgtttaaaggccttaggctatatggagcgagctgctgaaagctatggcaaggtggttgatctggccccactccatttggatgcaaggatttcactttctacccttcagcagcagctgggccagcctgagaaagctctggaagctctggaaccaatgtatgatccagatactttagcacaggatgcaaatgctgcacagcaggaactgaagttattgcttcatcgttctactctgttgttttcacaaggcaaaatgtatggttatgtggataccttacttactatgttagccatgcttttaaaggtagcaatgaatcgagcccaagtttgtttgatatccagttccaagtctggagagaggcatctttatcttattaaagtatcgagagacaaaatatcagacagcaatgaccaagagtcagcaaattgtgatgcaaaagcaatatttgctgtgctcacaagcgtcttgacaaaggatgactggtggaatcttctgttgaaggccatatactccttatgtgacctatcccgatttcaagaggctgagttgcttgtagattcctcattggaatattactcattttatgatgacaggcaaaaacgcaaagaactagaatactttggtctgtctgctgcaattctggacaaaaatttcagaaaggcatacaactatatcaggataatggtaatggaaaatgtcaataaaccccagctctggaacattttcaatcaagttaccatgcactcccaagatgtacgacatcatcgcttctgtctccgtttgatgctgaaaaacccagaaaatcatgccctatgtgtcttaaatggacacaatgcatttgtatctggtagttttaagcatgcgcttggacagtatgtgcaagcctttcgcactcaccctgacgaacctctctatagcttctgtataggcctaacctttattcatatggcatctcagaagtatgtgttacggagacatgctcttattgtacagggcttttcctttcttaatcgatacctcagtttacgtgggccctgccaggaatcattctacaatttgggccgtggccttcatcagttggggctgattcatcttgcaatccactattatcagaaggccctggagctccctccacttgtggtagagggtatagaacttgaccagttagacttacgaagagatattgcctacaacttgtctctcatctatcagagcagtgggaataccggaatggctcaaacgcttttgtatacctattgttctatataaagcaccgcaactgagaacagagcaatggcagctgctgtgtgaggaccagtgtcttctgtctcagggcttattatttgtaactccaaaatagaaatgaccatttcagaattacctaacaaacagtgtatttatttttaatatgtgatcatgatcttgtggtatatatgcaaaattattcctacaaaaaaaaaaaaaaaaaaaaaaaaa

SEQ ID NO: 3250 - DNA, 2436 bp, Homo Sapiens
  NM_012087
gattctcattggctgaagtcgagggaggtttgtgtcttattatcctccgggtccctcgctggctagtaggagagactggtgcttgccccgcccggtggactaactcgcttaattttaaataaaaagtcgaggacacggcggtcgttttcccgaagacatgggccctcccatgggccatttgctccctggaggccctcgcgtcttgctgagcccggggagttaggatgacgcgagcggtgagggagcccggaacgattccttcgcggaacaattgaggcgaggcctttgggagtactttgtgggacggaccctggcgggccctgccagacgcacagggatggcggcggaggcggccgatttggggctgggggccgccgtccccgtggagctgaggcgggagcgacgcatggtgtgcgtggagtacccgggagtggtgcgtgatgtggctaagatgctgccgactctgggcggcgaggaaggcgtctcccggatctacgcagaccccaccaagaggctggagctgtacttccggcccaaggacccatactgccacccagtgtgcgccaaccgcttcagtaccagcagcctgctgctccgcatcaggaagagaacgaggcggcagaaaggggtgctgggcactgaggcccactccgaggtcacatttgacatggagatccttggcatcatctccaccatttacaaatttcaggggatgtctgacttccagtacttggctgtgcatacggaagcaggcggcaagcatacgtcaatgtatgacaaggtgctcatgctccggcccgagaaggaggcctttttccaccaggagctgccgctctacatccccccacccatcttctcccggctggacgccccggtggactacttctaccgaccagagacccagcaccgggaaggctacaacaatccccccatctcaggtgagaatctgattggcctgagcagagcccggcgcccccacaatgccatctttgtcaactttgaggatgaggaggtgcccaagcagccactggaggctgcagcccagacgtggaggagagtctgcactaaccccgtggaccggaaggtggaggaggagctgaggaagctgtttgacatccgtcccatctggtcccgaaatgctgtcaaggccaacatcagcgtccacccagacaagctcaaggtcttgcttcccttcatagcctattacatgataacaggcccctggcgcagcctatggattcgatttgggtatgacccccgaaaaaacccagatgccaagatttatcaagtcctcgatttccgaatccgttgtggaatgaaacacggttacgcccccagtgacttgccggtcaaagcaaagcgcagcacctacaactacagcctccccatcaccgtcaagaagacatccagccagcttgtcaccatgcatgacctgaagcagggcctgggcccgtcggggacgagtggtgctcggaaaccagcttccagcaagtacaagctcaaggactctgtctacatcttccgggaaggggccttgccaccctatcggcagatgttctaccagttatgcgacttgaatgtggaagagttgcagaagatcattcaccgcaatgacggggcagagaattcctgcacagaacgggatgggtggtgcctccccaagaccagcgacgagctcagggacaccatgtccctcatgatccggcagaccatccgctccaagaggcctgctctcttttccagctcagccaaggctgatggcggaaaagagcagctgacgtacgagtctggggaagacgaggaggatgaggaggaggaggaagaggaggaggaggacttcaagccatccgacggcagtgaaaacgaaatggagacagagattctggactacgtgtgacagggcccaaggctgggcctccctgacccggccagactggtgtctggcctaatgagggagccggggctccccattgccacccacagtgcccggaatggccctaggaggccctctgaggagagctagagtcccagcaaagggtgcagctgaccctagcactggctgtgacatgctgcttggtgctgcctctggtcctgaggggttagggacatccccaaagggtataccctggctctgccacccatgaaccagcccagcatccagccagtgagtgggcacccaatgcctctcaggatgagaccagtaaatgccggaggtggagctgggcagctgtggagccccaggccacaggccagtctcgcttggctctcatgactgtggtggtggagatagcgtggggagcctcgcccatggtctcacgtggcaagaagtgcctttagctctggatcccaaccgtttggcacagctttggccacagccaggcccctctggaattgtccttattaaaccagtttcccgagaaaaaaaaaaaaaaaaaa

SEQ ID NO: 3251 - DNA, 1043 bp, Homo Sapiens
  NM_012088
ctagcgacggccgtagggagcgcttcctcctccccgccgccgccctcgccatggccgcgccggccccgggcctcatctcggtgttctcgagttcccaggagctgggtgcggcgctagcgcagctggtggcccagcgcgcagcatgctgcctggcaggggcccgcgcccgtttcgcgctcggcctgtcgggcgggagcctcgtctcgatgctagcccgcgagctacccgccgccgtcgcccctgccgggccagctagcttagcgcgctggacgctgggcttctgcgacgagcgcctcgtgcccttcgatcacgccgagagcacgtacggcctctaccggacgcatcttctctccagactgccgatcccagaaagccaggtgatcaccattaaccccgagctgcctgtggaggaggcggctgaggactacgccaagaagctgagacaggcattccaaggggactccatcccggttttcgacctgctgatcctgggggtgggccccgatggtcacacctgctcactcttcccagaccaccccctcctacaggagcgggagaagattgtggctcccatcagtgactccccgaagccaccgccacagcgtgtgaccctcacactacctgtcctgaatgcagcacgaactgtcatctttgtggcaactggagaaggcaaggcagctgttctgaagcgcattttggaggaccaggaggaaaacccgctgcccgccgccctggtccagccccacaccgggaaactgtgctggttcttggacgaggcggccgcccgcctcctgaccgtgcccttcgagaagcattccactttgtagctggccagagggacgccgcagctgggaccaggcacgcggcccatggggctgggcccctgctggccgccactctccgggctctcctttcaaaaagccacgtcgtgctgctgctggaagccaacagcctccggccagcagccctacccggggctcaacacacaggctgtggctctggacatccggatattaaaaggagcgttgctggaaaaaaaaaaa

SEQ ID NO: 3252 - DNA, 17821 bp, Homo Sapiens
  NM_012090
cacgctcccctcgactgcgctccagcctggggcgcgcccggccgccgccgccttcgctgccgccacgggcccgtcttcttcctccttcggctcccaggatgaagaaactgagtctcagagaggtgaagtgacttgcccaagatcacagcaattatcacttctccctgggctcccaggccctcctgcagcagcccccgcctgggccatgtcttcctcagatgaagagacgctcagtgagcggtcatgtcggagtgagcggtcttgtcggagtgagcgatcttacaggagcgagcggtcggggagcctgtctccctgtcccccaggggacaccttgccctggaacctgccactgcatgagcagaaaaagcggaaaagccaggattcggtgctggaccctgcagagcgtgctgtggtcagagtcgctgatgaacgggaccgggttcagaagaaaacgttcaccaagtgggtcaacaagcacttaatgaaggtccgcaagcacatcaatgatctttatgaagatctgcgggatggccataacctgatctctctgttggaggtcctctcaggcatcaaactgccccgggagaagggcaggatgcgttttcataggctgcagaatgtgcagattgccctggacttcctaaagcagcgacaggtgaaactagtgaatattcgcaatgatgacatcacagatggcaaccccaagttgaccctgggtctgatctggaccattattttgcatttccagatctctgacatctacattagtggagaatcaggggatatgtcagccaaggagaaactactcctgtggacccagaaggtgacagctggttacacaggaatcaaatgcaccaacttttcctcctgctggagtgatgggaagatgttcaatgcactcattcaccgataccgacccgatctagtagacatggagagggtgcaaatccaaagtaaccgagagaatctggaacaggcttttgaagtggcagaaagactgggggtcactcgcctgctggatgcagaagatgtggatgtgccatctccagatgaaaagtctgtaatcacttatgtgtcttcgatttatgatgccttccctaaagttcctgagggtggagaagggatcagtgctacggaagtggactccaggtggcaagaataccaaagccgagtggactccctcattccctggatcaaacagcatacaatactgatgtcagataaaacttttccccaaaaccctgttgaactaaaggcactttataaccaatatatacacttcaaagaaacagaaattctggccaaggagagagaaaaaggaagaattgaggaattatataaattactagaggtgtggattgaatttggccgaattaaactgcctcaaggttatcaccctaatgatgtggaagaagagtggggaaagctcatcatagagatgctggaacgagagaaatcacttcggccggctgtggagaggctggaattgctgctacagattgcaaacaaaatccagaatggtgctttgaactgtgaagaaaaactgacactagctaagaatacactgcaggctgatgctgctcacctggaatcaggacaaccggtacaatgtgagtcagatgtcattatgtacattcaggagtgtgaaggtctcatcaggcagctgcaggtggatctccagatcctgcgggatgagaattactaccagctagaagagctggcttttagggtcatgcgtcttcaggatgagctggtcaccttgcgtctagagtgtacaaacctgtaccggaagggtcatttcacttcacttgaattggttccaccctctactttaaccaccactcatctgaaagcagaacccttaaccaaggcaacccattcttcttctacctcctggttccgaaagcctatgactcgggctgaacttgtggccatcagctcctctgaagatgaaggcaatctccgatttgtgtatgaactactgtcttgggtagaagagatgcagatgaaactggagcgagcagagtggggcaatgacctgcctagtgtggagttgcagctagaaacacagcagcacatccatacgagtgtagaagagctgggctcaagtgtcaaggaggccaggttgtatgagggaaagatgtcccagaatttccataccagctatgctgaaactcttggaaagctggagacacagtattgtaaattgaaggaaacttctagcttccggatgaggcaccttcagagcctgcataaatttgtttccagagctacagctgagttgatctggttgaatgagaaggaggaggaggaactagcatatgactggagtgacaacaattccaatatctcagccaagagaaattacttctctgagttgacaatggaactggaggagaaacaggatgtgtttcgttctctacaagatacagcagaactactttcacttgagaaccacccagccaagcagacagtggaggcttacagtgctgctgtccagtcccagttgcagtggatgaagcagctgtgcctgtgtgttgagcagcatgtgaaagagaatactgcttattttcagttcttcagtgatgcacgagagctggagtcattcttgaggaacctccaagattccattaaacgaaaatattcctgtgaccacaacaccagcttatcccgccttgaagacctgctccaggactccatggatgaaaaggagcagcttatacagtccaagagttccgttgccagtctcgttgggagatcaaaaaccatcgttcagctaaaaccacgcagtccagaccatgtgttaaagaacaccatttctgtcaaggctgtctgtgactacaggcagatcgagattactatttgcaaaaatgatgaatgtgtgctagaagataattctcagcggaccaaatggaaagtgatcagccccacagggaacgaggcaatggtgccgtcagtctgcttcctcatccccccacccaataaggatgccattgagatggccagcagggtcgaacaatcttatcagaaggttatggccctttggcatcagctgcatgttaacaccaaaagccttatctcttggaactatctgcgtaaagaccttgaccttgtacagacctggaacctagaaaagcttcgatcctcagcaccaggggagtgccatcagattatgaagaaccttcaggcccactatgaagactttctgcaggatagtcgtgactctgtgctgttctcagtggctgatcgcttgcgcttggaagaggaggtggaagcttgtaaagcccgcttccagcacctgatgaagtccatggagaatgaggacaaagaggagactgtggccaagatgtacatttcagagttgaagaacatccggctacgcctggaggagtatgaacagagggtggtcaaacgaattcagtctctagccagctctaggactgacagagatgcctggcaggacaatgcattaaggattgcagagcaagagcacacccaggaggatttacagcaattgaggtcagacttggatgcagtttctatgaaatgtgacagctttctccatcagtctccatctagttcaagtgtcccaactctgcgctcagaactgaatctgctggtggagaagatggaccatgtctatggtctctctactgtatatctgaataagttaaagacagttgatgttatagtacgtagcatacaggatgctgaactcttggtcaaaggttatgagattaagctgagtcaagaagaagtagtactggcagatctctcagctctggaggcccattggtcgacattacggcactggcttagtgatgtgaaggacaagaattcagtgttttcagtcctggatgaggaaattgccaaggccaaggtagtggcagagcagatgagtcgtctgacaccagagcgaaatctggatttggagcgctatcaggaaaaaggctcccagctgcaggagcgttggcaccgagtcattgcccagctcgagattcgccaatctgagctagaaagtatccaggaagttctgggagattaccgagcctgccatggaactctcatcaagtggattgaggaaaccactgcccagcaggaaatgatgaagccaggccaggcagaggatagcagagtgctttcggagcagctcagccagcagacggccctatttgcagaaattgagagaaatcagacaaaactggatcaatgtcaaaaattttcccagcagtactctactattgtaaaggactatgaattgcaactgatgacatacaaggcctttgtggaatcgcagcagaaatcccctggcaagcgccgtcgcatgctttcctcttcagatgccatcactcaagagttcatggacttaaggactcgctacacggcattggtgactttaacaactcagcacgtgaaatacatcagtgatgcactccggcgtctggaggaggaggagaaagtggtagaagaggagaaacaagaacatgtggagaaggttaaagaacttttgggctgggtgtctaccctagcgaggaatacacaaggaaaagctacctcatccgagaccaaagaatcaacagacattgaaaaagctattttggaacagcaggttctgtcagaagagctgacaacaaagaaagaacaagtctctgaagctattaaaacatcacagatcttcttggccaagcatggtcataagctctcagaaaaagagaagaaacaaatatctgagcaattgaatgccctaaacaaggcttaccatgacctttgtgatggttctgcaaatcagcttcagcagcttcagagccagttggctcaccagacagaacaaaagaccctgcagaaacaacaaaatacctgtcaccagcaactggaggatctttgcagttgggtaggacaggcagaaagagcactggcaggccaccaaggcagaaccacccagcaggatctctctgctttgcagaagaaccaaagtgacttgaaggatttacaggatgacattcagaatcgtgccacctcatttgccactgttgtcaaggacattgaggggttcatggaagagaatcagaccaagctgagcccacgtgagttgacagctcttcgggaaaagcttcatcaggctaaggagcaatatgaggcgctccaggaagagacacgtgtggcccagaaggaactggaggaagcagtgacctccgccttacagcaggagactgaaaagagtaaagcagcaaaggaactggcagagaacaagaagaagatcgatgctctcctggattgggtaacttcagtaggatcatctggtggacagctgctgaccaaccttccaggaatggagcagctctcgggagctagcttggagaaaggagccttggacaccactgatggttacatgggggtgaatcaagccccagagaaactggacaagcaatgtgagatgatgaaggcccgtcaccaagaattgctgtcccagcagcaaaatttcattctggccacccagtcagctcaggccttcttggatcagcatggccacaatctcacacctgaggagcaacagatgctgcaacagaagctgggagagctaaaggaacaatactctacttccctggcccaatcagaggcagaactgaagcaggtgcagacacttcaggatgagttgcagaaatttctgcaggatcataaagagtttgaaagctggttggaacgatccgagaaagagctggagaacatgcataagggaggcagcagccccgagacccttccctccctgctaaagcggcaaggaagcttctcagaggatgtcatttcccacaaaggagacttgagatttgtgactatctcaggacagaaagtcttggacatggaaaacagttttaaggaaggcaaagaaccatcagaaattggaaacttagtaaaggacaagttgaaggatgcaacagaaagatacactgctctccactcaaagtgtacacgattaggatctcacctgaatatgctgttaggccagtatcatcaattccaaaacagtgctgacagcctgcaggcctggatgcaggcttgtgaggccaacgtggagaagctcctctcagatactgttgcctctgaccctggagttctccaggagcagcttgcaacaacaaagcagttgcaggaggaattggctgagcaccaagtacctgtggaaaaactccaaaaagtagctcgtgacataatggaaattgaaggggagccagccccagaccacaggcatgttcaagaaactacagattccatactcagccacttccaaagcctctcctatagcctggctgagcgatcttctctgctgcagaaagcaattgcccaatctcagagtgtccaggaaagcctggagagcctgttgcagtctattggggaagttgaacaaaacctggaagggaagcaggtgtcatcactctcatcaggagtcatccaggaagccttagccacaaatatgaaattgaagcaggacattgctcggcaaaagagcagcttggaggccacccgtgagatggtgacccgattcatggagacagcagacagtactacagcagcagtgctgcagggcaaactggcagaggtgagccagcggttcgaacagctctgtctacagcagcaagaaaaggagagctccctaaagaagcttctaccccaggcagagatgtttgaacacctctctggtaagctgcagcagttcatggaaaacaaaagtcggatgctggcctctggaaatcagccagatcaagatattacacatttcttccaacagatccaggagctcaatttggaaatggaagaccaacaggagaacctagatactcttgagcacctggtcactgaactgagctcttgtggctttgcgctggacttgtgccagcatcaggacagggtacagaatctaagaaaagacttcacagagctacagaagacagttaaagagagagagaaagatgcatcatcttgccaggaacagttggatgaattccggaagctggtcaggaccttccagaaatggttgaaagaaactgaagggagtattccacctacggaaacttctatgagtgctaaagagttagaaaagcagattgaacacctgaagagtctactagatgactgggcaagtaagggaactctggtggaagaaatcaattgcaaaggtacttctttagaaaatctcatcatggaaatcacagcacctgattcccaaggcaagacaggttccatactgccctctgtaggaagctctgtaggcagtgtaaacggataccacacctgcaaagatctgacggagatccagtgtgacatgtcagatgtaaacttgaagtatgagaaactagggggagtacttcatgaacgccaggaaagccttcaggctatcctcaacagaatggaggaggttcacaaggaggcaaactctgtgctgcagtggctggaatcaaaagaggaagtcctgaaatccatggatgccatgtcatctccaaccaagacagaaacagtgaaagcccaagctgaatctaacaaggccttcctggctgagttggaacagaattctccaaaaattcaaaaagtaaaggaagccctggctggattactggtgacatatcccaactcacaggaagcagaaaattggaagaaaattcaggaagaactcaattcccgatgggaaagggccactgaggttactgtggctcggcaaaggcagctagaggaatctgcaagtcatctggcctgcttccaggctgcagaatcccagctccggccgtggctgatggagaaagaactgatgatgggagtgctggggcccctgtctattgaccccaacatgttgaatgcacaaaagcaacaggtccagtttatgctaaaggaatttgaagcacgcaggcaacagcatgagcaactgaatgaggcagctcagggcatcctaacaggccctggagatgtctctctgtccaccagccaagtacagaaagaactccagagcatcaatcagaaatgggttgagctgactgacaaactcaactcccgttccagccaaattgaccaagctattgttaagagcacccagtaccaggaactgctccaggacttatcagagaaggtgagggcagttggacaacggctgagtgtccagtcagctatcagcacccaaccagaggctgtaaagcagcaattggaagagaccagtgaaattcgatctgacttggagcagttagaccacgaggttaaggaggctcagacactgtgcgatgaactctcagtgctcattggtgagcagtacctcaaggatgaactgaagaagcgtttggagacagttgccctgcctctccaaggtttagaagaccttgcagccgatcgcattaacagactccaggcagctcttgccagcacccagcagttccagcaaatgtttgatgagttgaggacctggttggatgataaacaaagccagcaagcaaaaaactgcccaatttctgcaaaattggagcggctacagtctcagctacaggagaatgaagagtttcagaaaagtcttaatcaacacagtggctcctatgaggtgattgtggctgaaggggaatctctacttctttctgtacctcctggagaagagaaaaggactctacaaaaccagttggttgagctcaaaaaccattgggaagagcttagtaaaaaaactgcagacagacaatccaggctcaaggattgtatgcagaaagctcagaaatatcagtggcatgtggaagaccttgtgccatggatagaagattgtaaagctaagatgtctgagttgcgagtcactctggatccagtgcagctagagtccagtctcctaagatcaaaggctatgctgaatgaggtggagaagcgccgctccctgctggaaatattgaatagtgctgctgacattctgatcaattcttcagaagcagatgaggatggaatccgggatgagaaggctgggatcaaccagaacatggatgctgttacagaagagctgcaggccaaaacagggtcactcgaagaaatgactcagaggctcagggagttccaggaaagctttaagaatattgaaaagaaggttgaaggagccaaacaccaacttgagatctttgatgctctgggttctcaagcctgtagcaacaagaacctggagaagctaagagctcaacaggaagtgctgcaggccctagagcctcaggtagactatctgaggaactttactcagggtctggtagaagatgccccagatggatctgatgcttctcaacttctccaccaagctgaggtcgcccagcaagagttcctcgaagttaagcaaagagtgaacagtggttgtgtgatgatggaaaacaagctggaggggattggccagtttcactgccgggtccgagagatgttctctcaattggcagacctggatgatgagctagatggcatgggtgctattggcagagacactgatagcctccagtcccaaatcgaggatgtccggctattccttaacaaaattcacgtcctcaaattagacatagaggcctctgaagcagagtgtcgacatatgctagaagaagaggggactctggatttgttaggtctcaaaagggagctagaagccctgaacaaacagtgtggcaaactgacagagagggggaaagctcgtcaggaacagctggaactgacactaggccgtgtagaggacttctacaggaaattgaaaggactcaatgacgcgaccacagcagcagaggaggcagaggccctccagtgggtagtggggaccgaagtggaaatcatcaaccaacaattagcagattttaaaatgtttcagaaagaacaagtggatcctcttcagatgaaattgcagcaggtgaatggacttggccagggattaattcagagtgcaggaaaagactgtgatgtacagggtttagaacatgacatggaagagatcaatgctcgatggaatacattgaataaaaaggtcgcacaaagaattgcacagctacaggaagctttgttgcattgtgggaagtttcaagatgccttggagccattgctcagctggttggcagataccgaggagctcatagccaatcagaaacctccatctgctgagtataaagtggtgaaagcacagatccaagaacagaagttgctccagcggctcctagatgatcgaaaggccacagtagacatgcttcaagcagaaggaggcagaatagcccagtcagcagagctggctgatagagagaaaatcactggacagctggagagtcttgaaagtagatggactgaactactcagtaaggcagcagccaggcaaaaacagctggaagacatcctggttctggccaaacagttccatgagacagctgagcctatttctgacttcttatctgtcacagagaaaaagcttgctaactcagaacctgttggcactcagactgccaaaatacagcagcagatcattcggcacaaggctctggaagaagacatagaaaaccatgcaacagatgtgcaccaggcagtcaaaattgggcagtccctctcctccctgacatctcctgcagaacagggtgtgctgtcagaaaagatagactcattgcaggcccgatacagtgaaattcaagaccgctgttgtcggaaggcagccctacttgaccaagctctgtctaatgctaggctgtttggggaggatgaggtggaggtgctcaactggctggctgaggttgaggacaagctcagttcagtgttcgtaaaggatttcaaacaggatgtcctgcacaggcagcatgctgaccacctggctttaaatgaagaaattgttaatagaaagaagaatgtagatcaagctattaaaaatggtcaggctcttctaaaacaaaccacaggtgaggaggtgttacttatccaggaaaaactagatggtataaagactcgttacgcagacatcacagttactagctccaaggccctcagaactttagagcaagcccggcagctggccaccaagttccagtctacttatgaggaactgaccgggtggctgagggaggtggaggaggagctggcaaccagtggaggacagtctcccacaggggaacagataccccagtttcagcagagacagaaggaattaaagaaggaggtcatggagcacaggctggtgttggacacagtgaatgaggtgagccgtgctctcttagagctggtgccctggagagccagagaagggctggataaacttgtgtccgatgctaacgagcagtacaaactagtcagtgacactattggacaaagggtggatgaaattgatgctgctattcagagatcacaacagtatgagcaagctgccgatgcagaactagcttgggttgctgaaacaaaacggaaactgatggctctgggtccaattcgcctggaacaggaccagaccacagctcagcttcaggtacagaaggctttctccattgacattattcgacacaaagattcaatggatgaactcttcagtcaccgtagtgaaatctttggcacatgtggggaggagcaaaaaactgtattacaggaaaagacagagtctctaatacagcaatatgaagccattagcctactcaattcagagcgttatgcccgcctagagcgggcccaggtcttagtaaaccagttttgggaaacttatgaagagctcagcccctggattgaggaaactcgggcactaatagcacagttaccctctccagccattgatcatgagcagctcaggcagcaacaagaggaaatgaggcaattaagggaatctattgctgaacacaaacctcatattgacaaactactaaagataggcccacaactaaaggaattaaaccctgaggaaggggaaatggtggaagaaaaataccagaaagcagaaaacatgtatgcccaaataaaggaggaggtgcgccagcgagccctggctctggatgaagccgtgtcccagtccacacagattacagagtttcatgataaaattgagcctatgttggagacactggagaatctttcctctcgcctgcgtatgccaccactgatccctgctgaagtagacaagatcagagagtgcatcagtgacaataagagtgccaccgtggagctagaaaaactgcagccatcctttgaggccttgaagcgccgtggagaggagcttattggacgatctcagggagcagacaaggatctggctgcaaaagaaatccaggataaattggatcaaatggtattcttctgggaggacatcaaagctcgggctgaagaacgagaaatcaaatttcttgatgtccttgaattagcagagaagttctggtatgacatggcagctctcctgaccaccatcaaagacacccaggatattgtccatgacttggaaagcccaggcattgatccttccatcatcaaacaacaggttgaagctgctgagactattaaggaagagacagatggtctgcatgaagagctggagtttattcggatccttggagcagatttgatttttgcctgtggagaaactgagaagcctgaagtgaggaagagcattgatgagatgaataatgcttgggagaacttaaacaaaacatggaaagagaggctagaaaaacttgaggatgctatgcaagctgctgtgcagtatcaggacactcttcaggctatgtttgactggctagataacactgtgattaaactctgcaccatgccccctgttggcactgacctcaatactgttaaagatcagttaaatgaaatgaaggagttcaaagtagaagtttaccaacagcaaattgagatggagaagcttaatcaccagggtgaactgatgttaaagaaagctactgatgagacggacagagacattatacgagaaccactgacagaactcaaacacctctgggagaacctgggtgagaaaattgcccaccgacagcacaaactagaaggggctctgttggcccttggtcagttccagcatgccttagaggaactaatgagttggctgactcataccgaagagttgttagatgctcagagaccaataagtggagacccaaaagtcattgaagttgagctcgcaaagcaccatgtcctaaaaaatgatgttttggctcatcaagccacagtggaaacagtcaacaaagctggcaatgagcttcttgaatccagtgctggagatgatgccagcagcttaaggagccgtttggaagccatgaaccaatgctgggagtcagtgttacagaaaacagaggagagggagcagcagcttcagtcaactctgcagcaggcccagggcttccacagtgaaattgaagatttcctcttggaacttactagaatggagagccagctttctgcatctaagcccacaggaggacttcctgaaactgctagggaacagcttgatacacatatggaactctattcccagctgaaagccaaggaagagacttataatcaactacttgacaagggcagactcatgcttctaagccgtgacgactctgggtctggctccaagacagaacagagtgtagcacttttggagcagaagtggcatgtggtcagcagtaagatggaagaaagaaagtcaaagctggaagaggccctcaacttggcaacagaattccagaattccctacaagaatttatcaactggctcactctagcagagcagagtttaaacatcgcttctccaccaagcctgattctaaatactgtcctttcccagatagaagagcacaaggtttttgctaatgaagtaaatgctcatcgagaccagatcattgagctggatcaaactgggaatcaattaaagttccttagccaaaagcaggatgttgttctgatcaagaatttgttggtgagcgtgcagtctcgatgggagaaggttgtccagcgatctattgaaagagggcgatcactagatgatgccaggaagcgggcaaaacaattccatgaagcttggaaaaaactgattgactggctagaagatgcagagagtcacctggactcagaactagagatatccaatgacccagacaaaattaaacttcagctttctaagcataaggagtttcagaagactcttggtggcaagcagcctgtgtatgataccacaattagaactggcagagcactgaaagaaaagactttgcttcccgaagatagtcagaaacttgacaatttcctaggagaagtcagagacaaatgggatactgtttgtggcaagtctgtggagcggcagcacaagttggaggaagccctgctcttttcgggtcagttcatggatgctttgcaggcattggttgactggttatacaaggtggagccacagctggctgaggaccagcccgtgcacggggaccttgacctcgtcatgaacctcatggatgcacacaaggttttccagaaggaactgggaaagcgaacaggaaccgttcaggtcctgaagcggtcaggccgagagctgattgagaatagtcgagatgacaccacttgggtaaaaggacagctccaggaactgagcactcgctgggacactgtctgtaaactctctgtttccaaacaaagccggcttgagcaggccttaaaacaagcggaagtgtttcgagacacagtccacatgctgttggagtggctttctgaagcagagcaaacgcttcgctttcggggagcacttcctgatgacacagaggccctgcagtctctcattgacacccataaggaattcatgaagaaagtagaagaaaagcgagtggacgttaactcagcagtagccatgggagaagtcatcctggctgtctgccaccccgattgcatcacaaccatcaaacactggatcaccatcatccgagctcgcttcgaggaggtcctgacatgggctaagcagcaccagcagcgtcttgaaacggccttgtcagaactggtggctaatgctgagctcctggaagaacttctggcatggatccagtgggctgagaccaccctcattcagcgggatcaggagccaatcccgcagaacattgaccgagttaaagcccttatcgctgagcatcagacatttatggaggagatgactcgcaaacagcctgacgtggaccgggtcaccaagacatacaaaaggaaaaacatagagcctactcacgcgcctttcatagagaaatcccgcagcggaggcaggaaatccctaagtcagccaacccctcctcccatgccaatcctttcacagtctgaagcaaaaaacccacggatcaaccagctttctgcccgctggcagcaggtgtggctgttagcactggagcggcaaaggaaactgaatgatgccttggatcggctggaggagttgaaagaatttgccaactttgactttgatgtctggaggaaaaagtatatgcgttggatgaatcacaaaaagtctcgagtgatggatttcttccggcgcattgataaggaccaggatgggaagataacacgtcaggagtttatcgatggcattttagcatccaagttccccaccaccaagttagagatgactgctgtggctgacattttcgaccgagatggggatggttacattgattattatgaatttgtggctgctcttcatcccaacaaggatgcgtatcgaccaacaaccgatgcagataaaatcgaagatgaggttacaagacaagtggctcagtgcaaatgtgcaaaaaggtttcaggtggagcagatcggagagaataaataccggtttggggattctcagcagttgcggctggtccgtattctgcgcagcaccgtgatggttcgcgttggtggaggatggatggccttggatgaatttttagtgaaaaatgatccctgccgagcacgaggtagaactaacattgaacttagagagaaattcatcctaccagagggagcatcccagggaatgacccccttccgctcacggggtcgaaggtccaaaccatcttcccgggcagcttcccctactcgttccagctccagtgctagtcagagtaaccacagctgtacatccatgccatcttctccagccaccccagccagtggaaccaaggttatcccatcatcaggtagcaagttgaaacgaccaacaccaacttttcattctagtcggacatcccttgctggtgataccagcaatagttcttccccggcctccacaggtgccaaaactaatcgggcagaccctaaaaagtctgccagtcgccctgggagtcgggctgggagtcgagccgggagtcgagccagcagccggcgaggaagtgacgcttctgactttgacctcttagagacgcagtctgcttgttccgacacttcagaaagcagcgctgcagggggccaaggcaactccaggagagggctaaacaaaccttccaaaatcccaaccatgtctaagaagaccaccactgcctcccccaggactccaggtcccaagcgataacactgtctaagcacccccaagccactatccactttgaatcctgctccatacattgggtgtatatttattctgaacgggagaagttatattgttaaaagtgtaaaagaataattgtgttatgaagctgccttattttttttctttttgtaagttactattttcatgtgaatatttatgtagataaaatttgcctcctggtaaccctgtaatggatggggcccagaaatgaaatatttgagaaaaacaagtgaaaaggtcaagatacaaatgtgtattaaaaaaaaaaaagcctattaatagggtttctgcgcggtgcagggttgtaaacctgctttatcttttaggattattcctaaatgcatcttctttataaacttgacttgctatctcagcaagataaattatattaaaaaaataagaatcctgcagtgtttaaggaactctttttttgtaaatcacggacacctcaattagcaagaactgaggggagggctttttccattgtttaatgttttgtgatttttagctaaagagagggaacctcatctaagtaacatttgcacatgatacagcaaaaggagttcattgcaatactgtctttggatattgtttcagtactgggtgtttaaaggacaaatagctgctagaattcaggggtaaatgtaagtgttcagaaaacgtcagaacatttggggttttaaactgatttgttgctccctatccagcctagacaccagtaactcttgtgttcaccaggacccagacccttggcaagggataggctcgttggtgacattgtgaatttcagatttgttttatccactttttttgctatttatttaaatggtcgatcaacttcccacaaactgaggaatgaattccacgagcctgttctgaaaatgtggacgtaagacaaacacgtgctcgtcctttaatggagttcaccagcacacttgttaaccagtcctgtttgctttcgtctttttttgtgcgtaataaagtcaactgaccaagtgaccatgaaaaggggctgtctggggctcctgttttttagctgctgttcttcagctccgaccatgttgctgtgtgattatctcaattggttttaattgaggcagaaactgaagctctaccaatgaactgtttagaaacaagacacacttttgtattaaaattgcttgcagtaacaaatattttgtatttcctgattttcttttcaactattaccttatctataaatgttaccctggggtataatcatgttgtaggtacttaaatgcattccgcaaatcaaaatatcttgatggataaattatagagctt

SEQ ID NO: 3253 - DNA, 3545 bp, Homo Sapiens
  NM_012091
gagccgaaaggaaccggcgctttgtgacgtcacgtccgccttaccggcggattaagctcgctttcttctaggcgcgtttcctgaaggtcgatggccaggtggtcttcataaactatactgccttgtgatgcctccctagaaatgagaggtctcaataccagctcagaccatgtggaccgcggatgagattgctcagctatgctatgaacactatgggatcaggctgcccaagaaggggaagcctgagccaaaccatgagtggacattattggcagcggtggtgaagatacaatctccagctgacaaggcctgcgacacccctgataagccggtgcaagtgacaaaggaagttgtgtcaatgggaacaggaacaaaatgcataggacagtccaaaatgaggaagaacggagacatcctcaatgatagccatgctgaggtcatagccagaaggagtttccaaaggtaccttctccaccaactccagttggcagccaccctgaaagaggatagcatctttgtcccaggaactcaaaaaggagtgtggaaacttagacgagacctcatttttgtgtttttctccagccatacaccctgtggggatgcctccatcattccgatgcttgagtttgaagatcagccttgctgtcctgtcttcagaaattgggcccacaactcatcagtagaagccagtagtaacctggaagctcctggaaatgaaagaaaatgtgaagaccctgacagtcctgtaaccaaaaagatgaggcttgagcctgggactgcagccagggaggtcaccaacggagcagctcaccatcagagttttggcaagcagaaaagtggcccaatctcaccaggcatccacagctgtgatctcactgtagagggactggctactgtcaccagaatagcccctggtagtgccaaagtgatagacgtttatagaactggagccaagtgtgtacctggagaagctggagactccggaaagccgggtgctgcgtttcaccaggtggggctgctccgagtgaagccaggccgtggagacagaacacgctccatgtcctgtagtgacaagatggcccgatggaacgtcctcggatgccaaggggcactgttgatgcacttgctggaagagcccatctacctgtcagctgtggtcattgggaagtgcccatacagccaggaagccatgcagagagcactgattggaaggtgtcagaatgtgtctgctttaccaaaaggcttcggagttcaagaattaaaaatactgcagtcagatttactatttgaacagagccgcagtgcggtgcaggcaaaaagggctgatagcccaggtcgacttgttccttgtggggcagccatcagctggagtgcagttcctgagcagcctttggatgttactgccaatggctttccacagggaacaacaaagaaaacaattggaagccttcaggcaagatcccaaatcagcaaagtggaactcttcagatcattccagaagctgctaagcagaattgcaagggacaagtggccacactccctcagggtgcagaagctggatacctaccaggagtacaaggaggctgcgtcctcttaccaggaagcctggagcacactccggaagcaggtgtttggatcctggatcagaaacccaccggattatcaccagttcaagtgagaaggaaatgtttgctctggtagcaggacccttcatcctgaactgccttcctccacgcaggacaagtcttagcttttttggtagttaaatcagggaacattctttctgagctttgcatctctgttgtgtaatacagatggaatctggaacttagagcaagctatacttgattgaagtagctctctgctaaaatggcatctcactaatgacctcactatctgacttccattgtgttttattgcttctctaaaatatgaaatcagagtttggaacatgatgctttgaaagtactctgcagcagctctgttttatgggttcctacattgattcagcaaatatttattgagctgaaatgatgtttgacgctctgcaagttttacagctttgcctagcatagcgaatatatattttgtattcccagcctttctttcttcagggagccattcttttcccattcttcagtgatcctgctctgtgcctcagacttggctgaagctaaccttactccctggctctaggaatagcctgtgagccagccctggactgccctggacttgttctcagaggtatcaggaaaggctttctgttttgatctggagctgtaagggtcacataatcatgggactgccggtggccatcttttcctactacctagagaaagccagcaaagaatgaaggcaacaaaggaaacagccaagagaatcaaagatctagtaacactgtttagatgtctcaattatgtgagacagattcctgttgttattttgattaagcctgtttgtgttggttttctgacttacaattgaaagagttctgtccaaaaagccaaaaggtggccaggcttggtggctcaggcctgtaatcccagcactttgggaagcccaggcaggcagatcacttgaggtcaggagttcaagaccagcctggccaacctggtgaaaccctgtctctactaaaaatgcaaaaactagccgggcatggtggcgcacacctgtaatcctagctactcgggaggctgaggcaggagaattgcttgaacccaggaggcggaggtagtggtgagcaaagatcgtaccgctgcactccagcctgggtgatagagcaagaccctatctcaaaaaaaaaaaaaaaaaaaaaaaaagaagccaaaaggccctgcagcaaatcagcaatagacccagcagccaatcctgttttaacatcgaatgtttaacactcaacttcagaccttgaatgattgactgaaaatggaagctcccatgttggggttactcaaggtccttattggttcttcagcattttgtggctataaatatttttaaataacagttgtattgagatataattcacagaccataaaattcacccaactaaagtatacattttaaaagtttttaggccgggcacggtggcttacgcctgtaattccaacactttgggaggctgaggcaggcagatcacctgaggtcaggagttcgagaccagtctggccaacatgatgaaaccccgtctctgctaaaaatacaaaaattagccgggcatggtggtgcacgcctgtagtcccagctacttgggaggctgaggcaggagaatcacttgaacctgggaggcggaggttgcagtgagtcaagatcatgccattgcactccagcctgggtgacagagtgagatcctgtctcaaaaaaaaaaaaaaaaaatttttttagtatatccacagagttgtgcaaccatcaattttagaacattttcatcacaaattttgtgcctgtaatagtttcctagagctgtttcttaacgaagtaccacaagctgggtggcttaagacaacagaaatgtattcctggccgggtgcagtggctcacgcctg

SEQ ID NO: 3254 - DNA, 2652 bp, Homo Sapiens
  NM_012092
cgagagcctgaattcactgtcagctttgaacactgaacgcgaggactgttaactgtttctggcaaacatgaagtcaggcctctggtatttctttctcttctgcttgcgcattaaagttttaacaggagaaatcaatggttctgccaattatgagatgtttatatttcacaacggaggtgtacaaattttatgcaaatatcctgacattgtccagcaatttaaaatgcagttgctgaaaggggggcaaatactctgcgatctcactaagacaaaaggaagtggaaacacagtgtccattaagagtctgaaattctgccattctcagttatccaacaacagtgtctctttttttctatacaacttggaccattctcatgccaactattacttctgcaacctatcaatttttgatcctcctccttttaaagtaactcttacaggaggatatttgcatatttatgaatcacaactttgttgccagctgaagttctggttacccataggatgtgcagcctttgttgtagtctgcattttgggatgcatacttatttgttggcttacaaaaaagaagtattcatccagtgtgcacgaccctaacggtgaatacatgttcatgagagcagtgaacacagccaaaaaatctagactcacagatgtgaccctataatatggaactctggcacccaggcatgaagcacgttggccagttttcctcaacttgaagtgcaagattctcttatttccgggaccacggagagtctgacttaactacatacatcttctgctggtgttttgttcaatctggaagaatgactgtatcagtcaatggggattttaacagactgccttggtactgccgagtcctctcaaaacaaacaccctcttgcaaccagctttggagaaagcccagctcctgtgtgctcactgggagtggaatccctgtctccacatctgctcctagcagtgcatcagccagtaaaacaaacacatttacaagaaaaatgttttaaagatgccaggggtactgaatctgcaaagcaaatgagcagccaaggaccagcatctgtccgcatttcactatcatactacctcttctttctgtagggatgagaattcctcttttaatcagtcaagggagatgcttcaaagctggagctattttatttctgagatgttgatgtgaactgtacattagtacatactcagtactctccttcaattgctgaaccccagttgaccattttaccaagactttagatgctttcttgtgccctcaattttctttttaaaaatacttctacatgactgcttgacagcccaacagccactctcaatagagagctatgtcttacattctttcctctgctgctcaatagttttatatatctatgcatacatatatacacacatatgtatataaaattcataatgaatatatttgcctatattctccctacaagaatatttttgctccagaaagacatgttcttttctcaaattcagttaaaatggtttactttgttcaagttagtggtaggaaacattgcccggaattgaaagcaaatttattttattatcctattttctaccattatctatgttttcatggtgctattaattacaagtttagttctttttgtagatcatattaaaattgcaaacaaaatcatctttaatgggccagcattctcatggggtagagcagaatattcatttagcctgaaagctgcagttactataggttgctgtcagactatacccatggtgcctctgggcttgacaggtcaaaatggtccccatcagcctggagcagccctccagacctgggtggaattccagggttgagagactcccctgagccagaggccactaggtattcttgctcccagaggctgaagtcaccctgggaatcacagtggtctacctgcattcataattccaggatctgtgaagagcacatatgtgtcagggcacaattccctctcataaaaaccacacagcctggaaattggccctggcccttcaagatagccttctttagaatatgatttggctagaaagattcttaaatatgtggaatatgattattcttagctggaatattttctctacttcctgtctgcatgcccaaggcttctgaagcagccaatgtcgatgcaacaacatttgtaactttaggtaaactgggattatgttgtagtttaacattttgtaactgtgtgcttatagtttacaagtgagacccgatatgtcattatgcatacttatattatcttaagcatgtgtaatgctggatgtgtacagtacagtactgaacttgtaatttgaatctagtatggtgttctgttttcagctgacttggacaacctgactggctttgcacaggtgttccctgagttgtttgcaggtttctgtgtgtggggtggggtatggggaggagaaccttcatggtggcccacctggcctggttgtccaagctgtgcctcgacacatcctcatccccagcatgggacacctcaagatgaataataattcacaaaatttctgtgaaatcaaatccagttttaagaggagccacttatcaaagagattttaacagtagtaagaaggcaaagaataaacatttgatattcagcaactgaaaaaaaaaaa

SEQ ID NO: 3255 - DNA, 3937 bp, Homo Sapiens
  NM_012093
agtcttccagcagggttctgaaagcagcctgctcccatcgcgcccctcggatgtggacacccagggtgggctgcagaccgcggccgggccgcactctctgggggcgagggccaggtcaggtggctgcactgtcgcccagcagcgagtaaagactcgaaactgagggagccagagccctagtcactctgctggtcgagggtcggaaccgctgggggaaagaggaaatgtggacgaaggcagcccttcctggagacagcttggaagagagggatgaagatgcaaaaagcaaaacccaacctatcaagtgccacctccccggtgacaggcccccagccttgctctgcgctttcgctgaatgaactcctgagcacgtttttcccgttgcctaggaagggttgggccgcaggtttcgccagtgctcgacaacccacctggagatagcgggtcggggagggagctgcgaggggggcggactcctgttgctcagtcttcagaccgcagcacagcatcatctgcaccgggacccgggaatggggggacacttggagactgagagagaggaggctcgaggaatgaaccttggtctgttctaagccacaacccctgtctcaggtcgtttggcttcctttccttctctttgtatttgaatttaaaaacattcctgaatctcaagtgcttttgcttgaagtaggggggaggaggagaaaagaatagaagcaagccaggcttcctaagcgagctctgaaaggagaaatccattcactgcaaacctcgttccccatttctgaaaacggatagactgatatcgtaaactaaaggtcatgagggtttttccccccggtttgggggatttgttctgttaaaaggaattttaaagcaccacttgagaaaataattttgcctcagtttccctaaactatctttaaaatgggttgccataattacaggtcttcttttctctcacctctataagccaccgttttcaggtcatctgaagtcaagatttccagccttttgaatggactgatgtgttctaagcccgaagatccagtagaatacttggaaagttgtttacaaaaagtaaaggaactgggtggctgtgacaaggtgaaatgggatacatttgtaagccaggaaaagaagaccttacctccactaaatggaggacagtcacggagatcctttctaagaaatgtaatgcctgaaaactcaaactttccatatcggcggtatgaccggctccctccaatccatcaattctccatagaaagtgacacggatctctctgagactgcagagttgattgaggagtatgaggtttttgatcctaccagacctcgaccaaaaatcattcttgttataggtggtccaggaagtggaaagggtactcagagtttgaaaattgcagaacgatatggattccaatacatttctgtgggagaattattaagaaagaagatccacagtaccagcagcaataggaaatggagtcttattgccaagataattacaactggagaattggccccacaggaaacaacaattacagagataaaacaaaaattgatgcaaatacctgatgaagagggcattgttattgatggatttccaagagatgttgcccaggctctatcttttgaggaccaaatctgtacccccgatttggtggtattcctggcttgtgctaatcagagactcaaagaaagattactgaagcgtgcagaacagcagggccgaccagacgacaatgtaaaagctacccaaaggagactaatgaacttcaagcagaatgctgctccattggttaaatacttccaggaaaaggggctcatcatgacatttgatgccgaccgcgatgaggatgaggtgttctatgacatcagcatggcagttgacaacaagttatttccaaacaaagaggctgcagcaggttcaagtgaccttgatccttcgatgatattggacactggagagatcattgatacaggatctgattatgaagatcagggtgatgaccagttaaatgtatttggagaggacactatgggaggtttcatggaagatttgagaaagtgtaaaattattttcataattggtggtcctggctctggcaaaggcacacagtgtgaaaagctggtggaaaaatatggatttacacatctctcaactggcgagctcctgcgtgaggaactggcatcagaatctgaaagaagcaaattgatcagagacattatggaacgtggagacctggtgccctcaggcatcgttttggagctcctgaaggaggccatggtggccagcctcggggacaccaggggcttcctgattgacggctatcctcgggaggtgaagcaaggggaagagttcggacgcaggattggagacccacagttggtgatctgtatggactgctcggcagacaccatgaccaaccgccttctccaaaggagccggagcagcctgcctgtggacgacaccaccaagaccatcgccaagcgcctagaagcctactaccgagcgtccatccccgtgatcgcctactacgagacaaaaacacagctacacaagataaatgcagagggaacaccagaggacgtttttcttcaactctgcacagctattgactctattttctgaaggcaaaaatgcatgtttgttagaatggaaacagaaaaacattaaaaagttcattccttaacacaatgtttcaagttaaaccttttgtgtcaccgcccccaccaaccaccacctcctaaatcctgacagcactgtttgcttcccagctagacctgtgtgagaggtgtctggaaatcatgcatggtgtatttgggactatatcaacctattctccacacttcagacaactgtctgcactcacggcacacacactttgtatcatgcaggccacactcagagctagtcagtacatgaacagtggtgcggtgccagtctgtgtccgttgtgatcacaggccttgctagaccctgatcatctggttctcctctcattaagcatccctaacccccagtcacaccttcctcttacatactgttccccaatggaggcccctggcataggggacagccctgggcatcttcctttggtgtctggctgttttgtcaactctcatccactggtggctcagagccataaggtgggttgattacacaatgccttgtacatgatatagaggcatcaagcaagtaaaatttgacagaaattttaaaatatgaagatgtatagctttcccaagatgatggtaaaacccaggttagtcatcagtaaccttctctattattattattttttagaaacttggaatactgtcgtcatggctaagagaacaaatctgataaattgtgtaacctagtctcttctctacatggtgatgcatttcagcaattataaattaatataaatgaccaaaagtaacttaaaagcatgagatatttgctatttcattcattgggcacatatcaaattataattttgattttaaatggtcacccatgtatttatttgttgccaagcaagtaaaaaaataccctaacaaacctgatgtgggtgggaggggcatgtcagtaagtggtgtgttcaatgtgtttgtttcatatgggccctttccaggagtttgcaaaccttgtcatacccatatgcaaaactgtgtttccttgcattaaaccagtgaagtttgggttctcttttgtgctatcaatcagttgtaaaatcagagctgcttatatattctactggaataactgcatcttccactcagtcactacaaaaaagcatagtttcagtttgcatgaatttttttttttttcttcaatggctgtgcagataaggatccatttctgggatagaattgtattttttaagtcatttttttttcttgaaatggatatgtacaaataaaataaatggaagacaggataaa

SEQ ID NO: 3256 - DNA, 959 bp, Homo Sapiens
  NM_012094
gcagtggaggcggcccaggcccgccttccgcagggtgtcgccgctgtgccgctagcggtgccccgcctgctgcggtggcaccagccaggaggcggagtggaagtggccgtggggcgggtatgggactagctggcgtgtgcgccctgagacgctcagcgggctatatactcgtcggtggggccggcggtcagtctgcggcagcggcagcaagacggtgcagtgaaggagagtgggcgtctggcggggtccgcagtttcagcagagccgctgcagccatggccccaatcaaggtgggagatgccatcccagcagtggaggtgtttgaaggggagccagggaacaaggtgaacctggcagagctgttcaagggcaagaagggtgtgctgtttggagttcctggggccttcacccctggatgttccaagacacacctgccagggtttgtggagcaggctgaggctctgaaggccaagggagtccaggtggtggcctgtctgagtgttaatgatgcctttgtgactggcgagtggggccgagcccacaaggcggaaggcaaggttcggctcctggctgatcccactggggcctttgggaaggagacagacttattactagatgattcgctggtgtccatctttgggaatcgacgtctcaagaggttctccatggtggtacaggatggcatagtgaaggccctgaatgtggaaccagatggcacaggcctcacctgcagcctggcacccaatatcatctcacagctctgaggccctgggccagattacttcctccacccctccctatctcacctgcccagccctgtgctggggccctgcaattggaatgttggccagatttctgcaataaacacttgtggtttgcggccaaaaaaaaaaaaaaaaaaaaaaaaaaaaaaaaaaaaaaaaaaaaaaaaaaaaaaaaaaaaaaaaaaaaaaaaaaaa

SEQ ID NO: 3257 - DNA, 5144 bp, Homo Sapiens
  NM_012095
catgagggaccccagactgcgttaggcagcagatgaccgcctgaatctagatggagagaaacccaccatttttctaggccctggattatgtagaagatttagatactaagcctcaagagacgtctttcctctcatttacggtcttcctgcatatttaaaatttctaatacggtagacagagtcggtgtctttgaagctgttaatcaggcaatttcctgggcactccagctgcgggtcctcgcggccttctcggcttctccagcttcggtaggagaggatccggcgccgaatcactgactggcacaggtgttgggaaaatgatccacagtctatttctcataaactgttccggtgacatatttctagagaagcactggaagagcgttgtgagccagtctgtctgtgattatttctttgaagctcaagagaaagctgctgatgttgaaaatgtaccacctgtcatttcaacacctcaccactacctcatcagtatctaccgggataagctcttctttgtatctgtcatacagaccgaagtgccacctctctttgtaattgagttcctacatcgagttgctgacacttttcaggactactttggtgagtgttcagaggctgcaattaaggataatgtggtcatagtatatgaactcttagaagaaatgttagacaatggatttccactggctaccgaatctaacattttgaaagaattgattaaaccaccaacaattctacgctctgttgtcaactctattacaggcagtagtaatgttggggacacactccccaccgggcagctgtccaacataccatggcgtcgggcaggggtaaagtacacaaacaatgaagcctattttgatgttgttgaagaaatagacgcaattatagataaatcaggatctacagtctttgcagaaattcagggggtcattgatgcttgcattaaactatctggaatgcctgatctctccctttctttcatgaaccctaggcttctggatgatgtcagctttcacccctgcatccggttcaagcgttgggaatctgaaagagttttgtcatttattcctccagatggaaatttccgactcatatcataccgtgtcagctcacaaaatctagtggcaataccagtgtatgtgaaacatagtatcagctttaaggagaacagttcttgcggcagatttgatataacaattggaccaaagcagaatatggggaaaactattgaaggaattacagtgacagttcacatgccaaaagttgtgctgaacatgaacctgacacccacacaaggcagctatacatttgatccagtcaccaaggtactaacatgggatgtgggaaaaattactccacaaaagctcccaagtcttaaaggactggtaaatttacagtctggagcccccaaaccagaagagaatccgagcctcaacatacagtttaagatccagcagcttgctatttcaggcttaaaagtaaaccgtttggacatgtatggggagaaatataagccatttaaaggagtcaaatacgtcacgaaagctggaaagttccaagtgaggacatgagaagaggccaaaattcctcaggaccagtttgttttccaagtgtcattacgatgtatcactattaggtaccaagtgagtgggaatacatattctagttaaagcatttgtgtctagctacacaccgctaacaaagttacttagttatcaatgtaggattcttaaggagctttaagctaaggaaaccttttagtgacttagcttattttgtatcttttcacttaggaagattttggaggtgatttttttccataggaggataccatctggcggctgcacattgtaacagtaaaggcagaaagctgtagtgataacctctctcctaaaagagttaactggtctcatccagcagaagctatcttaaatctgtgatgtgtcaggtgcagccaaatatcacaccttctgatcttagccatcccaaaccagtatctgtcccgagaggaaattccccccacccccagaagtttacagaaaactgcctcttcaagtgtttgccttattcagcttttcacttgtgccattaagcaagcactgtagcaaaagccacttccacatggccctggcagggagcactgctgctccatgctccattctcactgtacttggtattgtattttttataaataagatttttatgtaaagcttagaatttgatttacagggaccttgctgcagtaaataccatctcaattttgtgccactggttcagctgttagcacagtaaaaaaatcatttgtatcaaaggggcaaatgctttattaaggtagtaaaagggaacattacttctgcttttaggaagttactgcaagcacaagcatttgtgcttttaagcaaattaaagtagtaaaagaaaaacttaagtgaaacctttgccatcttcatgttttataatataaagcttacccaacaccagttaagccatggttaacctaaatgcctcatgccccagttcagcaaaaggaggaaaatgtgcctgcctcacagtcatcagtctttttaaatcttttttgttgttgttcttaagggtttgaatttgtctgcattccttgtctttaggggaaattcccttttcatattgtgtgcttcccaaagctatagtcatagatttcttccagaaactattgtcataattgtcactggagtgcttaaatatacgtactatactgacaaaatacatggaagtgagttataatgaggcagaaacaaaatcctcggtaacattgatgatactctaccgatcaccgtggttttggaaagtcagtcaacagttgtattattgcactcaatttcattgtgacattttatttaacttcttcatcttggtggtccttgcccagttattttgcctcattagacatcaagaaatggagaaagactgaaagttaatatcttaagtgcttgttcttcatgtttccttcttgttatttatgctattctctttgtggctccattcttctttcaatcttctcagcttataaccgtctttcccttatgctaaggatagcccttacactcatcccatctatgctgtcaagggctgctggttggtgctggtacaaggagcccactcagcagttttcttacctttgcctgccctgcctttcatggaataagaaaggcaacgttttgcagcttccaaatttctgaagaaactaatctcagattggcagttaaagtcaaaatgttgccaaatatttattccttttgcctaagtttggctacccggttcaattgctttttatttttaatgtcttgactcttcagagttcgtacctcaaaagaacaatgagaacatttgctttgctttctgctgaatccctaatctcaacaatctatacctggactgtccagttctcctcctgtgctatcttctcttctatccaagtagaatgtacgccaggagctccttccctctagcaatttctactaaaatgtccaagtagaatgtttccttttacaatcaaattactgtatttattaatttgctagaatccagtaaatcattttggtagctctggctgtgctatcaataaaaagatgaaagcaacaagttgattttttttaggtctactattgattgaacattctccaatgggcaaggctcattgtcaaagcagggtgaacatgatcagattttcttctgcatcatcacacaagctgcgagtgttgctgcaaagcacttctcagtactccttccctaacctcagtatgttaatagccattcatacttggcttaagcatcaccattctggccacagtctgagagattagtgatcaaagctcccttccctatcactaccaccacctactgataacaaagatttctgaatacttagtagtagtaaaatatttttcaagcacagagttacagctaatcctggatcacttgttctaaattcataagggagtatatcaagagcaaatgaagtaaatgattctttcctgcgtgtgggagtcaccatcattttattcaaagggagttcctgtgataggttcattccttaagtggtgctacagaaggaccctaggaaaatgctgatcttgtcctgagaggcaactgatttgagaaaatgattatactacagcaggaaggcagcaccagtgaacatatggtaaatggcaaaaacaagacagttttagaaactgctaattcagtagcagccttggcctttcccttaactcaagcaggctggaatctgtctttatagtcggcaactttccaagataaagcagtgataatagcagttggcaacactaaatatcaatatcatcaccctttaatgacatgttacccctttcagatctagaaaatcagggaaaaagtgatgtcccaactctactctaaaaacctgctcctactattttagtcagtgtttctttaaggaagaagaggactatgtccccaaaagctaactctgttttatagccctggtggatccctgaaaaccctatttattctatactgggctttggaatatgaaaaatggacctgtgtggccgggcgtggtggatcacacctgtaatcccagcactttgggaggtcaaggtgggcggatcacttgaggtcaggagttcgagaccagcctggccaacatggtgaaactccatctctactaaaaatacaaaaattagccaggcatggtggcgcacacctgtaatcccagctacatgggaggctgaggcaggagaattgcttgaacccgggaggcagaggttgcagtgagctgagattgcaccactgcactgcagcctgggcaacagagcaagtctctgtcttgcagcagggggaaggacctgtggtactcctacaaacttaacaactttagcttttcggggaacagtggtggtctccacagatagctagaatcttctaagatgaaaataaactgtttcatccagctgctttctgcctgttaacctttgccacttccattccttcaagtgtgtaatccccagggttgtcttgtattacacacatccttgttaagtaaatataccactgttgatttcttcttccagtgcaacatttggattaaataaaaatctttagtttccaaaaaaaaaaaaaaaaaa

SEQ ID NO: 3258 - DNA, 2438 bp, Homo Sapiens
  NM_012100
aaacatggggcggggcggcgcggccggggaagcgtgatgaaggcctacgagtgcggcgcggcctgaaggggcacgcgggggacctgcaaagctagtgaggggcggggcaggcggcgcggtgggggcgggccgagcccggaggccagatgagcggacacagccccacgcgcggggccatgcaggtggccatgaacggtaaggcccgcaaagaggcggtgcagactgcggctaaggaactcctcaagttcgtgaaccggagtccctctcctttccatgctgtggctgaatgccgcaaccgccttctccaggctggcttcagtgaactcaaggagactgagaaatggaatattaagcccgagagcaagtacttcatgaccaggaactcctccaccatcatagcttttgctgtagggggccagtacgttcctggcaatggcttcagcctcatcggggcccacacggacagcccctgcctccgggtgaaacgtcggtctcgccgcagccaggtgggcttccagcaagtcggtgtggagacctatggtggtgggatctggagcacctggtttgaccgtgacctgactctggctggacgcgtcattgtcaagtgccctacctcaggtcggctggagcagcagctggtgcacgtggagcggcccattcttcgcatcccacacctggccatccatctgcagcgaaatatcaacgagaactttgggcccaacacagagatgcatctagtccccattcttgccacagccatccaggaggagctggagaaggggactcctgagccagggcctctcaatgctgtggatgagcggcaccattcggtcctcatgtccctgctctgtgcccatctggggctgagccccaaggacatagtggagatggagctctgccttgcagacacccagcctgcggtcttgggtggtgcctatgatgagttcatctttgctcctcggctggacaatctgcacagctgcttctgtgccctgcaggccttgatagattcctgtgcaggccctggctccctggccacagagcctcacgtgcgcatggtcacactctatgacaacgaagaggtggggtctgagagtgcacagggagcacagtcactgctgacagagctggtgctgcggcggatctcagcctcgtgccagcacccgacagccttcgaggaagccatacccaagtccttcatgatcagcgcagacatggcccatgctgtgcatcccaactacctggacaagcatgaggagaaccaccggcctttattccacaagggccccgtgatcaaggtgaacagcaagcaacgctatgcttcaaacgcggtgtcagaggccctgatccgagaggtggccaacaaagtcaaggtccccctgcaggatctcatggtccggaatgacaccccctgtggaaccaccattggacctatcttggcttctcggctggggctgcgggtgctggatttaggcagcccccaactggccatgcactctatccgggagatggcctgcaccacaggagtcctccagaccctcaccctcttcaagggcttctttgagctgttcccttctctaagccataatctcttagtggattgagccctcttggaaagacttctctgccatccctttgcacctgagaggggaagttctcagctgagctgaagctggattattaaagtggattgtcactcagactctccgtgctacgcttatttggagactagaggagtgggagttgagcctggcttgaacctttggaaccagaaaagttggggagcaggtggaggaggccacactcctgggagctgatggttttaaatctggttttaaatctcttctctgtctcaagtccatgtctgaagtgggtgaagggtggactggatcctcaagcagaaggtcacttctcccacccctagtcctccacctgggaaatggcctcaacggtcttccctctttccatccccagaatgggtgtcccgctctgccttcagagatcctgttctgcactgggccaccttcagagctgctctgggcagacaaagctgtttctcaccctcccaaaatcccttcccatcccctctcaggagctgcaaagagaagggcacagtctataccttatcacccttcatcatccacttctcagcagtccctggtattacttgattgtgaacatattatcaggaaaaaagattatcattgaaaaaattggaaaagtcaaagtctggccgggtgcagcggctcacatctgtattcccagcattttgggaggccaaggcaggtggatcacttgaggtcagagttcaagaccagccttgccaacatggtgaaacccatctctacttaaaaaaaaatacaaaaaaattagccaggcatggtggcacacacctgtaatctcagctattcaggagactgaggcaggagaatagcttg

SEQ ID NO: 3259 - DNA, 3037 bp, Homo Sapiens
  NM_012101
ctcctcacaggtgtgtctctagtcctcgtggttgcctgccccactccctgccgagacgcctgccagaaaggtcacctatcctgaaccccagcaagcctgaaacagctcagccaagcaccctgcgatggaagctgcagatgcctccaggagcaacgggtcgagcccagaagccagggatgcccggagcccgtcgggccccagtggcagcctggagaatggcaccaaggctgacggcaaggatgccaagaccaccaacgggcacggcggggaggcagctgagggcaagagcctgggcagcgccctgaagccaggggaaggtaggagcgccctgttcgcgggcaatgagtggcggcgacccatcatccagtttgtcgagtccggggacgacaagaactccaactacttcagcatggactctatggaaggcaagaggtcgccgtacgcagggctccagctgggggctgccaagaagccacccgttacctttgccgaaaagggcgagctgcgcaagtccattttctcggagtcccggaagcccacggtgtccatcatggagcccggggagacccggcggaacagctacccccgggccgacacgggccttttttcacggtccaagtccggctccgaggaggtgctgtgcgactcctgcatcggcaacaagcagaaggcggtcaagtcctgcctggtgtgccaggcctccttctgcgagctgcatctcaagccccacctggagggcgccgccttccgagaccaccagctgctcgagcccatccgggactttgaggcccgcaagtgtcccgtgcatggcaagacgatggagctcttctgccagaccgaccagacctgcatctgctacctttgcatgttccaggagcacaagaatcatagcaccgtgacagtggaggaggccaaggccgagaaggagacggagctgtcattgcaaaaggagcagctgcagctcaagatcattgagattgaggatgaagctgagaagtggcagaaggagaaggaccgcatcaagagcttcaccaccaatgagaaggccatcctggagcagaacttccgggacctggtgcgggacctggagaagcaaaaggaggaagtgagggctgcgctggagcagcgggagcaggatgctgtggaccaagtgaaggtgatcatggatgctctggatgagagagccaaggtgctgcatgaggacaagcagacccgggagcagctgcatagcatcagcgactctgtgttgtttctgcaggaatttggtgcattgatgagcaattactctctccccccacccctgcccacctatcatgtcctgctggagggggagggcctgggacagtcactaggcaacttcaaggacgacctgctcaatgtatgcatgcgccacgttgagaagatgtgcaaggcggacctgagccgtaacttcattgagaggaaccacatggagaacggtggtgaccatcgctatgtgaacaactacacgaacagcttcgggggtgagtggagtgcaccggacaccatgaagagatactccatgtacctgacacccaaaggtggggtccggacatcataccagccctcgtctcctggccgcttcaccaaggagaccacccagaagaatttcaacaatctctatggcaccaaaggtaactacacctcccgggtctgggagtactcctccagcattcagaactctgacaatgacctgcccgtcgtccaaggcagctcctccttctccctgaaaggctatccctccctcatgcggagccaaagccccaaggcccagccccagacttggaaatctggcaagcagactatgctgtctcactaccggccattctacgtcaacaaaggcaacgggattgggtccaacgaagccccatgagctcctggcggaaggaacgaggcgccacacccctgctcttcctcctgaccctgctgctcttgccttctaagctactgtgcttgtctgggtgggagggagcctggtcctgcacctgccctctgcagccctctgccagcctcttgggggcagttccggcctctccgacttccccactggccacactccattcagactcctttcctgccttgtgacctcagatggtcaccatcattcctgtgctcagaggccaacccatcacaggggtgagataggttggggcctgccctaacccgccagcctcctcctctcgggctggatctgggggctagcagtgagtacccgcatggtatcagcctgcctctcccgcccacgccctgctgtctccaggcctatagacgtttctctccaaggccctatcccccaatgttgtcagcagatgcctggacagcacagccacccatctcccattcacatggcccacctcctgcttcccagaggactggccctacgtgctctctctcgtcctacctatcaatgcccagcatggcagaacctgcagcccttggccactgcagatggaaacctctcagtgtcttgacatcaccctacccaggcggtgggtctccaccacagccactttgagtctgtggtccctggagggtggcttctcctgactggcaggatgaccttagccaagatattcctctgttccctctgctgagataaagaattcccttaacatgatataatccacccatgcaaatagctactggcccagctaccatttaccatttgcctacagaatttcattcagtctacactttggcattctctctggcgatggagtgtggctgggctgaccgcaaaaggtgccttacacactgcccccaccctcagccgttgccccatcagaggctgcctcctccttctgattaccccccatgttgcatatcagggtgctcaaggattggagaggagacaaaaccaggagcagcacagtggggacatctcccgtctcaacagccccaggcctatgggggctctggaaggatgggccagcttgcaggggttggggagggagacatccagcttgggctttcccctttggaataaaccattggtctgtcaaaaaaaaaaaaaaaaaaa

SEQ ID NO: 3260 - DNA, 2100 bp, Homo Sapiens
  NM_012106
agtcaccgaggcccggacctgcggcgtcggcggcgcgcgcagagggccaggcgggcgtagaggccggaccgacgcgtggcggcagagggtatccaaggccggacctggcgcgcaggcgctgacccgacctggcagtgagctggccgcggccttggctgagaggccttaaccccgccgggcggccgcgccctgcatgcgagttgggccgcgggcggggttggagcctactcggggcgactgcgatggacgccttagaaggagagagctttgcgctgtctttctcctccgcctctgatgcagaatttgatgctgtggttggatatttagaggacattatcatggatgacgagttccagttattacagagaaatttcatggacaagtactacctggagtttgaagacacagaagagaataaactcatctacacacctatttttaatgaatacatttctttggtagaaaaatacattgaagaacagctgctgcagcggattcctgagttcaacatggcagccttcaccacaacattacagcaccataaggatgaagtggctggtgacatattcgacatgctgctcaccttcacagattttctggcttttaaagaaatgtttttggactacagagcagaaaaagaaggccgaggactggacttaagcagtggcttagtggtgacttcattgtgcaaatcatcttctctgccagcttcccagaacaatctgcggcactaggtcctacctccagccaatgaatgggatcattctggatgtcaccagcccaataggctcagctcatgatgacagaacacatcttggaaagactgactctgttatgtaactcttcatttatgttaagtattaataggtcaaaaccaaaatgacctaaccctcctggacctatttatcctgaaacaccttcttgtattcattaaccatagtactcctccccacctcaagtagacacctctctcaggagcttctgagtcagacgcctctggagcgagccctatgtcaggcactccacctggggggcccttccccagcatacctgctggtgtgtaagtgtggactaacccgccgccaccaccctctgttccagcaggctctgcatgaatctttgtgcacttgcacctctttttcacatgggccacagtttcagtacttcagcctcagtggggttcctgatgtttatctagggtgttactcaagcccagtttgagattttggagtctcctgtgatcacatcttgtctcggctgtaggaatcaacagaaggagacgtcctctacataaaagctccatgtgaaaagctactcctagtcttaacatttgcagtccttgtgtcactgtcttctggtcctgatgtagtcccactgtttctagaagtctcttttaagcattatttttgaaaaaaaaaatatttttatagatgaatactcaggctaacctagtggatgtgatcttggaacttccatgattatccacttaaagatcaaagtattatatgctgtgtgctttttaggtgtttgttagtactgtgaaggcaaaaatgctttctacattgacattcattcctattttactgggcacctatgaatgtatgctgtgtgctagaaatagactaaaacatattcctatagcatgttagtgtgtttgcatgtttgctgaaaatcctttgtgtataaaccagtttgtaaggttctctgggttaggtagggactctgcagtttcttcctgtcaaaatctctcctaccaagatggtgttccactgtccagcccagcatgagtagcaggtagagcacagctttactggctgtttgtatgctttggtttagtgcaatgtgtggtagattacttatcagaaaacatatatgtcatctctagaacgaagaaaaagcatagtagttcaattcccagtgtgtccctttgattttttttttttaatagtaaaaataagaatctgtactgacttttcacttggccattctggttttaaaggacaagctacaagctctgtgtttctgtactgatgtgtcacttattaaatacttttgtaccatgagtaaaacttcaggtgtttcgcaagaaccaccattctc

SEQ ID NO: 3261 - DNA, 1151 bp, Homo Sapiens
  NM_012110
ctcgggctgttgctgtggtttcctgagttgctgctgctgcggcggcggcagcggcgtctgtgcttgtggaggtgtcggcctctgggcggatgttgacattgtgttgttgttattgctgatggtaatggcggcggcggtggcggcgacggtccagaccccatcccctctgtagccggagccgagacagccgacagcgaactccgcggcctcggagccggcggcagcggcgactcccctcagcctccgccgcctcgcccgccggtaccccggcgccaaccccgggagtcaggccctttgggcaggggagctcggaggctcaggatggcggatttcgacgaaatctatgaggaagaggaggacgaggagcgggccctggaggagcagctgctcaagtactcgccggacccggtggtcgtccgcggctccggtcacgtcaccgtatttggactgagcaacaaatttgaatctgaattcccttcttcattaactggaaaagtagctcctgaagaatttaaagccagcatcaacagagttaacagttgtcttaagaagaaccttcctgttaatgtacgttggctactttgtggctgcctttgttgctgctgcacattaggttgcagtatgtggccagttatttgcctcagtaaaagaacacgaagatcgattgagaagttattagaatgggaaaacaataggttataccacaagctgtgcttgcattggagactgagcaaaaggaaatgtgaaacgaataacatgatggaatatgtcatcctcatagaatttttaccaaagacaccgatttttcgaccagattagcatttactttatttatagagactttccaagtatgttgtctttccaatggtgccttgcttggtgctctcctggtggtgacataacattggttctacagaatcgtgtggtgttttttttgtttttgttttttttttttttttaaataaccgcatgttctaagtgtgcatttttgtcaatctttgcaacagttatttcatacagatgtttaatacttaagttattgtgctcttttctgttatgtattctgattttcaaggattacttttttgtattatcaaaaaaatacatttgaacttagcataaaaaaaaaaaaaaaaaaaaaaaaaaaaaaa

SEQ ID NO: 3262 - DNA, 3685 bp, Homo Sapiens
  NM_012112
agtggactcacgcaggcgcaggagactacacttcccaggaactccgggccgcgttgttcgctggtacctccttctgacttccggtattgctgcggtctgtagggccaatcgggagcctggaattgctttcccggcgctctgattggtgcattcgactaggctgcctgggttcaaaatttcaacgatactgaatgagtcccgcggcgggttggctcgcgcttcgttgtcagatctgaggcgaggctaggtgagccgtgggaagaaaagagggagcagctagggcgcgggtctccctcctcccggagtttggaacggctgaagttcaccttccagcccctagcgccgttcgcgccgctaggcctggcttctgaggcggttgcggtgctcggtcgccgcctaggcggggcagggtgcgagcaggggcttcgggccacgcttctcttggcgacaggattttgctgtgaagtccgtccgggaaacggaggaaaaaaagagttgcgggaggctgtcggctaataacggttcttgatacatatttgccagacttcaagatttcagaaaaggggtgaaagagaagattgcaactttgagtcagacctgtaggcctgatagactgattaaaccacagaaggtgacctgctgagaaaagtggtacaaatactgggaaaaacctgctcttctgcgttaagtgggagacaatgtcacaagttaaaagctcttattcctatgatgccccctcggatttcatcaatttttcatccttggatgatgaaggagatactcaaaacatagattcatggtttgaggagaaggccaatttggagaataagttactggggaagaatggaactggagggctttttcagggcaaaactcctttgagaaaggctaatcttcagcaagctattgtcacacctttgaaaccagttgacaacacttactacaaagaggcagaaaaagaaaatcttgtggaacaatccattccgtcaaatgcttgttcttccctggaagttgaggcagccatatcaagaaaaactccagcccagcctcagagaagatctcttaggctttctgctcagaaggatttggaacagaaagaaaagcatcatgtaaaaatgaaagccaagagatgtgccactcctgtaatcatcgatgaaattctaccctctaagaaaatgaaagtttctaacaacaaaaagaagccagaggaagaaggcagtgctcatcaagatactgctgaaaagaatgcatcttccccagagaaagccaagggtagacatactgtgccttgtatgccacctgcaaagcagaagtttctaaaaagtactgaggagcaagagctggagaagagtatgaaaatgcagcaagaggtggtggagatgcggaaaaagaatgaagaattcaagaaacttgctctggctggaatagggcaacctgtgaagaaatcagtgagccaggtcaccaaatcagttgacttccacttccgcacagatgagcgaatcaaacaacatcctaagaaccaggaggaatataaggaagtgaactttacatctgaactacgaaagcatccttcatctcctgcccgagtgactaagggatgtaccattgttaagcctttcaacctgtcccaaggaaagaaaagaacatttgatgaaacagtttctacatatgtgccccttgcacagcaagttgaagacttccataaacgaacccctaacagatatcatttgaggagcaagaaggatgatattaacctgttaccctccaaatcttctgtgaccaagatttgcagagacccacagactcctgtactgcaaaccaaacaccgtgcacgggctgtgacctgcaaaagtacagcagagctggaggctgaggagctcgagaaattgcaacaatacaaattcaaagcacgtgaacttgatcccagaatacttgaaggtgggcccatcttgcccaagaaaccacctgtgaaaccacccaccgagcctattggctttgatttggaaattgagaaaagaatccaggagcgagaatcaaagaagaaaacagaggatgaacactttgaatttcattccagaccttgccctactaagattttggaagatgttgtgggtgttcctgaaaagaaggtacttccaatcaccgtccccaagtcaccagcctttgcattgaagaacagaattcgaatgcccaccaaagaagatgaggaagaggacgaaccggtagtgataaaagctcaacctgtgccacattatggggtgccttttaagccccaaatcccagaggcaagaactgtggaaatatgccctttctcgtttgattctcgagacaaagaacgtcagttacagaaggagaagaaaataaaagaactgcagaaaggggaggtgcccaagttcaaggcacttcccttgcctcattttgacaccattaacctgccagagaagaaggtaaagaatgtgacccagattgaacctttctgcttggagactgacagaagaggtgctctgaaggcacagacttggaagcaccagctggaagaagaactgagacagcagaaagaagcagcttgtttcaaggctcgtccaaacaccgtcatctctcaggagccctttgttcccaagaaagagaagaaatcagttgctgagggcctttctggttctctagttcaggaaccttttcagctggctactgagaagagagccaaagagcggcaggagctggagaagagaatggctgaggtagaagcccagaaagcccagcagttggaggaggccagactacaggaggaagagcagaaaaaagaggagctggccaggctacggagagaactggtgcataaggcaaatccaatacgcaagtaccagggtctggagataaagtcaagtgaccagcctctgactgtgcctgtatctcccaaattctccactcgattccactgctaaactcagctgtgagctgcggataccgcccggcaatgggacctgctcttaacctcaaacctaggaccgtcttgctttgtcattgggcatggagagaacccatttctccagacttttacctacccgtgcctgagaaagcatacttgacaactgtggactccagttttgttgagaattgttttcttacattactaaggctaataatgagatgtaactcatgaatgtctcgattagactccatgtagttacttcctttaaaccatcagccggccttttatatgggtcttcactctgactagaatttagtctctgtgtcagcacagtgtaatctctattgctattgccccttacgactctcaccctctccccactttttttaaaaattttaaccagaaaataaagatagttaaatcctaagatagagattaagtcatggtttaaatgaggaacaatcagtaaatcagattctgtcctcttctctgcataccgtgaatttatagttaaggatccctttgctgtgagggtagaaaacctcaccaactgcaccagtgaggaagaagactgcgtggattcatggggagcctcacagcagccacgcagcaggctctgggtggggctgccgttaaggcacgttctttccttactggtgctgataacaacagggaaccgtgcagtgtgcattttaagacctggcctggaataaatacgttttgtctttccctcaaaaaaaaaaaaaaaaaaaaaaa

SEQ ID NO: 3263 - DNA, 2343 bp, Homo Sapiens
  NM_012119
gggggcgggggcagataggaggtgcctgctgtcatcgttccgtgggccctgctgcgggcacgctctcggcgcatgcgttttttatgcgggattaagcttgctgctgcgtgacagcggagggctaggaaaaggcgcagtggggcccggagctgtcacccctgactcgacgcagcttccgttctcctggtgacgtcgcctacaggaaccgccccagtggtcagctgccgcgctgttgctaggcaacagcgtgcgagctcagatcagcgtggggtggaggagaagtggagtttggaagttcaggggcacaggggcacaggcccacgactgcagcgggatggaccagtactgcatcctgggccgcatcggggagggcgcccacggcatcgtcttcaaggccaagcacgtggagactggcgagatagttgccctcaagaaggtggccctaaggcggttggaggacggcttccctaaccaggccctgcgggagattaaggctctgcaggagatggaggacaatcagtatgtggtacaactgaaggctgtgttcccacacggtggaggctttgtgctggcctttgagttcatgctgtcggatctggccgaggtggtgcgccatgcccagaggccactagcccaggcacaggtcaagagctacctgcagatgctgctcaagggtgtcgccttctgccatgccaacaacattgtacatcgggacctgaaacctgccaacctgctcatcagcgcctcaggccagctcaagatagcggactttggcctggctcgagtcttttccccagacggcagccgcctctacacacaccaggtggccaccaggtctgtgggctgcatcatgggggagctgttgaatgggtccccccttttcccgggcaagaacgatattgaacagctttgctatgtgcttcgcatcttgggcaccccaaaccctcaagtctggccggagctcactgagctgccggactacaacaagatctcctttaaggagcaggtgcccatgcccctggaggaggtgctgcctgacgtctctccccaggcattggatctgctgggtcaattccttctctaccctcctcaccagcgcatcgcagcttccaaggctctcctccatcagtacttcttcacagctcccctgcctgcccatccatctgagctgccgattcctcagcgtctagggggacctgcccccaaggcccatccagggcccccccacatccatgacttccacgtggaccggcctcttgaggagtcgctgttgaacccagagctgattcggcccttcatcctggaggggtgagaagttggccctggtcccgtctgcctgctcctcaggaccactcagtccacctgttcctctgccacctgcctggcttcaccctccaaggcctccccatggccacagtgggcccacaccacaccctgccccttagcccttgcgagggttggtctcgaggcagaggtcatgttcccagccaagagtatgagaacatccagtcgagcagaggagattcatggcctgtgctcggtgagccttaccttctgtgtgctactgacgtacccatcaggacagtgagctctgctgccagtcaaggcctgcatatgcagaatgacgatgcctgccttggtgctgcttccccgagtgctgcctcctggtcaaggagaagtgcagagagtaaggtgtccttatgttggaaactcaagtggaaggaagatttggtttggttttattctcagagccattaaacactagttcagtatgtgagatatagattctaaaaacctcaggtggctctgccttatgtctgttcctccttcatttctctcaagggaaatggctaaggtggcattgtctcatggctctcgtttttggggtcatggggagggtagcaccaggcatagccacttttgccctgagggactcctgtgtacttcacatcactgagcactcatttagaagtgagggagacagaagtctaggcccagggatggctccagttggggatccagcaggagaccctctgcacatgaggctggtttaccaacatctactccctcaggatgagcgtgagccagaagcagctgtgtatttaaggaaacaagcgttcctggaattaatttataaatttaataaatcccaatataatcccagctagtgctttttccttattataatttgataaggtgattataaaagatacatggaaggaagtggaaccagatgcagaagaggaaatgatggaaggacttacggtatcagataccaatatttaaaagtttgtataataataaagagtatgattgtggttcaaggataaaaaaaaaaaaaaa

SEQ ID NO: 3264 - DNA, 3121 bp, Homo Sapiens
  NM_012121
gccagagggaaacaaacgccggcgctgacaggggccgccagcccctccgccgcgcggagcccacgaaggggacagcgcagccggcccagagctcgggtctccggggaccgagccttatgatctcctcattgcgtccccctctgcccactggacttggacttcagatctgaccccagacctgccggctacctcgggagggcccacctccccgcccatccagcaagatgccaatcctcaagcaactggtgtccagctcggtgcactccaagcgccgttcccgagcggacctcacggccgagatgatcagcgccccgctgggcgacttccgccacaccatgcacgttggccgggccggagacgcctttggggacacctccttcctcaatagcaaggctggcgagcccgacggcgagtccttggacgaacagccctcttcttcatcttccaaacgcagtctcctgtccaggaagttccggggcagcaagcggtcacagtcggtgaccaggggggagcgggagcagcgtgacatgctgggctccctgcgggactcggccctgtttgtcaagaatgccatgtccctgccccagctcaatgagaaggaggccgcggagaagggcaccagtaagctgcccaagagcctgtcatccagccccgtgaagaaggccaatgacggggagggcggcgatgaggaggcgggcacggaggaggcagtgccccgtcggaatggggccgcgggtccacattcccctgaccccctcctcgatgagcaggcctttggggatctgacagatctgcctgtcgtgcccaaggccacgtacgggctgaagcatgcggagtccatcatgtccttccacatcgacctggggccctccatgctgggtgacgtcctcagcatcatggacaaggaggagtgggaccccgaggagggggagggtggttaccatggcgatgagggcgccgctggcaccatcacccaggctcccccgtacgccgtggcggcccctcccctggcaaggcaggaaggcaaggctggcccagacttgccctccctcccctcccatgctctggaggatgaggggtgggcagcagcggcccccagccccggctcagcccgcagcatgggcagccacaccacacgggacagcagctccctctccagctgcacctcaggcatcctggaggagcgcagccctgccttccgggggccggacagggcccgggctgctgtctcaagacagccagacaaggagttctccttcatggatgaggaggaggaggatgaaatccgtgtgtgaggcggacagtgggtggccaccgggagctcttggctgcatcttctccctgcccccaccccactatgacctttgaccctacggcgcaggggcagccaggacccttgattcagaccatggaccctggaccttgtagatgagggacactggcctggccctcgggtcttcggaggacgtagggggctggcatgggtgccgactggctgcctgacttcatcatgctccctgcacttaggctgcgtgggacaagggctgtgttgtcacagcaggaataggttttcctctgttggcctccctttcctccaccctggcctcaaatggatgccagatgccaaccccagttctggccacgtacagccagcgggtcagcccagaggcagcctcagctccagggctaaggactctcggctcccattttctctgctggcgtttctgctgtgcccagcagtggctgctggggaagcagctgcagcaggagggagacggtcttgcctctcagcccctccctgccccaccccagctcctgccctggaaatctggagccccttggagctgagctggacggggggccagctgcgagcatgtgcactaaacgcagccctttccaggggaagagaacaggatggagaatggaaggaaagccccccaggcttcgtgaattgcaagaagggacccttccaggatgacactaggaacagggctagggcactcgctcagtccctaggggcttgtttgttctttattattgtgtttaaatccttatagagcaatatcaggatggtgttaataggtctgcctcagaatgagaatcaatccttttagaaaacctttatactaagcctcctcttcaaaattcacagtggcgattagcggactggagtctggtggcgattagcggactggagtctggggacatccgtggcaaagacaccagctcaactttagtgcttcccaactttatttagaatgacatggggtgggtgtctggtgtgtgtgttttccctacgcacctcccatagctattaacaactgaggaaggccagtgcagaatatttttggagaacgattttttttttaaataatatatcattcctatggggggaaagccttttttttctttttggctgagttattccctccctcccctcaataccctcagtactgactacttccctttcttttctcaggcctccccccaccgacttttgaggccagggttggccagatttagcaaaaccaaaacagagtgctgagttaaacgcaaatttcaggtaaacaaaagataattttctagcattaatatgccccacgcaatatttggaacacttatgtgaaaaatgatttgtttttctgaaattcacgtttctctctgagtcctgtaactgtccccgaggggattgagcagaagctcgggtatgagccctgaggttgactgccggttatttttctgtcctgggaacagcctgacccacctccctgtctccatgtagccagtgaggggagggggagacacagaaccaaccacagccaggggcgtccccatggcgactgtggcccggcccctcctctcttgcctgactctcctctcttgcctgactctagacactaacttagttccaggttcggtgccctgttggtgctcctgtttccaatagcttaggtcccatggtgggggaggaacctcaggggctatgcagcccccgccagctgccctcgaatcccgtccaggccaattccagattctaaactgatttttttcatgatattgtcaaaacagtgaggaaacattaaaaaaaaagccctaaagcaaaaaaaaaaaaaaaaaaaaa

SEQ ID NO: 3265 - DNA, 2928 bp, Homo Sapiens
  NM_012123
gtagacgtcctaccccgtgatattaaagcaagatggccgcgccctgcagattgtctcttgttgcgtaagtttttttgaccgtcactcgtgtcagcttcaaagtcagatagatttttctcccagcatgttctacttccgaggctgtggccgttgggtcgcggtttccttcaccaagcagcaatttccgttggcacggttgagcagtgacagcgcggcgccccggactccgcacttcgacgtgatagtcattggtggaggacatgccgggactgaggcagccaccgccgccgctcggtgcggctctcggactctgctcctcactcaccgcgtggacacgatcggtcagatgtcatgtaatccttcctttggtggcatcggaaagggacatttaatgagggaagtagatgccttggatggcctgtgttctcgcatctgtgaccagtctggtgtacattataaagtattaaaccggcgtaagggaccagctgtgtggggtctgagagctcagattgataggaaactctataaacagaacatgcagaaagaaatcttgaatacaccactgcttactgttcaggagggagctgtagaagatcttattcttacagaaccagagcctgaacacactgggaaatgccgtgtcagtggggttgttttggtggatggaagcacagtatatgcagagagtgtgattctgactactgggacatttctgagaggcatgattgtaattggattggagacgcatccagcaggacgtttaggggatcagccttctataggattggctcagacactggagaagttagggtttgtggtgggaaggttgaagactgggactccaccccgaattgccaaagagtccattaatttcagtattctaaacaagcatataccggacaatccatccataccattcagctttaccaatgagacagtatggattaagccagaagatcagctgccatgttacttgactcacaccaaccctagagtggatgagattgtccttaagaaccttcaccttaatagtcatgttaaagaaacgacaagaggacctcgatactgtccctccattgaatcaaaagttttgcgttttccaaaccgtctacatcaggtttggttggaacctgaaggaatggattctgaccttatctacccacaggggttatctatgacgctaccagctgagttacaagagaaaatgatcacatgcatcagaggcttggagaaagctaaagtgattcagccaggctacggtgttcagtatgattacttagatccccgtcagatcaccccttccttggagactcatttggttcaacgactcttctttgctggacagatcaatggcaccactggttatgaggaagctgcagctcaaggtgtgatagccggaatcaacgccagtcttcgggtcagtcgcaagcctccctttgtggttagccgaacagaaggttacataggagtcttgattgatgacctcactactctgggcaccagtgaaccataccgcatgtttaccagccgagtagagttccgtttgtcactgcgccctgataatgctgacagccggctcacactgcgagggtataaagacgctggctgtgtgtcccaacaacgatatgaaagagcttgttggatgaagtcttctttagaagaaggcatttctgtgttgaaatctattgagtttttgagctctaaatggaaaaaattaatcccagaggcttctataagtactagtagaagtctgcctgtcagagctctcgatgttctgaagtatgaggaagttgacatggattcattagccaaggctgttccagagcccttgaagaagtatactaaatgtagagagctggctgaaagactgaaaatagaagccacttatgaatcagtgttgttccatcaactacaagaaataaagggagttcagcaagatgaagctctccaactgccaaaagacctagattatttgactatcagggatgtgtctttgtcccatgaagttcgagagaaactacattttagtcgtccacagacgatcggggctgctagtcgcatacccggagtaacacctgccgccatcatcaatctgctgagatttgtgaagaccactcaacgaagacagtcggctatgaatgaatcatccaagactgatcaatacttatgtgatgcagacagacttcaagagagagagttatagctttcaattcataaaagatttttaaagagcatataaataatttgatcaatacaacagtatagataaaagaattatttagcacatgttaaaatagctttattaggttactatgggtttgccattaatttctgagtgggacagaaattataattgtgctttttcgtgtatatgaaaaaactagtcgtaaacaatttgtactctttctttaaggagctgtaatacaaataactttgtgcagtgttcatcaaagagagagacagtgaacctaaaactgaacctggaataaaactcaacatgcagatttgcctactcatagggactttgcctattaagtctaccaaattaaaagtcttatcattcagcgtgttttgagagttaataatcttttgcttggttatactaggctaggaagcaatatcaaagcccttaaattctcaagactaaagacttgagattatataaaattatccagaatcattcagctaatactattggaatatagtatgtagggtgaaagttgacagaaatctgtacttcttcaggaaatcctcactggtaattgttttgaacattaatgaaagccctataaaatagaaagattggaaatcaccattgtttcctattatccacagtgtggatggatacttatttggtgacctagttatgggagaattgagtaacgttagttattttatatcataccataaaaatattttcttaaaaaa

SEQ ID NO: 3266 - DNA, 994 bp, Homo Sapiens
  NM_014161
tggcgtggagagtttggggatctacagcagccaaaggcttgtccctgactttatatggctgctcctggcgagcgactgagtcgtccgtgaggaaaaagaggcgaggcttttccgagatcgtctcagcgatggcgcttcggtcgcggttttgggggttgttctcggtttgcaggaaccctgggtgcaggttcgcagccctgtcaaccagctccgagccggcagcgaaacctgaagtggaccctgtggaaaatgaagctgtcgccccagaattcaccaaccggaacccccggaacctggagcttttatctgtagccaggaaagagcggggctggcggacggtgtttccctcccgtgagttctggcacaggttgcgagttataaggactcagcatcatgtagaagcacttgtggagcatcagaatggcaaggttgtggtttcggcctccactcgtgagtgggctattaaaaagcacctttatagtaccagaaatgtggtggcttgtgagagtataggacgagtgctggcacagagatgcttagaggcgggaatcaacttcatggtctaccaaccaaccccgtgggaggcagcctcagactcgatgaaacgactacaaagtgccatgacagaaggtggtgtggttctacgggaacctcagagaatctatgaataaatggaagcattaattgttttgaacatgtaaatataaatctgtcagccactacagccatcaaaagagagcatctggaagaacagccagcttggaagttttacagcaataatgttgcagtggaatattatttgtagttaaggtcatcctcctcccctttctgtttttttaaatcaagaactacgttctgcccctctcttgggcttcagaagcatctaagaaaagcagtcatcaattataattaactttcaaagggcaagtcagaagttgtttataaattacaaaataaaggcatattatgaactcttaaaaaaaaaaaaaaaaaa

SEQ ID NO: 3267 - DNA, 914 bp, Homo Sapiens
  NM_014164
ccctggccacaccctccgcctggacgcagcagccaccgccgcgtccctctctccacgaggctgccggcttaggacccccagctccgacatgtcgccctctggtcgcctgtgtcttctcaccatcgttggcctgattctccccaccagaggacagacgttgaaagataccacgtccagttcttcagcagactcaactatcatggacattcaggtcccgacacgagccccagatgcagtctacacagaactccagcccacctctccaaccccaacctggcctgctgatgaaacaccacaaccccagacccagacccagcaactggaaggaacggatgggcctctagtgacagatccagagacacacaagagcaccaaagcagctcatcccactgatgacaccacgacgctctctgagagaccatccccaagcacagacgtccagacagacccccagaccctcaagccatctggttttcatgaggatgaccccttcttctatgatgaacacaccctccggaaacgggggctgttggtcgcagctgtgctgttcatcacaggcatcatcatcctcaccagtggcaagtgcaggcagctgtcccggttatgccggaatcgttgcaggtgagtccatcagaaacaggagctgacaacctgctgggcacccgaagaccaagccccctgccagctcaccgtgcccagcctcctgcatcccctcgaagagcctggccagagagggaagacacagatgatgaagctggagccagggctgccggtccgagtctcctacctcccccaaccctgcccgcccctgaaggctacctggcgccttgggggctgtccctcaagttatctcctctgctaagacaaaaagtaaagcactgtggtctttgccccaaaaaaaaaaaaaaaaaaaa

SEQ ID NO: 3268 - DNA, 2411 bp, Homo Sapiens
  NM_014165
acttgtgcgcatgctccgggtgtcccggagttgtcctgcgccggtgttcccacgtgcggcctgaacctgagcgcataatgttatgaggagatgggagcactagtgattcgcggtatcaggaatttcaacctagagaaccgagcggaacgggaaatcagcaagatgaagccctctgtcgctcccagacacccctctaccaacagcctcctgcgagagcagattagtctctatccagaagttaaaggagagattgctcgtaaagatgaaaagctgctgtcgtttctaaaagatgtgtatgttgattccaaagatcctgtgtcttccttgcaggtaaaagctgctgaaacatgtcaagagccgaaggaattcagattgccgaaagaccatcattttgatatgataaatattaagagcattcccaaaggcaaaatttccattgtagaagcattgacacttctcaataatcataagcttttcccagaaacctggactgctgagaaaataatgcaggaataccagttagaacagaaagatgtgaattctcttcttaaatattttgttacttttgaagtcgaaatcttccctcctgaagacaagaaagcaatacgatcaaaatgaagaaaatcacagaaatttcctatgtgtactcctcatccctcctgctgtatattttctcattttttgcgtaataaattatgttaattaccaaatatttaatgctctcattgtgagggcatactcttaatatttattgagctccctgacttttcaagattgccatagaatatcttttgttttattttaatttggtttaggcatatttcataagtgcatgtcagcatgactgagcacatctgtacctttattatggtgaaagagttaatttgttattttaggcacatataccaacttttaaattggtcatattaccccttgggaaatgtcctgaatccctcaactgagttttactttccaagttaggtgtttagttcattcttctcatgcgatagtgaaagtaaaagctttcctgacccttaagactgacattttctcgttagggaaagagactcgatagcagggtagactaacagtagttcccaaataaaggcacacaggagaaaatgaatcaatagaatctaattaaaattactactccagggaataagaagtattgaggatttattttattttgaattggttttaagtatggaataattgtctttacagttataaaaagtaattagtggtgtttacaaaatgttgggaatttctgctttgacagataggtaagtcccatgggaatttctgctttgacaaatagttaagtcccatggccttcagagaggcaggaagcagaaactttcaaaaaagtaacatttctctggatttaatgtggaaatagagaaaaatttaaagaataattaaaaaaccatggtagatgaaatttggtgattacatatagtttcggatgttaatgctagttgagagaagagaaaaagatagcaagtagaagcagagaacaggatcattggaagggacctgagaaattgccatttcatccattttagcaaatttaattagcatagcatgtaccagtactaggatcttgagtgagtgtgtgagtttagctctgcctaatatattactacttgggggatctttgggagactatatcttcttggagattgagtttcttctataaaataagcataatgctaccctaaatgtaagggttatcatgaagataaataataaaggactacaaaggaccaagcaaataggaattattttttgcggtggagaaacaagtgcctggggagaatatatgaccgaagattctgtagtttatgacttaaacaggcccagaatttagtttttcaaatcctagtagtgtgttttttctgtcttgccaaaaagcagcacacctcaaagaagggaaaaggtgtgaattgtgggtatattagggttattagtgcttccgagggaagataggcatcactacttcccagagatgcccctggaaatgatatagaggatgttgaagaattcaatgtgatgacggaatgaggcatttgtagtaatgctgagaacagaaaaatggactaagtggaaaatttgtaagcatgactttgaatgtagatttgttatgtgaacaaactacctagtttatttttagttcaatacaataattgttttaagaaaacatgaaataactactcaatataaaatgcattttaaaactgtaaataagtcaaaactttattctttttatcataatggtcactagctgagtcacaaatactagtacactcttctgagccatcttctttattcatatctacattgtgtggttaggcatctgttatgtggtgtcacatgataaaataaagaacttcttcccataccattca

SEQ ID NO: 3269 - DNA, 1372 bp, Homo Sapiens
  NM_014169
ttagggcaaccccaagtgcttgaacctataccaccccactttcctgagctctgtaaagagcatgaagttttcccactgaccccatacactgaggtgccatcacactgcacatttccttccggagaacaagcacgtactcaggtggagatagaactgtctttttacttaatagaaaatgatgtggcagctttaagaggagcgcgtcggtctggggctggtggcttgggtcacgtgacaccggtggtctcgtttgcgcctcttgatgtcgcggcggcgccctgaggacggattgggcaaggctggtccctgtgtgatgagacatcaccctcccaggagcaaggcggaagtctggaggacgctgaggggcggaggcgggagaggcgagctcgcgatgagtggtctcggcaggctcttcgggaaggggaagaaggagaaagggccaacccctgaagaagcaatacagaaactgaaggagacagagaagatactgatcaagaaacaggaatttttggagcagaagattcaacaggagctacaaacagccaagaagtatgggaccaagaataagagagctgccctacaggctttgcggaggaagaaaagattcgaacagcagctggcacaaactgacgggacattatccaccctggagtttcagcgtgaggccattgagaatgccactaccaatgcagaagtccttcgtaccatggagcttgctgcccaaagcatgaagaaggcctaccaggacatggacattgacaaggtagatgaactgatgactgacatcacggaacaacaggaggtggcccagcagatctcagatgccatttctcggcctatgggctttggagatgatgtggatgaggatgaactgctggaggagctagaggagctggagcaggaggaattggcccaggagttgttaaatgtgggcgacaaggaagaagaaccctcagtcaaattgcctagtgtaccttctactcatctgccggcagggccagctcccaaagtggatgaagatgaagaagcactaaagcagttggctgagtgggtatcctgataaatctgggcttgtcttcctaatgctacctttgttggtcctttcttccttaagtgccaagtgctgagctaaaggaggataactttttggggaagtcatgctgagggtggtagtgtgaccctgcctgaaaaaagggtctcttaccctcccagccctggctcaactctgaagaaggatcttgctacagaaggagcccttgggctcccttctctttgatagcagttataatgcccttgttcccaataaaactgggcagatggaatcctagtgtctatactgccttgtctacccctgaaaaaaaaaaaaaaaaaa

SEQ ID NO: 3270 - DNA, 1364 bp, Homo Sapiens
  NM_014170
caggccacaggagtaaaatctctctgcccgtcttctgggaagggagaatggcggcgcccgggctgcggctgggagcgggaagactctttgaaatgcctgcggtgctagagcgactgagccgctataatagcacgtcccaagcttttgctgaggtgctgcggctgccgaagcagcagctgaggaagctgctgtacccgctgcaggaagtagagcggttcctcgccccctacgggaggcaagaccttcacctgcgtatctttgacccaagcccggaggacatagccagggcggacaacatcttcacggccactgaacggaaccgcatcgactacgtcagctccgccgtccgtatcgaccacgccccggaccttccgcggccagaggtgtgttttataggcagaagcaatgttggaaaatcatctctaatcaaggctttattttcactggcccctgaggttgaagtcagagtctccaaaaaaccaggacacacaaagaaaatgaattttttcaaagttggaaaacattttacagtggtggacatgccaggttatggctttagagcacctgaagattttgttgacatggtagagacctatctaaaagaacgaaggaacttgaagagaacatttttattagtggatagcgttgttggaattcaaaaaacagacaatattgccatagaaatgtgtgaagaatttgcattaccttatgtgattgtattaacaaaaattgacaaatcttccaagggacatcttttaaaacaagtgcttcagatccagaaatttgttaacatgaaaactcaaggatgttttcctcagttgtttcctgtaagtgctgtgaccttttctggaatccacctgttgagatgctttatagccagtgtaacaggaagtcttgactaatggttcccggtttagctgaagattcaaaaaaaaaaaaaaaagctttatgctaactggagttaaatacctagaagaatttcaacattgttttaaatgttgtgcatctgtaacttcaggaggatcacttgagctttaaaacctgtgccttctcgaaacaagaatttgtgcctgaggtgaaaaaagtttgtaagttattgaattatggtgttcattagaacagctactagctgattcccctattttaacaaactgacaagagcacatccataaaatgaaaacctgttacaactatgtacagaagggtttgacgttttattgggcttttgtcttttaaagaatatgtctactatgggtattttttttttaaatgttaaaatgggctaggtaaaagggggctgcttttctgttaagcatcgataggtaagttgatggataaaagttactatgtaagcctaaaaaaaa

SEQ ID NO: 3271 - DNA, 1218 bp, Homo Sapiens
  NM_014172
ggctgccgttgcctccttgtaccggtagcggggttggggacggaagccttcggtcggtggagaggagaaagggagaggccttcgggcggtggacggggaagagagggagtccttcgggcggtggagggggtggagagcgaggccttcgggcggtggagagcggggaggggggaggccttcgggcggtgggagggggagagagggaggcctttgggcggtgggggccacggggagggtggtcttcggactacgtgcgggacaggaggtcagggctggcaagtccctcaggcctccctcgttgccccagcctcgcgggccgcctaactgccccgttccaagggtgccaccggaccccgctggagaggaacttctccgttggctggatttcatcaccacccattcccgattccacgtttcctttaagcggggctggcggagccgcaaggcggcaaggaactggattgcgattggtcagcacgtgcctcggtcggcggtacaattggctgaggcgctgggccttgggaagcattccccgacgggattggtcgtcgctctcgcagagcccgcctcccgcagtacaagcggcccccgggtcgggtgggaggaggggactccgggaggaggaacatggcggtggcggacctcgctctcattcctgatgtggacatcgactccgacggcgtcttcaagtatgtgctgatccgagtccactcggctccccgctccggggctccggctgcagagagcaaggagatcgtgcgcggctacaagtgggctgagtaccatgcggacatctacgacaaagtgtcgggcgacatgcagaagcaaggctgcgactgtgagtgtctgggcggcgggcgcatctcccaccagagtcaggacaagaagattcacgtgtacggctattccatggcctatggtcctgcccagcacgccatttcaactgagaaaatcaaagccaagtaccccgactacgaggtcacctgggctaacgacggctactgagcactcccagcccggggcctgctgcctccagcagccacttcagagcccccgcctttgcctgcactcctcttgcagggctggccctgcctgctcctgcggcagcctctggtgacgtgctgtccaccaggccttggagacaggctagcctggccacagaattaaacgtgttgccacacctgccggcttctgaaaaaaaaaaaaaaaaaaaaaaaa

SEQ ID NO: 3272 - DNA, 1562 bp, Homo Sapiens
  NM_014177
cgggggtttcccaggtgactttgcgaaggcatggcggggacactgtgaatgtcagcccagaaggtgatcagagcctgttaattaaaatggaaagaagacagaagggaaggtagacatcaggttctccctggagacttttcgttttcatttacgctgcggaaactgacgtttttgcctaacaccccatgtaatgtaaacgtataggcttgagtacgtgtccggccgcatgtgtagtgaaccctaaagctttcctaattgtagttagcatcgtccctaagcggaacgattttccgtgaacatgatttgtacttttctacgagccgtacagtatacggagaagctgcacaggtcctcggcaaagcgattgcttttgccatacatcgtgcttaacaaagcgtgcttgaagactgagcccagtttgagatgtgggcttcaatatcaaaagaaaacgctgcgacctagatgtattcttggagtcacccagaaaaccatctggacgcagggaccgagcccccgaaaagcaaaggaggatggcagcaaacaagtgtctgtgcacaggagtcagagagggggaaccgccgtcccaacatcacaaaaagtgaaagaagccggaagagattttacctatttaatagtggtgctttttggaatcagcattacaggtggcttgttttacacgattttcaaagaacttttttcttcatccagtcctagcaagatatatgggagagccttagaaaaatgcagatcacatcctgaggtgatcggtgtctttggtgagtctgttaaaggctatggggaggtgacaaggcggggtcgccggcagcatgtcaggttcactgaatatgtaaaagatgggctgaaacacacgtgtgtgaaattctacattgagggctctgagccagggaagcaaggaacggtgtatgcgcaagtgaaagagaacccaggaagtggtgaatatgattttcgatatatatttgtagaaattgaatcttatcctagaagaactattatcattgaagataatcgatcccaagatgattaaaatagggtttctgatggatgttgaatggcgtggactcgctactccgttcttcacagctgccttccagaatgtgttcaaaagaaagacaagaaggagtgtatggcttataaagtgaatctaatacagtatttgttgcatttaaacaaactagacattttcttacggaaaaattatgaaatacagcatattttatgttctcccattgactcaatcatgacaatatttctgctttaacaccatctttcatgattagaaatgtttgttattggaaatgttacaccatgtaaataaaggaaatagattttagtattgtattcattttatattatagaactgcataatgtctgcagaataaaattaaaactaacaaatatgtcattagcagctgccctccgcatactttggaatctgacttgagataagcatgtgaaaatggttgagggccatagggaaccagatggtaaatacattcttcaaaattgtgtgagtaaaaaaaaaaaaaaaaaaaaaaaaaaaa

SEQ ID NO: 3273 - DNA, 3190 bp, Homo Sapiens
  NM_014180
gcttgaactcggcggcttccgtagcgggagggcgaaagatggcggcggcagtactgggacagttgggtgcgttatggatacataacctgaggagccgggggaagctggccttgggtgttttacctcaatcatatatccacacaagtgcttctcttgacatttctcgaaaatgggagaagaagaataaaattgtttatcctccacaactgcctggagaacctcggagaccagcagaaatctaccactgtcgaagacaaataaaatatagcaaagacaagatgtggtatttggcaaaattgatacgaggaatgtctattgaccaggctttggctcagttggaattcaatgacaaaaaaggggccaaaataattaaagaggttctcttagaagcacaagatatggcagtgagagaccataacgtggaattcaggtccaatttatatatagctgagtccacctcaggacgaggccagtgcctgaaacgcatccgctaccatggcagaggtcgctttgggatcatggagaaggtttattgccattattttgtgaagttggtggaagggcccccacctccacctgagccaccaaagacggcagttgcccatgccaaagagtatattcagcagcttcgcagccggaccatcgttcacactctatgatgaggagattcagactccacagtgtatatattttgccatttattttctaaaaataaacaaaaattgaaggcaaatgctttttatgatttctcattgaattattgaaacagtgtataactgctagttgtaaatgaatatttataaggctttgcccatttcttttgagcctctgggcatatttgtatgcatttgcgacttggaaggggaaatcagctttaaacatagtaacagactatatttcaaaaggcttttggagtaactttgaaagggaatgttaactttccaactagtgtcctgcaggtggctgttttgatactggacttgaatacagtgttatgaggtaagaaaattgcttttatttcacttaattttctcttgggaccatgggaagttagagtggctgcatgttgtttcattacagtattttagggtgttcagtggtaccgtttttcctttcactgttggcacaggccagtgagtcaaaaattatattttcctttactgttttagcagtaactcgaaactacaggagtttattagatatacgaatctaaaactccaaaaacctttaactttgaaaattttcttttggttaagcaaagcctgtttttatttcttcttccaacagtgctttatattgtttggatatcttgtttaggattgatttatttttcagggtaaattcaattactgagagaggaattgaaccaatctcagcattgcattctaaaatggggcagtaggtggcactcaaccttttattagcagaaaattgttagtttcaaattagagtgttcaacactgcttccctctcattcatacacgtcttcattaagaagaagtactctttgtctacagccctagtccaacttttgcatgcaaaagaagaatcgaggatgcttgcttgttaatgcagacttctgggccccaccccaatgattcaattcactaggtcttatggggggctggtttcagaaatctatgttttaaacaaacacttccaggtaattctgttgtaggggactacgctttgagaatacggctttaggagaatgaaaaaatgtagttttattgccatgttttaagatggcattaataatagttactgtttactgggaacttgttatttgcaagctctgtgctagtattttacataattcttcacaacatcctgaaaatgtagcttttgttttaccactttacaaaggaataaaccgaagcacacagaattcaaataactatcacaagtcacacagcatgtaaatattggggctatgattgaaaggtttctaaagtagctggttctgcataccttttgagtatacagctgggtttttgtgtctctccagttaacctaatgcatgggtaaaaagacatcaggggtcagtggaataaaccaaggtgtaggacagattcattctgggtcctaagctgttgtagcatggagtcagggaaataacactggaatattaaaaggtaaccttcattctagtctgtgcattctcattagccagaaagaagactggataggtctcttcccttgctggcctccatttcattcatttatgaaacaagagactcaatgttctctgtagaaaaccttttttagaatcacttgaagaatttgtttaaaaatgcaaattcctgggctctactctcagactaagtgaatcagaagctttggtgtgggagaccatggaacctgcagttttaataaatgccccagtgatttgcatgttggagaattatcacaccaggtcactgtgctctcatgtggtggggatgctccacgattgctcttggagttgtgacttccttgggtgtgactaaagccaggtggtgccatggacatcataaatataaattatgtaagtgaaggcactgcttcagtcaggctgtaaaagctattttgaaagtggtaaggaaaaagtaggattgtaatgaagaaaatttccttcccaggttaagccttcatttggaactgcttccagtacgttacaaaaagtaataatagctaacctgtgtcactgactgtatctggtactattttaagcactatatatacattatctcaatgaatctttcccattgtgacatccggctagttttcgtggctaagagtgtactttctaacatccatgaacattgtggtccccacctgaagtttcactttgcatgttcagtgatatggtttggctctgtgttcccacccaatcttatctcaaattgtaatccccatgtgtccagggagggacctgtaatccccacctagtgacggagggaggtgattgatgatgggtgtggtgtaccccatgctgttctcgtgatagtgagtgggttctcatgagatctgatggttttataagtgtttgaaagttccctcttcactcgctgtcttgcctgctgccatgtaaaatgtgcctacttcaccctctgccatgattgtaagtttcctgaggcctccccagccatgcagaactttgacacaattaaatgtcttttctttataaattaaaaaaaaaaaaaaaaaa

SEQ ID NO: 3274 - DNA, 3842 bp, Homo Sapiens
  NM_014181
ctttaaatgctgcccagggccgacgcggcacggccctcgccacttttcttggtcgggcagcggcagcggcagcggcagcaagcagccccgtcggcccgggtccggggccgttctgggccgcggcaagcaccttcgccctcccagctcgcgctgcctccctcccctcccctcctcccaggctctgcctgccaggtcggcgccgggccccgggcgcgcgcgcgcgcgccccctcgtgtgtgcgcgcgcccgccgccagctcggacccgcgcccccgcccccgccccgcgcaggacagccccgggatccccgcccgcgcgccgcgtcccacgtaccccgccgcgccgggcaagaagatggcgggatcagtggccgacagcgatgccgtggtgaaactagatgatggccatttaaacaactctttgagctctccagttcaagcggacgtgtacttcccacgactgatagttccattttgtgggcacattaaaggtggcatgagaccaggcaagaaggtgttagtgatgggcatcgtagacctcaacccagagagctttgcaatcagcttgacctgtggggactcagaagaccctcctgccgatgtggcaatcgaactcaaagctgtgttcacagatcggcagctactcagaaattcttgtatatctggggagaggggtgaagaacagtcagcaatcccttactttccattcattccagaccagccattcagggtggaaattctttgtgagcacccacgtttccgagtgtttgtggatggacaccaactttttgatttttaccatcgcattcaaacgttatctgcaattgacaccataaagataaatggagacctccagatcaccaagcttggctgatttaaaccacctctatttcaaataggatcacgtgccacaactatctgactgttggtctggaagaagtgtcctagcaagatctggagacttaaaaagaaaacaaaaacaaatggcaagtttcacttaagggtggtttgcccttaagaagaaagctgttgggacaaagacaccgagccattatacccagaataaaataatacatttatgctggattttattcagaccaaactaaaatggatttgtgatgatttgtgatttggtagcaaattattcatcttttcaaagcaaggcaatgcttagaaacagaagtgctaaagacacttaaaaagccaacaacaacggtacagtgaaatcaatgcatttctgcactaaagtggaattgtgtagcacaaccaatattttagtcagggtatttacatagaatgtaggttgttcaaggtttgactttttttttgttttttgtttttgtttttgtttttgttttgcacagcataatgttaattcagattgttgaagctttcttgtagttatttatttatactcaatgtatgtattaaagaatgaacaatgtctcaagaacagcaagttgtaaacttttgaatgtataaatatcttaggtccaaggggagaaaattacatattacaattatgaaacaggtgaatttctgctttaaagaattgagattctccatacccctaaacttaggatctcttgatataaactgctgtaagtgcttttgggaaacctttgcaaaaccattttgataaaactgctttccaagttattgttggttatgtaaaattctatttacattgctttttctccttactgggaattagcacattattggcttccttaagactaattatttctctcttgatttatataatagctcattaagttgttattaatcaaaaacacaaagaggtgattgcttagacaatttttaaagtgactatagtataaacttttaaaagaataatatgaaaatgactgtggaatgcagtgtaaagcagaagcaaacggccctgaataacttacttggaagtaatttatatcaacttaagctgttagctcattgtataacttttcttatgtgaccctcaccaatatccctaagtaatgcctttggaagcttcagagtagaagatgcttcctactgtgttggctctgaggagatagtaggattagataggatccagattaggaaatgatccagttagtttatctgaaaggttaactcccaggactccaggtctttgaatccagccagtagagtgaatgcttccaattaagctgtaggtgttaccctgcacttacggaactgatcaaacaggtgactccaacaggaggttgcagtactgtaaacgtcaccgcaaggcaagggatgcttaaagtcctgggttctggactttaaaagctacattggccctggagggagggacccttggcattgctttgatcaggtagtgagggaagacagggttctggggtgggggtgtatttatatataatttaggttttgtttgtacagcatactgtgtcttgtaatgacacatccttgtcctgctttccttttttgagttttttttttttttttacacaacatgcagaggcactgaagtgaccatgtcattttcaagtgtcaagaatgtagacagtgtttcagtaccaaagtctaaaataaactaaaattatgaattttttataggtgatacatttggattcttctcaactttgaaactgtttagcacagttccattgtattatataagaagacactgtatccaacaagactggctgtacattgaaaagctttatgtaccagccaacttatttaaccatattcagcctgttccgtgggggctgttctgtggttccaggtattttcaagcctgtgattaacttctcatggcttgtcacttaaaagtccctaaatttgagagacttaaagggcaccttgaaatacatttgtggagttttgatccaacttatggtggaagagccccataggaagactgttttgagtggccaaccattcccacccactgcataattcagcagaaactagaggagcagggcgtgtactgattggaattgacacgcttattctgtctacctatcagctaactcattagcagccaagcccttaggcagcttagtgtgaaaatacaatgttaactgtttgtttctctgtgaggttagtgggaaccgcttggataagcctattgggattaatctaaatgatgtgatgatttgattcaggtatagcccaaattagtaaggggctttagctgtaaactgaaaacaatattcacaccctctcctgggcctgtaaggtctaaggtgagaatttcaggatggaaaatgcaatgtaaagcttccacaggaaagtattcgggtatgtaaggtgttatttctgaccagagccctagttctgcaataaccaaaaccaaggagtataaataacaatcaggctctgggggaatagaaagcaggctttagacaatctgtccatttctacagtaaaattggagtgagtgtgtatatctacttaaaacttaatagaagtgacttctactttttgggctattccagaagtattttaaaattattatttaaaattttgaagccccatttcaaatcttgccgaccttagttcaaagccccctgagagatcacttttagaattgaggatttgttaaaatggcaagtcatttcatttgtgttaaaaagaaaatacccaaaaggaaggagggagccctgtttgccttgagataaacggccttggcattttctggcattaatgtagaaataatgttcctatgatgacatattttcaaagaaacactttcttatttactgtgtggtgtaaaatgttgctaaatgtgttgttacattatgtcactgctgaaagtaatttgcactataataaaggaattttctacaaaacaaaaaaaaaaaaaaaa

SEQ ID NO: 3275 - DNA, 702 bp, Homo Sapiens
  NM_014183
cgcagaaaggcacaggactcgctaagtgttcgctacgcggggctaccggatcggtcggaaatggcagaggtggaggagacactgaagcgactgcagagccagaagggagtgcagggaatcatcgtcgtgaacacagaaggcattcccatcaagagcaccatggacaaccccaccaccacccagtatgccagcctcatgcacagcttcatcctgaaggcacggagcaccgtgcgtgacatcgacccccagaacgatctcaccttccttcgaattcgctccaagaaaaatgaaattatggttgcaccagataaagactatttcctgattgtgattcagaatccaaccgaataagccactctcttggctccctgtgtcattccttaatttaatgccccccaagaatgttaatgtcaatcatgtcagtggactagcacatggcagtcgcttggaacccactcacaccaatccagtgaccgtgtgtgggctggcggctcttctcccccaccaacggaacccctgtgtgcaccaaccttccccagagctccggagcgccctctcctcacttccaggttttggagcaagagcttgcaggaagcccgcacccagcttccttctgaccttcagttcactttgtcgcccttggagaaagctgtttttctttaactaaaaataaccaaaatgcttaaaaaaaaaaaaaaaaaa

SEQ ID NO: 3276 - DNA, 651 bp, Homo Sapiens
  NM_014184
gacggaaggagcggcggcgacggaggaggaggatggaggcggtggtgttcgtcttctctctcctcgattgttgcgcgctcatcttcctctcggtctacttcataattacattgtctgatttagaatgtgattacattaatgctagatcatgttgctcaaaattaaacaagtgggtaattccagaattgattggccataccattgtcactgtattactgctcatgtcattgcactggttcatcttccttctcaacttacctgttgccacttggaatatatatcgatacattatggtgccgagtggtaacatgggagtgtttgatccaacagaaatacacaatcgagggcagctgaagtcacacatgaaagaagccatgatcaagcttggtttccacttgctctgcttcttcatgtatctttatagtatgatcttagctttgataaatgactgaagctggagaagccgtggttgaagtcagcctacactacagtgcacagttgaggagccagagacttcttaaatcatccttagaaccgtgaccatagcagtatatattttcctcttggaacaaaaaactatttttgctgtatttttaccatataaagtatttaaaaaacaggaaaaaaaaaaaaaaaaaaaaaaaaaaaaaa

SEQ ID NO: 3277 - DNA, 3006 bp, Homo Sapiens
  NM_014186
gcttccctgggtgccacggtcatgtgacttcggcaagatggctgccctgacagcggagcattttgcagcactccagagcctgctcaaggcctcctcgaaagatgttgtcagacagctgtgtcaagaaagcttttccagttcagcccttggcttgaaaaaactcttggatgttacatgttccagcttgtctgtgacccaggaggaggcagaggaactgctccaggctctgcaccgcctcactaggctggtggcattccgtgacctgtcctctgccgaggcaattctggctctctttccagaaaatttccaccaaaacctcaaaaacctgctgacaaagatcatcctagaacatgtgtctacttggagaaccgaagcccaggcaaatcagatctctctgccacgcctggtcgatctggactggagagtggatatcaaaacctcctcagacagcatcagccgcatggccgtccccacctgcctgctccagatgaagatccaagaagatcccagcctatgcggagacaaaccctccatctcagctgtcaccgtggagctgagcaaagaaacactggacaccatgttagatggcctgggccgcatccgagaccaactctctgccgtggccagtaaatgatccagccagctgccagggccactgccatgacccagctgctcatgagtgataaatgtctccccatatgcaggctgcccttgcagctgcagctgacaacaggcaggatggtggggacagcagggggctactgccatccagaagttacagttggattgggaagaagcagccagatcccccgctgttctcactcatcttctttctctttctgaagctggagagcagaagcccccatctttgaaaagctcctgagtgcaacttaattaccaccatggcagggtgagggaacatttgcatcgtcagctgcctctgcatagctgtttgagaaattcaggcccaaatcatgcagcctatccaataagtaagtttatttccaacattagctctaattagttcatttccaatcccagaacacatggagggaatcggacaggtgatgccagcagttcctgctcctctgtcagggaagccaggcagagcccacagagcatggtccatccagagtgttccctgagccccctccaccatactggaacccctcttcagtgtaggaagtctgaaatgggtgctaattcccttcttcatgaaaccagggccctcttccttcatctaatgcagccactcctaggtgaagaagtgggaataattggaaataaacaacagttctaaaacttccatgatttttgtagcttcttttgtccccaagttgaagcttttggccagtaccttctctagtttttaaagatgatcccaacttcctaattcccagctaagcccttgacccatggtgtgacatgaaatcaggcaattgaatcgcaccactttctgtgttttcacctgttacgtagaacaaaaggaagcaaggtggccaggcgcaatggctcacgcctgtaatcccagcactttgggaggccgaggcaggcagatcatgaggtcaggagatcgagaccatggtgaaaccccatctctactaaaaatacaaaaaattagctgggcgcggtggcgggcatctgtagtcccagctcctcgggaggctgaggcaggagaatggcgtgaacctgggaggcagagcttgcagtgagccgagatcgtgccactgcactccagtctgggtgacagagaaggactcgtctcaaaaaataaaaataaataaaaaggaagcaaggctaatcatcagtatgtgcttgttacaagagctatgatgaaggcactccttcgagtttaaccaaatgagatcatctctgtcatgtgcctcacgcctcacagggactccatgtgtgaagattcccccttcactcaccagatcatctccatggcaacagcttgcagcctgctcttggagtgctttgttttggcagcttctctgctagtttgtgtatggagtgaatggaggaggtaaatccacagattaagaatatgctgtcaggagtcaggcagccaaggtcagaagccagctctgcttctcagtggtaaggtgcttgacttctacatctcaattttcacccactttgtacttttttcctaaattaaatgagtataatagtagtacctacttgataggacttttgtgaaaattaaatgatataatgcacctaaaaacagtactgttacaactaataggaaaggctttgattattaatggatgagagtagaaagcttggtgcatttattgtctcatctactataacagagttggtgtgagaattagtattatcatcctccctttattgaccaggaaaccagctcattgagattgagtcatctgctggtaaatggtctcattaagaggtggacccatatttctctagctttctctttacaacacaggactttgcaaggaacatataattctgtgactagcgccatttggaaaatgttgaaactgaagtagagatgagagatcttacgtctgcctacccagtgagatacgaggaaggtcaagggaaaaaaaattccaagctcttctttatctgctataggaaatgaacattcaattttttgcatgcaacgacaagaggtcaaggaccccagaagccagcccgctacttccaagttgagagcccctggtcataccctccagttgagctcagatttgtcacaaatttacccctctcctttccttccattccccatgacctgcagagagagatgtcagataccttcctcttggcctcccatgggcatccataagaaacttacttgaagcaagaagcccagtataggtgtctgggcagttggacatttcctctagccagatctgtccgaatagagccatctgggtacatgacgcagagggcatttgataaataactggaaaagtcaataaatctttgctacccttcaaaaaaaaaaaaaaaaaaaaaaaaaaaaaaaaa

SEQ ID NO: 3278 - DNA, 1321 bp, Homo Sapiens
  NM_014205
ctaccaccggcgtgcgttcgcaggtagatcgcggtgccagttgccatggagccggccgggccctgtggcttctgcccggcgggggaggtccagccagcgcgttacacctgccctcgctgtaatgcgccctactgctcgctgcgctgctaccggacgcatggcacctgcgcagaaaacttctaccgtgaccaggtgctgggagagctccgcggttgcagcgctcctcccagccgcctagcaagcgccctacgccggctgcgtcagcaacgcgagaccgaggacgagcctggggaagcaggcctcagctccggcccggcgcccggcggcctatcgggactctgggagcggctggcgccgggcgaaaaagctgccttcgagcggctgctgagccgcggtgaggccgggcggctgctgcctccatggcggccgtggtggtggaaccgcggagccggaccgcagcttctggaggagctggataatgccccgggtagtgacgccgcggagctggagctcgcccctgcgaggaccccgccggattctgtgaaagatgcctccgccgcggagcccgcggccgccgagcgggttcttggagatgtcccgggggcctgcacgcccgtcgtacccacccgcatccccgcgatagtcagcctgagccgcggcccagtctcgccgctcgtgcgcttccagctgcccaatgtgctgttcgcctacgcgcatactctcgccctgtatcacggcggtgacgacgcgctgctctctgacttctgtgccacactgctcggcgtttccggagccctgggtgcccagcaagtcttcgcctctgcggaagaagccctgcaggcggcagcccacgtgctggaagcaggcgagcacccgccggggcccctgggcacacgaggggctatgcacgaggtcgcccgcatcctgctgggcgagggcccgaccaaccagaaaggctacacgctggcagcactgggggacctggcacagaccctgggccgtgcccggaaacaggccgtggctagagaagagcgagatcatctttaccgggcccggaaaaagtgccagttcctcctggcctggaccaacgaaaatgaggcggccctcacacccctggctctagactgcgccagggctcaccaagcccatgctgtggtagccgaggaggtggccgccctcactggggagctggagcggctttggggaggccccgtgccacctgccccaagaactctcattgaggagctccctagctgaacgggttaccctggtcattaataaagctgtgactggtcaaaaaaaaaaaaaaaaaaaaaaaaaa

SEQ ID NO: 3279 - DNA, 3180 bp, Homo Sapiens
  NM_014207
acgccaccccgccctctccctctctgagagcgagatacccggccagacaccctcacctgcggtgcccagctgcccaggctgaggcaagagaaggccagaaaccatgcccatggggtctctgcaaccgctggccaccttgtacctgctggggatgctggtcgcttcctgcctcggacggctcagctggtatgacccagatttccaggcaaggctcacccgttccaactcgaagtgccagggccagctggaggtctacctcaaggacggatggcacatggtttgcagccagagctggggccggagctccaagcagtgggaggaccccagtcaagcgtcaaaagtctgccagcggctgaactgtggggtgcccttaagccttggccccttccttgtcacctacacacctcagagctcaatcatctgctacggacaactgggctccttctccaactgcagccacagcagaaatgacatgtgtcactctctgggcctgacctgcttagaaccccagaagacaacacctccaacgacaaggcccccgcccaccacaactccagagcccacagctcctcccaggctgcagctggtggcacagtctggcggccagcactgtgccggcgtggtggagttctacagcggcagcctggggggtaccatcagctatgaggcccaggacaagacccaggacctggagaacttcctctgcaacaacctccagtgtggctccttcttgaagcatctgccagagactgaggcaggcagagcccaagacccaggggagccacgggaacaccagcccttgccaatccaatggaagatccagaactcaagctgtacctccctggagcattgcttcaggaaaatcaagccccagaaaagtggccgagttcttgccctcctttgctcaggtttccagcccaaggtgcagagccgtctggtggggggcagcagcatctgtgaaggcaccgtggaggtgcgccagggggctcagtgggcagccctgtgtgacagctcttcagccaggagctcgctgcggtgggaggaggtgtgccgggagcagcagtgtggcagcgtcaactcctatcgagtgctggacgctggtgacccaacatcccgggggctcttctgtccccatcagaagctgtcccagtgccacgaactttgggagagaaattcctactgcaagaaggtgtttgtcacatgccaggatccaaaccccgcaggcctggccgcaggcacggtggcaagcatcatcctggccctggtgctcctggtggtgctgctggtcgtgtgcggcccccttgcctacaagaagctagtgaagaaattccgccagaagaagcagcgccagtggattggcccaacgggaatgaaccaaaacatgtctttccatcgcaaccacacggcaaccgtccgatcccatgctgagaaccccacagcctcccacgtggataacgaatacagccaacctcccaggaactcccacctgtcagcttatccagctctggaaggggctctgcatcgctcctccatgcagcctgacaactcctccgacagtgactatgatctgcatggggctcagaggctgtaaagaactgggatccatgagcaaaaagccgagagccagacctgtttgtcctgagaaaactgtccgctcttcacttgaaatcatgtccctatttctaccccggccagaacatggacagaggccagaagccttccggacaggcgctgctgccccgagtggcaggccagctcacactctgctgcacaacagctcggccgcccctccacttgtggaagctgtggtgggcagagccccaaaacaagcagccttccaactagagactcgggggtgtctgaagggggccccctttccctgcccgctggggagcggcgtctcagtgaaatcggctttctcctcagactctgtccctggtaaggagtgacaaggaagctcacagctgggcgagtgcattttgaatagttttttgtaagtagtgcttttcctccttcctgacaaatcgagcgctttggcctcttctgtgcagcatccacccctgcggatccctctggggaggacaggaaggggactcccggagacctctgcagccgtggtggtcagaggctgctcacctgagcacaaagacagctctgcacattcaccgcagctgccagccaggggtctgggtgggcaccaccctgacccacagcgtcaccccactccctctgtcttatgactcccctccccaaccccctcatctaaagacaccttcctttccactggctgtcaagcccacagggcaccagtgccacccagggcccggcacaaaggggcgcctagtaaaccttaaccaacttggttttttgcttcacccagcaattaaaagtcccaagctgaggtagtttcagtccatcacagttcatcttctaacccaagagtcagagatggggctggtcatgttcctttggtttgaataactcccttgacgaaaacagactcctctagtacttggagatcttggacgtacacctaatcccatggggcctcggcttccttaactgcaagtgagaagaggaggtctacccaggagcctcgggtctgatcaagggagaggccaggcgcagctcactgcggcggctccctaagaaggtgaagcaacatgggaacacatcctaagacaggtcctttctccacgccatttgatgctgtatctcctgggagcacaggcatcaatggtccaagccgcataataagtctggaagagcaaaagggagttactaggatatggggtgggctgctcccagaatctgctcagctttctgcccccaccaacaccctccaaccaggccttgccttctgagagcccccgtggccaagcccaggtcacagatcttcccccgaccatgctgggaatccagaaacagggaccccatttgtcttcccatatctggtggaggtgagggggctcctcaaaagggaactgagaggctgctcttagggagggcaaaggttcgggggcagccagtgtctcccatcagtgccttttttaataaaagctctttcatctatagtttggccaccatacagtggcctcaaagcaaccatggcctacttaaaaaccaaaccaaaaataaagagtttagttgaggagaaaaaaaaaaaaaaaaaaaaaaaaa

SEQ ID NO: 3280 - DNA, 1537 bp, Homo Sapiens
  NM_014214
gctgggctgggctcggcacggggcggggcggagggtggggagcggaaagcaggacgcacggctcccgcggcccgctggctgcccttcccgccagcgcaggtgtgggacgggcggcggactaggcacagagctgcgggagcaggcacagggagtgtggagcctggcggcgggacggcgggatccggtgggagccggagtcccgccgaggggggctggaggtggaggggcccggcgaggccgcgatgaagccgagcggcgaggaccaggcggcgctggcggccggcccctgggaggagtgcttccaggcggccgtgcagctggcgctgcgggcaggacagatcatcagaaaagcccttactgaggaaaaacgtgtctcaacaaaaacatcagctgcagatcttgtgacagaaacagatcaccttgtggaagatttaattatttctgagttgcgagagaggtttccttcacacaggttcattgcagaagaggccgcggcttctggggccaagtgtgtgctcacccacagcccgacgtggatcatcgaccccatcgacggcacctgcaattttgtgcacagattcccgactgtggcggttagcattggatttgctgttcgacaagagcttgaattcggagtgatttaccactgcacagaggagcggctgtacacgggccggcggggtcggggcgccttctgcaatggccagcggctccgggtctccggggagacagatctctcaaaggccttggttctgacagaaattggccccaaacgtgaccctgcgaccctgaagctgttcctgagtaacatggagcggctgctgcatgccaaggcgcatggggtccgagtgattggaagctccacattggcactctgccacctggcctcaggggccgcggatgcctattaccagtttggcctgcactgctgggatctggcggctgccacagtcatcatcagagaagcaggcggcatcgtgatagacacttcgggtggacccctcgacctcatggcttgcagagtggttgcggccagcacccgggagatggcgatgctcatagctcaggccttacagacgattaactatgggcgggatgatgagaagtgactgcggctgaggcaaagctgctcccaaggcctccctgggctgctgtgggctcctggggaggtggccctcgtggcccacgctccatgccagtggctcacgctctgctcctggctaccccagagggagttgtcacgctacagtgagtggctggccttttaaatcgacgtctctctcaccaggatttggtgtttagctgtttctctctttaatctcacgtagcctttttcaggttagtacgtgttcttctgtcagggccaaaactcaaatctcctgtgaaatacgtattgataatccaatcttgatttttccccccagaatataaatctcaggtaataaggctttagaactgctgataaagcggatcgttctcaggccctccccccggagtacttcagaatgcaataaatcaaaataatggccctgtgtgt

SEQ ID NO: 3281 - DNA, 3385 bp, Homo Sapiens
  NM_014216
cgccgccgcgggctcaagcggggcggccgggccagcgcggggcggcggcgggcaggggcggcgagtgcgcgggcgctcgccgccgcccttctcggcgggcagcgcgcgaggaccaggccgaggaggaagtggcggcggcggcggcgggactgcgcgccccagctccgatccccgttccgcgtccccgccgccgggaggaggtgcccactcgctcgcggcgcgcgccggccgccagactcggcctgtgggcgatttcctccggacccaggctccccgcccgaggaggaagatgcagacctttctgaaagggaagagagttggctactggctgagcgagaagaaaatcaagaagctgaatttccaggccttcgccgagctgtgcaggaagcgagggatggaggttgtgcagctgaaccttagccggccgatcgaggagcagggccccctggacgtcatcatccacaagctgactgacgtcatccttgaagccgaccagaatgatagccagtccctggagctggtgcacaggttccaggagtacatcgatgcccaccctgagaccatcgtcctggacccgctccctgccatcagaaccctgcttgaccgctccaagtcctatgagctcatccggaagattgaggcctacatggaagacgacaggatctgctcgccacccttcatggagctcacgagcctgtgcggggatgacaccatgcggctgctggagaagaacggcttgactttcccattcatttgcaaaaccagagtggctcatggcaccaactctcacgagatggctatcgtgttcaaccaggagggcctgaacgccatccagccaccctgcgtggtccagaatttcatcaaccacaacgccgtcctgtacaaggtgttcgtggttggcgagtcctacaccgtggtccagaggccctcactcaagaacttctccgcaggcacatcagaccgtgagtccatcttcttcaacagccacaacgtgtcaaagccggagtcgtcatcggtcctgacggagctggacaagatcgagggcgtgttcgagcggccgagcgacgaggtcatccgggagctctcccgggccctgcggcaggcactgggcgtgtcactcttcggcatcgacatcatcatcaacaaccagacagggcagcacgccgtcattgacatcaatgccttcccaggctacgagggcgtgagcgagttcttcacagacctcctgaaccacatcgccactgtcctgcagggccagagcacagccatggcagccacaggggacgtggccctgctgaggcacagcaagcttctggccgagccggcgggcggcctggtgggcgagcggacatgcagcgccagccccggctgctgcggcagcatgatgggccaggacgcgccctggaaggctgaggccgacgcgggcggcaccgccaagctgccgcaccagagactcggctgcaacgccggcgtgtcgcccagcttccagcagcattgtgtggcctccctggccaccaaggcctcctcccagtagccacggagccgggacccagaggggcagcgcagggcgcagagcacacccgctgggccagcagctcccaacggcgatgctactactaagaatccccagtgatctgattcttctgttttttaatttttaacctgattctctgatgtcatgatctaaatgaggggtagtgggggatggaagagagtaccaggtggtccaccgttggggagtggggccgtccgcctgctctctactgtgcagacctcctaactgagtttacacacgcttgtgtttgcaacactaggtctggatgggaggtgaggggtgtgcgtatggctgccatgccagtgtctgtgcacatccctgtctgttggtctccatggccactgtggaccgggacccttgggggaagcctgcccatgtcgggctgtgggaggctgatcggtgcatgtgagagtggcttcccttctgcctgactccccactccctgacctgccccttccttgtttttcctcctactggtctccaccaaggctttgttagcccccaccctgcctggtgtgcagctaacccctccctccccacagccagaggaggccacagacccctcaggggagttccgcgctggggtctgggctgtgctccctcactaaagggaaggaaaggaagctgggcgtcctctgggccccccaacacacgtcccatttagccctgcacagcggtctccttcccctaagccagcactgctgctccctggagcccgggaaggaggctgcctggctggaggcccgagccgatggcgcctgtgctgaggatttgtgctgtgatttgggcaaatcattccaggtctttgggcctccacccccttgtctctagtggacatttgagatcagagagcaccacagggctggctttgtgccctaacccctgggatgcagcctgcctttccataaagtcacctaggtgaggataggcgcgggagcctcggcatgacaccatggagatcggggccctcttcccagtgggttcactccttttcacacctgctgggtccctcctcacccagcaggcctggtccacctctcattgcaagccccaagcactgagccagcaggtgccagggagccacccgccccccatcgcttctgcacacctcagactcaccccatcaccttggcagcaaagcactggctctgccgtctgacccctgatccaggcagccccctctgcagagaaaagggttggggagaagcctctgcagtcctggaagatgtggggtgctgggtgagaggcatcagcccccacaagtatgtttttgtgtcttaagatagcagtttactttgaaaaagtgaaaaaggcttccgggctgtcctctgcccagtgagatggaggacgctagagaaagtgctgagtgtcccgagagaggcccccgagccagtgcatggaggtccttcggcctggctcagctgggctgcaggatgcccactttgaggagggaggcacagggcttgggcgaggggcagaggccatcagaactgcccggcttttttggaaactgaggacccaacaactaaccacgtttacacgacttgagttttgaaccccgattaatgtctgtacgtcacctttcctagttctgaccctgagccctggggaacaggaaagcgtggctggcctcttgcactgctttgtctccaaaataaactactgaaatcaaaccgcatttcacacgtgtttacacatgttgctcaagtttgttatgtcatactcccagtccttaaaagacgtttaataaaacagctttaccttttaaaaataaaatttcaatcccagtctgcctcaggtacgggtgggggtgtgcaaaaaaaaaaaaaa

SEQ ID NO: 3282 - DNA, 1598 bp, Homo Sapiens
  NM_014218
gagctcggtcgcggctgcctgtctgctccggcagcaccatgtcgctcttggtcgtcagcatggcgtgtgttgggttcttcttgctgcagggggcctggccacatgagggagtccacagaaaaccttccctcctggcccacccaggtcgcctggtgaaatcagaagagacagtcatcctgcagtgttggtcagatgtcatgtttgaacacttccttctgcacagagaggggatgtttaacgacactttgcgcctcattggagaacaccatgatggggtctccaaggccaacttctccatcagtcgcatgacgcaagacctggcagggacctacagatgctacggttctgttactcactccccctatcaggtgtcagctcccagtgaccctctggacatcgtgatcataggtctatatgagaaaccttctctctcagcccagctgggccccacggttctggcaggagagaatgtgaccttgtcctgcagctcccggagctcctatgacatgtaccatctatccagggaaggggaggcccatgaacgtaggctccctgcagggcccaaggtcaacggaacattccaggctgactttcctctgggccctgccacccacggagggacctacagatgcttcggctctttccatgactctccatacgagtggtcaaagtcaagtgacccactgcttgtttctgtcacaggaaacccttcaaatagttggccttcacccactgaaccaagctccaaaaccggtaacccccgacacctgcacattctgattgggacctcagtggtcatcatcctcttcatcctcctcttctttctccttcatcgctggtgctccaacaaaaaaaatgctgcggtaatggaccaagagtctgcaggaaacagaacagcgaatagcgaggactctgatgaacaagaccctcaggaggtgacatacacacagttgaatcactgcgttttcacacagagaaaaatcactcgcccttctcagaggcccaagacacccccaacagatatcatcgtgtacacggaacttccaaatgctgagtccagatccaaagttgtctcctgcccatgagcaccacagtcaggccttgagggcgtcttctagggagacaacagccctgtctcaaaaccgggttgccagctcccatgtaccagcagctggaatctgaaggcgtgagtctgcatcttagggcatcgatcttcctcacaccacaaatctgaatgtgcctctctcttgcttacaaatgtctaaggtccccactgcctgctggagaaaaaacacactcctttgcttaacccacagttctccatttcacttgacccctgcccacctctccaacctaactggcttacttcctagtctacttgaggctgcaatcacactgaggaactcacaattccaaacatacaagaggctccctcttaacgcagcacttagacacgtgttgttccaccttccctcatgctgttccacctcccctcagactagctttcagtcttctgtcagcagtaaaacttatatattttttaaaataacttcaatgtagttttccatccttcaaataaacatgtctgcccccatggt

SEQ ID NO: 3283 - DNA, 1943 bp, Homo Sapiens
  NM_014221
gcggggctgtgggggcgaggagggggcagcgggcgcgcggctggcgcgcgggggcgggccttggggcacgggggcggggcccgcccagcagcacctgggaaacgcccgcgcggtttggggcaggcgtggccgtcggggcggagggcggtggccggccgcggtccgggcgtcaggccgggcggcgggggcggcagggaggcggcgctctggggccgcaggcggacgtactctgtgagcggcgcccgggcgcctgggcaggcgcctcccgagtaccggcgcccattttgcccgcccgctaaggagacccgtgcgcggcctacacgcttgggggacagccctttaagacgacatctccgcgaacgccggcctcttgagccagggggacgctcttttgaaagtcagtcccaaaacagttaaggttttattttattttgttttatttccaagtcacagcccccgaatctcgtacaactctccctggaccacttccggttgccggcccgcgcctcataacttcggttcgagtgacctcggcccgggatgcccctcggctcaccccgggctcacgtcgcgatcctggcttgagtggcccagggtgggagacctggaagttttagcctagctgttctcaaggcggattaattagcccaagaaacattatattcatgcttaggtggagaaaagcagggctagaattggaacccaaagcccagaatggcaggagaggatgtgggggctccacccgatcacctctgggttcaccaagagggtatctaccgcgacgaataccagcgcacgtgggtggccgtcgtggaagaggagacgagtttcctaagggcacgagtccagcaaattcaggttcccttaggtgacgcagctaggccaagtcaccttcttacctcccagctacctctcatgtggcaactctacccggaggagcgctacatggataacaactctcgcttgtggcagatacagcatcatttaatggtcaggggagtacaggagctgttgcttaagcttttgcctgatgactaacctggtgctgggattctacgaagatatgctcctttgttctgttcagtatttggcaatcacttcatccactactgcagtgcacccacccttgggcctggggggagggagtgggttgaaaaactgctcaagaaacagaagtttagcaagggtcatgaagaatactgcaagtgaaactgcagagagaggttacgtaggcagaaagcaagtcaacaaaagcacttagtcaggatccgtaacttgaaattgactcctttggaaattgccatagaacccttaatggacatcatcggctggacctgggatctgatgaatcccacaaaagtcagcaccttctacagaacagatgccctgatcaccaaggacttggtactgatttagagagaagagagcagctcctagcagcatcaacatctatttgtcgcttatttgccctgcagcaattcacctgcctttccttctcccatcctttttctggatatgccgcagaaggatccgtgccagaagcaagcctgtgagatacagaaatgtttacaagccaacagctacatggaatcaaagtgtcaggctgtcatccaagaactgcgtaagtgttgtgctcagtatcccaagggaagatctgtcgtctgttcaggatttgaaaaagaagaggaagaaaacctaacacggaagtctgcatcaaagtaaagttcttctgaagtgctgctccatgtttccaccaaatgaattttttttatcctcctgactcttcaggccaggtagcagcaaatagcaaatgaaaaagtcagctacaaaagttaatgaatatgccatctatgcagaacaggcagaaatataaacacattaaaagacaaatatgtagaatgtaatatactgagctgctaaaataaacctgtttaagagaaaaa

SEQ ID NO: 3284 - DNA, 2519 bp, Homo Sapiens
  NM_014225
aatcttggtcgctaggacacggctaacttccgctttcttccccctctcctaggctcaaactagtcaaatcttgttcactcgaccaatggcaaatcggaagtgggcgggacttcacaagtccggaccaaagaaacgcgagcttagccctgggtagcgcggccaatggccgtggagcagcccctgtaaactggctcgggcgcccccacgcccgcccttccttcttctcccagcattgccccccccacgtttcagcacagcgctggccgcagtctgacaggaaagggacggagccaagatggcggcggccgacggcgacgactcgctgtaccccatcgcggtgctcatagacgaactccgcaatgaggacgttcagcttcgcctcaacagcatcaagaagctgtccaccatcgccttggcccttggggttgaaaggacccgaagtgagcttctgcctttccttacagataccatctatgatgaagatgaggtcctcctggccctggcagaacagctgggaaccttcactaccctggtgggaggcccagagtacgtgcactgcctgctgccaccgctggagtcgctggccacagtggaggagacagtggtgcgggacaaggcagtggagtccttacgggccatctcacacgagcactcgccctctgacctggaggcgcactttgtgccgctagtgaagcggctggcgggcggcgactggttcacctcccgcacctcggcctgcggcctcttctccgtctgctacccccgagtgtccagtgctgtgaaggcggaacttcgacagtacttccggaacctgtgctcagatgacacccccatggtgcggcgggccgcagcctccaagctgggggagtttgccaaggtgctggagctggacaacgtcaagagtgagatcatccccatgttctccaacctggcctctgacgagcaggactcggtgcggctgctggcggtggaggcgtgcgtgaacatcgcccagcttctgccccaggaggatctggaggccctggtgatgcccactctgcgccaggccgctgaagacaagtcctggcgcgtccgctacatggtggctgacaagttcacagagctccagaaagcagtggggcctgagatcaccaagacagacctggtccctgccttccagaacctgatgaaagactgtgaggccgaggtgagggccgcagcctcccacaaggtcaaagagttctgtgaaaacctctcagctgactgtcgggagaatgtgatcatgtcccagatcttgccctgcatcaaggagctggtgtccgatgccaaccaacatgtcaagtctgccctggcctcagtcatcatgggtctctctcccatcttgggcaaagacaacaccatcgagcacctcttgcccctcttcctggctcagctgaaggatgagtgccctgaggtacggctgaacatcatctctaacctggactgtgtgaacgaggtgattggcatccggcagctgtcccagtccctgctccctgccattgtggagctggctgaggacgccaagtggcgggtgcggctggccatcattgagtacatgcccctcctggctggacagctgggagtggagttctttgatgagaaacttaactccttgtgcatggcctggcttgtggatcatgtatatgccatccgcgaggcagccaccagcaacctgaagaagctagtggaaaagtttgggaaggagtgggcccatgccacaatcatccccaaggtcttggccatgtccggagaccccaactacctgcaccgcatgactacgctcttctgcatcaatgtgctgtctgaggtctgtgggcaggacatcaccaccaagcacatgctacccacggttctgcgcatggctggggacccggttgccaatgtccgcttcaatgtggccaagtctctgcagaagatagggcccatcctggacaacagcaccttgcagagtgaagtcaagcccatcctagagaagctgacccaggaccaggatgtggacgtcaaatactttgcccaggaggctctgactgttctgtctctcgcctgatgctggaagaggagcaaacactggcctctggtgtccaccctccaacccccacaagtccctctttggggagacactggggggcctttggctgtcactccctgtgcatggtctgaccccaggccccttcccccagcacggttcctcctctccccagcctgggaagatgtctcactgtccacctcccaacgggctaggggagcacggggttggacaggacagtgaccttgggaggaaggggctactccgcccacgtcagggagagatgtgagcatcccgggtcactggatcctgctgctgtaatgggaacccctcccccatttacttctccacctcccgtcctccccatcattggtttttttttgtgtgtcaactgtgccgtttttattttattccttttattttcccccttttcacagagaaataaaggtctagaagtagttggtcaaaaaaaaaa

SEQ ID NO: 3285 - DNA, 1954 bp, Homo Sapiens
  NM_014226
cgcatgcgcaggcgacagctcatggcgttcagggcctgacggttgctagggtgacagggacacaacatggcggcgggatctctaacgctctccttcgagggaccaccacggagatcctagtgcgggaccccgcctcagggaagtggaaagcagggggacaaccttcctgcttccttcttttccgtccagtgtcggcaaggggttgtcaccggcttccgcatccaagatgaagaactataaagcaattggcaaaataggagagggaacgttttctgaagttatgaagatgcaaagcctgagagatggaaactactatgcatgtaaacaaatgaagcagcgctttgaaagtattgagcaagtcaacaacctacgagagatccaagcactgaggcgcctgaatccgcacccaaacattcttatgttgcatgaagtggtttttgacagaaaatctggttctcttgcactaatatgtgaacttatggacatgaatatttatgagctaatacgagggagaagatacccattatcagaaaaaaaaattatgcactatatgtaccagttatgtaagtccctggatcatattcacagaaatggaatatttcacagagatgtaaaaccagaaaatatactaataaagcaggatgtcctgaaattaggggactttggctcctgccggagtgtctattccaagcagccgtacacggaatacatctccacccgctggtaccgggccccggagtgtctcctcactgatgggttctacacgtacaagatggacctgtggagcgccggctgtgtgttctacgagatcgccagtctgcagcccctctttcctggagtaaatgaactggaccaaatctcaaaaatccacgatgtcatcggcacacccgctcagaagatcctcaccaagttcaaacagtcgagagctatgaattttgattttccttttaaaaagggatcaggaatacctctactaacaaccaatttgtccccacaatgcctctccctcctgcacgcaatggtggcctatgatcccgatgagagaatcgccgcccaccaggccctgcagcacccctacttccaagaacagaggaaaacagagaagcgggctctgggcagccacagaaaagctggctttccggagcaccctgtggcaccggaaccactcagtaacagctgccagatttccaaggagggcagaaagcagaaacagtccctaaagcaagaggaggaccgtcccaagagacgaggaccggcctatgtcatggaactgcccaaactaaagctttcgggagtggtcagactgtcgtcttactccagccccacgctgcagtccgtgcttggatctggaacaaatggaagagtgccggtgctgagacccttgaagtgcatccctgcgagcaagaagacagatccgcagaaggaccttaagcctgccccgcagcagtgtcgcctgcccaccatagtgcggaaaggcggaagataactgagcagcaccgtcgtctcgacttcggaggcaacaccaagcccgaccgggccaggcctgggtgatctgctgctgagacgccacggagggctggggatgcgcctgcgtccgtttcgcgctggccggggctctgggtgctgccctgcgccctgccgcacccgcggcccgcgcagctgcctaggatgttctgggctaatatacttgtaaaaccaccgcattctagggttttctttcattttcgttaagaatttggggcaggaaatactttgtaactttgtatatgaatcaaaacaaacgagcaggcatttctgtgatgtgttgggcgtggttggaaggtgggttctgcgtgtcccttcccagcgctgctggtcagtcgtggagcgccatcatgtcttaccagtgacgctgctgacacccctgacttttattaaagaataagctgtcgttaaaaaaaaaaaaaaaaaaaaa

SEQ ID NO: 3286 - DNA, 2515 bp, Homo Sapiens
  NM_014230
ccctatcccgtcttgctctgcggcgcaggggcaagatggctgctgagaagcaggtcccaggcggcggcggcggcggcggcagtggcggcggcggtggcagtggcggcggcggtagcggcggtggacgtggtgccggaggggaagaaaataaagaaaacgaacgcccttcggccggatcgaaggcaaacaaagaatttggggatagcctgagtttggagattcttcagattattaaggaatcccagcagcagcatggtttacggcatggagattttcagaggtacaggggctactgttcccgtagacaaagacgtcttcgaaaaacactcaacttcaagatgggtaacagacacaaattcacagggaagaaagtgactgaagagcttctgaccgataatagatacttgcttctggttctgatggatgctgaaagagcctggagctacgccatgcagctgaaacaggaagccaacactgaaccccgaaaacggtttcacttgttatctcgcctacgcaaagccgtgaagcatgcagaggaattggaacgcttgtgtgagagcaatcgcgtggatgccaagaccaaattagaggctcaggcttacacagcttacctctcaggaatgctacgttttgaacatcaagaatggaaagctgccattgaggcttttaacaaatgcaaaactatctatgagaagctagccagtgctttcacagaggagcaggctgtgctgtataaccaacgtgtggaagagatttcacccaacatccgctattgtgcatataatattggggaccagtcagccatcaatgaactcatgcagatgagattgaggtctgggggcactgagggtctcttggctgaaaaattggaggctttgatcactcagactcgagccaaacaggcagctaccatgagtgaagtggagtggagagggagaacggttccagtgaagattgacaaagtgcgcattttcttattaggactggctgataacgaagcagctattgtccaggctgaaagcgaagaaactaaggagcgcctgtttgaatcaatgctcagcgagtgtcgggacgccatccaggtggttcgggaggagctcaagccagatcagaaacagagagattatatccttgaaggagagccagggaaggtgtctaatcttcaatacttgcatagctacctgacttacatcaagctatcaacggcaatcaagcgtaatgagaacatggccaaaggtctgcagagggctctgctgcagcagcagccagaggatgacagcaagcgctcaccccggccccaggacctgatccgactctatgacatcatcttacagaatctggtggaattgctccagcttcctggtttagaggaagacaaagccttccagaaagagataggcctcaagactctggtgttcaaagcttacaggtgttttttcattgctcagtcctatgtgctggtgaagaagtggagcgaagcccttgtcctgtatgacagagtcctgaaatatgcaaatgaagtaaattctgatgctggcgccttcaagaacagcctaaaggacctgcctgatgtgcaagagctcatcactcaagtgcggtcagagaagtgctccctgcaggccgcagccatccttgatgcaaacgacgctcatcaaacagagacctcctcctcccaagtcaaggacaataagcctctggttgaacggtttgagacattctgcctggacccttcccttgtcaccaagcaagccaaccttgtgcacttcccaccaggcttccagcccattccctgcaagcctttgttctttgacctggccctcaaccatgtggctttcccaccccttgaggacaagttggaacagaagaccaagagtggcctcactggatacatcaagggcatctttggattcaggagctaaccaggctcttcctcgggggcgggggagattctgactcttaatctgtattgtgagaaaatcccagcaagttccatgatattaaatccaggtctgcattggcccggggcaagagtttaacatcttcggccctgcattcctacatcttgtgtctgtacacgttcttaagcagcgtgtcaggagagcaccctgttgtcttctggtaaatgtgtgcagggtcatcctgtctcctgtacctcctgggaaaggggccgctgctgtctggtgccctgtgagctgtgattgattgcctttggtcagtaatgcgttcaggagtccacaccaggcacagatggggccttgaaacgctttgtcatgcttcttcagtaccatggatttgaaatgaactcatccttgctgtgagcatccaggagcccttgagaagtttatctatgactatgaaactggcaacgtcaccccagaattacggtcagccttattccccttcacctcccagtgaacgctaagaagtttcagacaagcagagagctctatttttagaagaaatatgttacactcagaaatgatgaaaccaaatcttatattaaaaggcaaagatg

SEQ ID NO: 3287 - DNA, 2173 bp, Homo Sapiens
  NM_014232
atctttccgtcccgggcagccagcgccagtcggagccagcgcgagccgccgccgccatcactgccgctgccaagtcctccacccgctgcccccgccatgtctgctaccgctgccacggccccccctgctgccccggctggggagggtggtccccctgcaccccctccaaacctcaccagtaacaggagactgcagcagacccaggcccaggtggatgaggtggtggacatcatgagggtgaacgtggacaaggtcctggagcgagaccagaagctgtcggagctggacgaccgtgcagatgcactccaggcgggggcctcccagtttgaaacaagcgcagccaagctcaagcgcaaatactggtggaaaaacctcaagatgatgatcatcttgggagtgatttgcgccatcatcctcatcatcatcatagtttacttcagcacttaaatccccgaggagtctgccctgcctagagaagggcctctcccccaaccctcagccgttcctccacctctcagccatatctttcagcccccactcccctggatccgtgtgtgtgtgtgtccgtgtgtgtgtccccctgtaaatagccagctgttatttatacatatataatattatatatatttggtctgtttgtagttttattactagatgatttttccggttgtccttaacaccccttcctgaggttcccttcacccctctctcttgccttccttccctttccctttcttcctgactagccccaagtcccttcatttgcatctgctatgcaatagtccctctcctttccttcttcttccctcagatttagctgatccttcctcccaccctggccttcctttcctctttcctcctcactctccccgtcatgctccctctgccccgccctcaaaaaaaaaaaaaaaaaaaaaaaaacaacagcacctgtccaggcttccttaggtacatcttctttgtatccattgggaggctctgagactggccccacttggtcctaagaatcccaaggtctttgggagcgtccagcatgttaattagcgtatcattacatactgctatccctttccatttctttttgttccatcactcttctctcaacctgtgtttctttttttactgaggagttagtccccattagttcttgtatcacattttcatttgcacgacattactcgcaggtggtggggagcctgggcttttggggaaccaggctgctctggtccccagcattgcctcctcctagcccctctagtccagtttgcctcccttaccctcattttccaaacctcttgtaccctcctctccctcccccagctggtatgtaagtgtcttgaagttcagtatgttatgatggaccaataattctgccacttcgggtttctccctacattcctgctccccagttttcatgtggggtactcaactgacattcccatggggtttccctcccatctgcctgatccacctcctcctcccaccaggagagttgggggttggccacaattgatctcttgtgagaggggtggctaccagtgtgtgtgtgggggtcatcactgccttggggaggagtggggcagggcagagaatccccccaattcctgcctgaaatctctggcctcacccctgctgggggttggactgaaaaccctcctccccaatttggggggtgttgccccatcactgcccagctcctctgactgccccccctgaatttagggtgggggtactagtcactgccaatgtgtgtatgggacttgctggaaaacggggatgcttgcccctctccaggactattgagcccagagagagctgtcctctcattgggtgaactgattgaggaagggtctattgtctttttaaatggcacaattttaagggtttgagggtacagtcccttaacctgccacgggagggggcccccaaactttcttccccccacacttctggttttctgtgtggagggggagcagggatatctaagctgtggtgtgaaagggtaggagagatgctggaggtgggggtgctgtgttttagaccccccatattatcccagtgtcccctgcccccctcttcccccaccccatgcccccaattctgtggcgcatccagattgtgaaaatgtacaataaatgtgtaatgagtaaccaggaaaaaaaaaaaaaaaaaa

SEQ ID NO: 3288 - DNA, 4603 bp, Homo Sapiens
  NM_014233
ggtgaggtggctttgaccccgggttgcccggccagcacgaccgaggaggtggctggacagctggaggatgaacggagaagccgactgccccacagacctggaaatggccgcccccaaaggccaagaccgttggtcccaggaagacatgctgactttgctggaatgcatgaagaacaaccttccatccaatgacagctccaagttcaaaaccaccgaatcacacatggactgggaaaaagtagcatttaaagacttttctggagacatgtgcaagctcaaatgggtggagatttctaatgaggtgaggaagttccgtacattgacagaattgatcctcgatgctcaggaacatgttaaaaatccttacaaaggcaaaaaactcaagaaacacccagacttcccaaagaagcccctgaccccttatttccgcttcttcatggagaagcgggccaagtatgcgaaactccaccctgagatgagcaacctggacctaaccaagattctgtccaagaaatacaaggagcttccggagaagaagaagatgaaatatattcaggacttccagagagagaaacaggagttcgagcgaaacctggcccgattcagggaggatcaccccgacctaatccagaatgccaagaaatcggacatcccagagaagcccaaaaccccccagcagctgtggtacacccacgagaagaaggtgtatctcaaagtgcggccagatgccactacgaaggaggtgaaggactccctggggaagcagtggtctcagctctcggacaaaaagaggctgaaatggattcataaggccctggagcagcggaaggagtacgaggagatcatgagagactatatccagaagcacccagagctgaacatcagtgaggagggtatcaccaagtccaccctcaccaaggccgaacgccagctcaaggacaagtttgacgggcgacccaccaagccacctccgaacagctactcgctgtactgcgcagagctcatggccaacatgaaggacgtgcccagcacagagcgcatggtgctgtgcagccagcagtggaagctgctgtcccagaaggagaaggacgcctatcacaagaagtgtgatcagaaaaagaaagattacgaggtggagctgctccgtttcctcgagagcctgcctgaggaggagcagcagcgggtcttgggggaagagaagatgctgaacatcaacaagaagcaggccaccagccccgcctccaagaagccagcccaggaagggggcaagggcggctccgagaagcccaagcggcccgtgtcggccatgttcatcttctcggaggagaaacggcggcagctgcaggaggagcggcctgagctctccgagagcgagctgacccgcctgctggcccgaatgtggaacgacctgtctgagaagaagaaggccaagtacaaggcccgagaggcggcgctcaaggctcagtcggagaggaagcccggcggggagcgcgaggaacggggcaagctgcccgagtcccccaaaagagctgaggagatctggcaacagagcgttatcggcgactacctggcccgcttcaagaatgaccgggtgaaggccttgaaagccatggaaatgacctggaataacatggaaaagaaggagaaactgatgtggattaagaaggcagccgaagaccaaaagcgatatgagagagagctgagtgagatgcgggcacctccagctgctacaaattcttccaagaagatgaaattccagggagaacccaagaagcctcccatgaacggttaccagaagttctcccaggagctgctgtccaatggggagctgaaccacctgccgctgaaggagcgcatggtggagatcggcagtcgctggcagcgcatctcccagagccagaaggagcactacaaaaagctggccgaggagcagcaaaagcagtacaaggtgcacctggacctctgggttaagagcctgtctccccaggaccgtgcagcatataaagagtacatctccaataaacgtaagagcatgaccaagctgcgaggcccaaaccccaaatccagccggactactctgcagtccaagtcggagtccgaggaggatgatgaagaggatgaggatgacgaggacgaggatgaagaagaggaagatgatgagaatggggactcctctgaagatggcggcgactcctctgagtccagcagcgaggacgagagcgaggatggggatgagaatgaagaggatgacgaggacgaagacgacgacgaggatgacgatgaggatgaagataatgagtccgagggcagcagctccagctcctcctcctcaggggactcctcagactctgactccaactgaggctcagccccaccccagggcagccagggagagcccaggagctcccctccccaactgaccacctttgtttctcccccatgttctgtcccttgcccccctggcctcccccactttctttctttctttaaaaaaaaaaaaaaatacggtgggggtagggggctggaggagcccaggccaggactctgcagcctcagagacatcagcccttgggggtcctcctccagggacagcaactatcagactaagccagcaccggaccagcctggcccaccccacccacttctgcacttgcggttccggcatggacaatggaccggagagtgggggtggggggtcccaaagagtttgatgaggccctccacacctgcggcccaatccaaggtggggtggaagcttggggaagacccattccttcccagaggggcctgccacctggacccctgcattggaactggaggcagggaacatggggaggaggagggtcggtgccttcaagaaaacaggcactgccctggtggccctctcccctgccccctgcaggaaggagctgcctggacccgttcatgggggagggggcagaagtgttttttatatatgtgtatatatttttttttaagctctgagctgtcaacgagacgtttcctaccgatctcggctgccgtctctgttgtcatttctgggagagggagggtttaggggtagatttggaaccttttaaaaatggtcttgatgtatgtggaagagagtatgtgtatgtgtgttcctgtacatagcatgggtgcagctgtggatgtgtgcaaaagagtgtgagtgtgtgtgtgtgtgtgtaaaggggtctgtcctagagcccacatcagtttgttgtgaatctggaaaaagggtcggtgagggccgggagatgttgaccctggtgggagcaggctgaggctgccccgttctccacatcctctgttttgcccagtctctgattccattagggggagtgtgctgaagccattctcggatgcttcccagaccaggctccctctgccagagtcacatgcatccgagctgctggtctccattgtccagcaggaaggcggaaaggcaggcaagatggtgtgaagcttaaagcttgtatttgatggaaaaggtctcccctgttcatctgagaggccaagcctggccaccccaggctcagaacctgggcttcaagaaatgtgctgggagctcctaacttacacatccctccagccttccttgaatcctcccaccaccccctatttcctttaatttctcaggtctgctccctcctcccccaaccccacagctgggcaagaagtctgcaaaagctgcatctgcagctgtctctaactcttcccagccatctcccgtattttttggtaccttgattccttgactcttaataagccaagccaccttatctctgtagttcttatttttttgttgactaaatttggggggttcttttttatggtcatgtcactgacctattaaattggggcttggtgcttttccaccttccccctctgaatgaaagccaaggaatgggggaagagcgggaactctgccgcggaggtggagcaagaacggtgaagggccctggtcccagagaggctggtgggtccctctcccaaaggaaggcagacagtctctgctttgccttggaccttggtgctgggggtggggaggcctgggggggacactccccactcccattccccttcctttgtcctaatcctggaattaagtacaggggtttataggttctatttcttcccaagagccctgcaaagaaccccagtttcctatttggatgcccctacactgttgtgtttcagtggaatgtattttcatttaaaaacaactttgaatggggcactttttctttcctgttttaaaaattgaaaaattcttacagtacaaacaggactgtcagggtgggggtgttggtgctgtaagaggtcactcttgagtgcattttggcactgggatgggatggctggggtgggaagacccccatccccacccccaacttcttttctaatatttaaggagtgttttgtaggattcaacaaccaccacaacttgaatttgtatcatgggaggtgggagggagtggcttagaggtgtctgcctatgcttaaagccaactgtggaagttttgttttcccttttttgtataataaagtgaaaaacaaaggtttgaaaaaaaaaaaaaaaaaaaaaaaaaaaaaaaaa

SEQ ID NO: 3289 - DNA, 989 bp, Homo Sapiens
  NM_014234
gggattcccacccacccacagcccgccatggcgtctcagctccagaaccgactccgctccgcactggccttggtcacaggtgcggggagcggcatcggccgagcggtcagtgtacgcctggccggagagggggccaccgtagctgcctgcgacctggaccgggcagcggcacaggagacggtgcggctgctgggcgggccagggagcaaggaggggccgccccgagggaaccatgctgccttccaggctgacgtgtctgaggccagggccgccaggtgcctgctggaacaagtgcaggcctgcttttctcgcccaccatctgtcgttgtgtcctgtgcgggcatcacccaggatgagtttctgctgcacatgtctgaggatgactgggacaaagtcatagctgtcaacctcaagggcaccttcctagtcactcaggctgcagcacaagccctggtgtccaatggttgtcgtggttccatcatcaacatcagtagcatcgtaggaaaggtggggaacgtggggcagacaaactatgcagcatccaaggctggagtgattgggctgacccagaccgcagcccgggagcttggacgacatgggatccgctgtaactctgtcctcccagggttcattgcaacacccatgacacagaaagtgccacagaaagtggtggacaagattactgaaatgatcccgatgggacacttgggggaccctgaggatgtggcagatgtggtcgcattcttggcatctgaagatagtggatacatcacagggacctcagtggaagtcactggaggtcttttcatgtaactgcctcaaggaccctggactctgctcacccccccaccactctgcctggcctcctgctgatgaggactctaagttcccaggatacaaaaggggtggcagtgtatggttcaggaatgctgaatatgggaagcaggggtgcttgtgaccctaataaattccaagtcctcttccctgcc

SEQ ID NO: 3290 - DNA, 4552 bp, Homo Sapiens
  NM_014238
ctggacccctgccagggaaggggtcctcagacttgaggttgccagctcagatgtggggctgctgatactaggtgactggactgatgttctgttctagatgaaactccttgaggggaccatttgaaaaggcttgatgtgctgcccaaagcccccttcagagctgacttctccacccccagctgccgtgagccttggctgctgacagctcatagctgagtccctcccgtgaagtcaccttctgctgaagggtacatcctctcccaaggcgaagctggtccgttacatttgtaagcagaggcagtgcaagctgagcgtggctcccggtgagaggaccccagagctcaacagctacccccgcttcagcgactggctgtacactttcaacgtgaggccggaggtggtgcaggagatcccccgagacctcacgctggatgccctgctggagatgaatgaggccaaggtgaaggagacgctgcggcgctgtggggccagcggggatgagtgtggccgtctgcagtatgccctcacctgcctgcggaaggtgacaggcctgggaggggagcacaaggaggactccagttggagttcattggatgcgcggcgggaaagtggctcagggccttccacggacaccctctcagcagccagcctgccctggcccccagggagctcccagctgggcagagcaggcaacagcgcccagggcccacgctccatctccgtgtcagctctgcccgcctcagactcccccacccccagcttcagtgagggcctctcagacacctgtattcccctgcacgccagcggccggctgaccccccgtgccctgcacagcttcatcaccccgcccaccacaccccagctgcgacggcacaccaagctgaagccaccacggacgccccccccacccagccgcaaggtcttccagctgctgcccagcttccccacactcacccggagcaagtcccatgagtctcagctggggaaccgcattgatgacgtctcctcgatgaggtttgatctctcgcatggatccccacagatggtacggagggatatcgggctgtcggtgacgcacaggttctccaccaagtcctggctgtcgcaggtctgccacgtgtgccagaagagcatgatatttggagtgaagtgcaagcattgcaggttgaagtgtcacaacaaatgtaccaaagaagcccctgcctgtagaatatccttcctgccactaactcggcttcggaggacagaatctgtcccctcggacatcaacaacccggtggacagagcagccgaaccccattttggaaccctccccaaagcactgacaaagaaggagcaccctccggccatgaatcacctggactccagcagcaacccttcctccaccacctcctccacaccctcctcaccggcgcccttcccgacatcatccaacccatccagcgccaccacgccccccaacccctcacctggccagcgggacagcaggttcaacttcccagctgcctacttcattcatcatagacagcagtttatctttccagtgccatctgctggccattgctggaaatgcctccttattgcagaaagtttaaaggaaaacgctttcaacatttcagcctttgcacacgcagccccgctccctgaagctgccgacggtacccggctcgatgaccagccgaaagcagatgtgttggaagctcacgaagcggaggctgaggagccagaggctggcaagtcagaggcagaagacgatgaggacgaggtggacgacttgccgagctctcgccggccctggcggggccccatctctcgcaaggccagccagaccagcgtgtacctgcaggagtgggacatccccttcgagcaggtagagctgggcgagcccatcgggcagggccgctggggccgggtgcaccgcggccgctggcatggcgaggtggccattcgcctgctggagatggacggccacaaccaggaccacctgaagctcttcaagaaagaggtgatgaactaccggcagacgcggcatgagaacgtggtgctcttcatgggggcctgcatgaacccgccccacctggccattatcaccagcttctgcaaggggcggacgttgcactcgtttgtgagggaccccaagacgtctctggacatcaacaagacgaggcaaatcgctcaggagatcatcaagggcatgggatatcttcatgccaagggcatcgtacacaaagatctcaaatctaagaacgtcttctatgacaacggcaaggtggtcatcacagacttcgggctgtttgggatctcaggcgtggtccgagagggacggcgtgagaaccagctaaagctgtcccacgactggctgtgctatctggcccctgagattgtacgcgagatgacccccgggaaggacgaggatcagctgccattctccaaagctgctgatgtctatgcatttgggactgtttggtatgagctgcaagcaagagactggcccttgaagaaccaggctgcagaggcatccatctggcagattggaagcggggaaggaatgaagcgtgtcctgacttctgtcagcttggggaaggaagtcagtgagatcctgtcggcctgctgggctttcgacctgcaggagagacccagcttcagcctgctgatggacatgctggagaaacttcccaagctgaaccggcggctctcccaccctggacacttctggaagtcagctgagttgtaggcctggctgccttgcatgcaccaggggctttcttcctcctaatcaacaactcagcaccgtgacttctgctaaaatgcaaaatgagatgcgggcactaacccaggggatgccacctctgctgctccagtcgtctctctcgaggctacttcttttgctttgttttaaaaactggccctctgccctctccacgtggcctgcatatgcccaagtaactgctctcagaggatcccactaactgagctccctccaaggcagtctgggcagcttctaactaccttcctggacatgactgattgctcccgtgttcttctgagggctggtcttgtttttgtttgggtggctctgtctcactgctaacaccttagtgagatgccttccaccctcctgagcacaccagcctcccactgggtgtgtgcctagtgcggggcgggcggaggttgggagggtgttggcttggcttttaacctgtggggattttgtccaacaaggagtggaatgatttcagagctgccctgaggctggcaccctggtcacaggaaccctctgcgctggctcctgtctcagtcccctctgtagagttagatcagaagacacagaaagttctgtggccatgaaagataccagcttggaagggttgtgtcttcagtggcaccctcagaaaaattgtcttaaagcaaagaggtacctggctccagacaatttttctgatgaaaacaaagtctctgccccgtccccaccctgccaccctggcaaagttacttcctttacagctgcccagtgtaccatagaccagaccccaggtcagcatttgtcaagagcatggctgctgagtcccctgtggcagtcaatgcactgtttaccaaatgcaggtttctgttctccctccccagcaagacctgctgaacccagatctctggaatggggccctaggaatttgcatttcaacctgcttcccaggtggccctgatgcaccccagtattagagtttattgctaaaaggaacatgccctgtcactcctggtatcctgggagtcatgtttctcttctctctcagttctacttggagcaagagctttcctgggctgcaaatgagaaaacaattcctaggaacccacagcagtactgagcatgctgggagcttgggacttggagatgaatgagccaccgttgctgctccaagtaggactacttggagtgtagctgaggccttggacgcagtatgaccaggggcagctctgccagggctgttggccaatcagtcattttcatttcttgttggaggccaggtcctctgctgaactcatttcctagctagtgttaccctaattctgatgaagatcaatggggctataattcttgtttttgttcctctttgcagcattaacagcagcaaagttgtaccccggtttgaaaggtttggcttgggcgtcctggagtccagtaatccaaagatgtagccagccatatggtttttcgctgctgatctctttctttttaaaatgtgtttctgaaacatcccaacaaccaccacgacaaaaaaacactgcctgcccagcgctgcaaaccaggagcacacgtcctagattcagactgttggccataaaccccactcgggagatggagctgcacctgctatttcttaaaatgacaccaccaacaaccaaacctgtcatgacagacagcaaatgtttacacgtatatttctcctgagtgaacctgatgttttacaataggtaataataaaaacagtctgtgcaaaaaaaaaaaaaaaaaaaaaaaaaaaaaaaaaaaaaaaaaaaaaaaaaaaaaaaaaaaaaa

SEQ ID NO: 3291 - DNA, 1557 bp, Homo Sapiens
  NM_014239
ctcgcccgccccggaagtgcaaactgtgtggtctggcaggtgtggattccgccggtgaaggctgaaggcagctaccttaaagatgccgggatccgcagcgaagggctcggagttgtcagagaggatcgagagcttcgtggagaccctgaagcggggtggtgggccgcgcagctccgaggaaatggctcgggagaccctagggttgctgcgccagatcatcacggaccaccgctggagcaacgcgggggagctgatggagctgatccgcagagagggcaggaggatgacggccgctcagccctccgagaccaccgtgggcaacatggtgcggagagtgctcaagattatccgggaggagtatggcagactccatggacgcagcgacgagagtgatcagcaggagtccctgcacaaactgttgacatccggaggcctaaacgaggatttcagcttccattatgcccaactccagtccaacatcattgaggcgattaatgagctgctagtggagctggaagggacaatggagaacattgcagcccaggctctggagcacattcactccaatgaggtgatcatgaccattggcttctcccgaacagtagaggccttcctcaaagaggctgcccgaaagaggaaattccatgtcattgtagcagagtgtgctcctttctgccagggtcatgaaatggctgtgaatttgtccaaagcaggtattgagacaactgtcatgactgatgctgccatttttgccgttatgtcaagagtcaacaaggtgatcattggcacgaagaccatcctggccaatggggccctgagagctgtgacaggaactcacactctggcactggcagcaaaacaccattccaccccactcatcgtctgtgcacctatgttcaaactttctccacagttccccaatgaagaagactcatttcataagtttgtggctcctgaagaagtcctgccattcacagaaggggacattctggagaaggtcagcgtgcattgccctgtgtttgactacgttcccccagagctcattaccctctttatctccaacattggtgggaatgcaccttcctacatctaccgcctgatgagtgaactctaccatcctgatgatcatgttttatgaccgaccacacgtgtcctaagcagattgcttaggcagatacagaatgaagaggagacttgagtgttgctgctgaagcacatccttgcaatgtgggagtgcacaggagtccacctaaaaaaaaaatccttgatactgttgcctgcctttttagtcaccccgtaacaagggcacacatccaggactgtgtcttgcctttcagatcttaacagagcagcagggcttaacttgttgattttggagcctcttagtgacctggttgcgtctgtgtcaggaacttaaactttctggttcagtagtgtgttaaacataacactgaataccttactgggatacagatttttgctcagaaatggctatgacactttttctaggctctaccaataaaagccacttgaaggttccaaaaaaaaaaaaaaaaa

SEQ ID NO: 3292 - DNA, 1323 bp, Homo Sapiens
  NM_014241
agagctggctgcgccgagccccctgcgcgctgcacatggggcgcctgacggaagcggcggcagcgggcagcggctctcgggctgcaggctgggcagggtcccctcccacgctcctgccgctgtctcccacgtcccccaggtgcgcggccaccatggcgtccagcgacgaggacggcaccaacggcggcgcctcggaggccggcgaggaccgggaggctcccggcgagcggaggcgcctgggggtcttggccaccgcctggctcaccttctacgacatcgccatgaccgcggggtggttggttctagctattgccatggtacgtttttatatggaaaaaggaacacacagaggtttatataaaagtattcagaagacacttaaatttttccagacatttgccttgcttgagatagttcactgtttaattggaattgtacctacttctgtgattgtgactggggtccaagtgagttcaagaatctttatggtgtggctcattactcacagtataaaaccaatccagaatgaagagagtgtggtgctttttctggtcgcgtggactgtgacagagatcactcgctattccttctacacattcagccttcttgaccacttgccatacttcattaaatgggccagatataatttttttatcatcttatatcctgttggagttgctggtgaacttcttacaatatacgctgccttgccgcatgtgaagaaaacaggaatgttttcaataagacttcctaacaaatacaatgtctcttttgactactattattttcttcttataaccatggcatcatatatacctttgtttccacaactctattttcatatgttacgtcaaagaagaaaggtgcttcatggagaggtgattgtagaaaaggatgattaaatgatctctgcaaacaaggtgctttttccagaataaccaagattacctgagtccaagttttaataacaagaataaacaactttgtgaaatatcatggattgtatggtttcttaaaatataacttgagacacgtggtatttgccagtatttgtgttcctcttgtgccagatctattttttacaagaactgtgcaaatatcagtaacttttgggtaggtattgattattaggaaaataattaggtgtattatctgggggaaaaaaaaacttttgctaagttttttttgaaacatgctcaaagctttttaaatcaatatttagaaattagtttaacgatttactattatacctgctagtgatatttatgtgatatttataaatgaaaataaatgcaaaattataacaaaaaaaaaaaaaaaaaa

SEQ ID NO: 3293 - DNA, 906 bp, Homo Sapiens
  NM_014248
gtgcgctgctgcgcaggcgcggtggtcggacgacagaccgtgtgtttccaaaatggcggcagcgatggatgtggataccccgagcggcaccaacagcggcgcgggcaagaagcgctttgaagtgaaaaagtggaatgcagtagccctctgggcctgggatattgtggttgataactgtgccatctgcaggaaccacattatggatctttgcatagaatgtcaagctaaccaggcgtccgctacttcagaagagtgtactgtcgcatggggagtctgtaaccatgcttttcacttccactgcatctctcgctggctcaaaacacgacaggtgtgtccattggacaacagagagtgggaattccaaaagtatgggcactaggaaaagacttcttccatcaagcttaattgttttgttattcatttaatgactttccctgctgttacctaattacaaattggatggaactgtgtttttttctgctttgttttttcagtttgctgtttctgtagccatattgtattctgtgtcaaataaagtccagttggattctggaacggatgctctctcttgtgtatgtgaacaaagtgaacataaatgaagagtctccccttccaaggctgaaaactcagcttttgaaagtgaaatgtttgttcatcggggccagagcagggttgtcctctgagcgcatcacttagtgacgaggaatccaacagctcaaggcagagtgtggatcaccggctcccgaaaacagcagtcagcccttctttctcctgtgtgacagcagtgggcagctgaaagagggaagaatgtgggattcagtcatcaaacccagttctgagtcctggttccacagcttgggtactgatggcaatcttggccaagttgtctctctactctgaactttc

SEQ ID NO: 3294 - DNA, 4038 bp, Homo Sapiens
  NM_014252
tgggggcggtggcagggccggtgggcggtggcggctcccggtctcggctcgggcacggccctgggcaggccgcccgccagccgcaggggcgctcctgagcttcgcggggccgcagtccgggatgcctgcgcgaagggaggggcgaagggccggccgttgccgacgtgggtgttaagtggccgccccagccggcgacccggagccgagagcgggcggcggagcctgagctggacgcggccacgccggcgcggcgggatatgtggtgcctgtcataagctccagagagctgccttccacaagaccagcagaagagtgggcaaacatgaaatccaatcctgctatccaggctgccattgacctcacagcgggggctgcaggaggtacagcatgtgtactgaccgggcagccctttgacacaatgaaagtgaagatgcagacgttccctgacctgtaccggggcctcaccgactgctgcctgaagacttactcccaggtgggcttccgtggcttctacaagggtaccagtccagcactaatcgccaacatcgctgagaactcagtcctcttcatgtgctacggcttctgccagcaggtggtgcggaaagtggctggattggacaagcaggcaaagctgagtgatctgcagaatgcagccgccggttccttcgcctctgcctttgctgcactggtgctctgccccacggagctcgtgaagtgccggctgcagaccatgtatgagatggagacatcagggaagatagccaagagccagaatacagtgtggtctgtcatcaaaagtattcttaggaaagatggccccttggggttctaccatggactctcaagcactttacttcgagaagtaccaggctatttcttcttcttcggtggctatgaactgagccggtccttttttgcatcagggagatcaaaagatgaattaggccctgtacctttgatgttaagtggtggagttggtgggatttgcctctggcttgcggtatacccagtggattgtatcaaatccagaattcaagttctttccatgtctggaaaacaggcaggatttatcagaacctttataaatgttgtgaaaaatgaaggaataacggccttatattctggactgaaacctactatgattcgagcattccctgccaatggagcactctttttggcctacgaatatagcaggaagttgatgatgaaccagttggaagcatactgaagtgtcttggtgggcctgagccaagcacaggtgtttgaggactacagttcatctcagggtttcttggagtacaagaccagtgtgaagttattctgatttcttgggaattttgctttttgtcttcccttctaccctacatcttaaactttatggaagaacctctattttgcatcatatcatttctgtccataattgtactgaaatagaaaagtgaccgctcttgctcttggtaaaatatagagtggtcagtagccttatgcacctaattcaaaaggtggaatatagttctgtcagggcttttacgtaaacctccacttgtacatgcaatttggacagttatgtgttgagggaaatacagtttggtaccttgtttatttcaaatatcagaaaaacccagaggtgatcatttctcatgaagatgcttataaatggttgcttaacccattctagatgtagggtctgcttaatgtgtgtacttttctaagtggttgattattttttatttttttgatacagagtctcactctgtcacccagactggagtgcagtggcacgatctcggctcactgcaacctccgcctcctgggttcaagcgattctctcacctcagcctcctgagtagctgggattacaggtacgcgccaccatgtccagctaattttttttggtattttttgtagagacgaggtttcaccatgttgtccaggttggtctcgaactcctgacctcaagtgatccgcccacctcggcctcccaaagtgctgggattactggtgtgagccaccatgcccagccagtggttgaattttttaaaaagtgttcatggggtgcttgaaaactaaaatatccttctagatttgtaagacagtatacctgcatactggtgtggcttccacacttgagtaaaagcttcagagtaggtatcctagatttccccaagatgctctactcttaaaatagtgccattcattttctaggtgggatcatattccacgctgactatattgctaggggtggcccagagggtcaggcctttgggaaatagcatggcctttaccagcttcccttctctcccaaagaacttcccttcttgggctttagattgaggaaggggctgagtggtaggcggtgctgctgtgctctgatgaagacccatgtggctagcaacagcgcttaccttttgtctctgggtcctggcctggggccatcaatccactttgggccactcactgtctgctctgcctccaccaatcagaaacccttccaaggaacagtgagagccaaagccaagagaagccttcttccctgtttggtgattgtgtgacagtgggtgaacctctctcagagagaactagaaagaactcagtgcttgtactccacagtgagtaatgtcaggtctgacccatcctgaagcctgtcttgccatgcttttacagtgttggaggcttctacatttggtacttgcagtcagtaagtcttaatgatgactgtatatgtgatatgagtttataaagcaatggaacataagaaaagcaattgtaggccaggcgcagtggctcacgcctataatcccagcactttgggaggctgaggcgggcgggtcacaaggtcaggagttcgagaacagcctgaccaacatggtgaaaccccatctctactaaaaatacaaaaattagctgggcgtggtggcacgtgcctgtaatcccagctactcaggaggctgaggcaggagaatcgcttgaacccgggaggcagaggttgcagtgaactgagattgtgccactgcactccagactgggtgacacagcgagacttcatctcaaaaaaaaaaagaaaagaaaagcaattgtacttcactatgccatatgtatgtattcactgaccaaaaattcactgaccaaccaaccaaactccacacttcatctgatcccccatagacttggggatggacagctgttctttggccatatggtataagaggatcattcttgtcactacttaagttagcctcatcattttgtgctgctccaacaccagcagggtatctcccaataaagtgttcctaagcagcctgtatactgagtgcaagcaggctatcaattttaataatagtccataccatgtatgtgtttctgtcagcagaatgtacatgttgtacaaaacctccaggttccttaagctttttgctgtccatgaatcctctgtggcaactgtaatcacagagccagaagccagagggccagggatatgagaggctgacaaacatcaggggacatctggggaggagatccctgtcatgtctcttgtgccatggagctattatggctggtcttccatttgctttttctttaagtgaaaaccatttttctactttgcttttctctccatacttaaatggtcagtagctactgagtggtgctttatctgaataggcctggatcgaagtaaaatagaaatgggactggctttccacaggaagtaaactgcttcagagcccacagtcccctgctcagtgtccggaaagaagtcagtcatccctgttggcagtaaatcttcccacaggccgtccattagagatttaactagatatgttcaatagaaagagtctgaggcaagtggaaatgaggaacggaaacttaggttgggagaatattttttttttattcattctgtttgcttaattcagagtacagtttgtgctatttcatatctgtactccaggcagaaatataacttgaaaatactgtgtctaaagaaatttcagtgttctatcattaaattatttacttaataaaaaaaaaaaaaaaaaa

SEQ ID NO: 3295 - DNA, 1451 bp, Homo Sapiens
  NM_014254
actgcctggaaacgggctgggcctgcctcggacgccgccggtgtcgcggattctctttccgcccgctccatggcggtggatgcctgactggaagcccgagtgggatgcggctgacgcggaagcggctctgctcgtttcttatcgccctgtactgcctattctccctctacgctgcctaccacgtcttcttcgggcgccgccgccaggcgccggccgggtccccgcggggcctcaggaagggggcggcccccgcgcgggagagacgcggccgagaacagtccactttggaaagtgaagaatggaatccttgggaaggagatgaaaaaaatgagcaacaacacagatttaaaactagccttcaaatattagataaatccacgaaaggaaaaacagatctcagtgtacaaatctggggcaaagctgccattggcttgtatctctgggagcatatttttgaaggcttacttgatcccagcgatgtgactgctcaatggagagaaggaaagtcaatcgtaggaagaacacagtacagcttcatcactggtccagctgtaataccagggtacttctccgttgatgtgaataatgtggtactcattttaaatggaagagaaaaagcaaagatcttttatgccacccagtggttactttatgcacaaaatttagtgcaaattcaaaaactccagcatcttgctgttgttttgctcggaaatgaacattgtgataatgagtggataaacccattcctcaaaagaaatggaggcttcgtggagctgcttttcataatatatgacagcccctggattaatgacgtggatgtttttcagtggcctttaggagtagcaacatacaggaattttcctgtggtggaggcaagttggtcaatgctgcatgatgagaggccatatttatgtaatttcttaggaacgatttatgaaaattcatccagacaggcactaatgaacattttgaaaaaagatgggaacgataagctttgttgggtttcagcaagagaacactggcagcctcaggaaacaaatgaaagtcttaagaattaccaagatgccttgcttcagagtgatctcacattgtgcccggtcggagtaaacacagaatgctatcgaatctatgaggcttgctcctatggctccattcctgtggtggaagacgtgatgacagctggcaactgtgggaatacatctgtgcaccacggtgctcctctgcagttactcaagtccatgggtgctccctttatctttatcaagaactggaaggaactccctgctgttttagaaaaagagaaaactataattttacaagaaaaaattgaaagaagaaaaatgttacttcagtggtatcagcacttcaagacagagcttaaaatgaaatttactaatattttagaaagctcatttttaatgaataataaaagttaattatctttttgagct

SEQ ID NO: 3296 - DNA, 1247 bp, Homo Sapiens
  NM_014255
attgaaacctggactgctcgctggccggcagcgcaccgttttgaaggtcctagcccacctgggctggctcacgcgcacgactagccgctcccatacagcacgcccggactctgtcgtcgcttaaggccactcctattctacggctgacccctggtggtcacgtggatctgttcgccacgcaagtctgggtccttcggcgattgaccggggtccttgctgttcgggagcctctcctaagctgcctgttcgcgcgagagtttggaggggcgggtttggggtcggtgtctgattggggctcgcaccgcagcacgctggagtcccgcttaggtaccagttagcgtcaggggagctgggtcaggcggtcgccgggacaccccgtgtgtggcaggcggcgaagcgctctggagaatcccggacagccctgctccctgcagccaggtgtagtttcgggagccactggggccaaagtgagagtccagcggtcttccagcgcttgggccacggcggcggccctgggagcagaggtggagcgaccccattacgctaaagatgaaaggctggggttggctggccctgcttctgggggccctgctgggaaccgcctgggctcggaggagccaggatctccactgtggagcatgcagggctctggtggatgaactagaatgggaaattgcccaggtggaccccaagaagaccattcagatgggatctttccggatcaatccagatggcagccagtcagtggtggaggtgccttatgcccgctcagaggcccacctcacagagctgctggaggagatatgtgaccggatgaaggagtatggggaacagattgatccttccacccatcgcaagaactacgtacgtgtagtgggccggaatggagaatccagtgaactggacctacaaggcatccgaatcgactcagatattagcggcaccctcaagtttgcgtgtgagagcattgtggaggaatacgaggatgaactcattgaattcttttcccgagaggctgacaatgttaaagacaaactttgcagtaagcgaacagatctttgtgaccatgccctgcacatatcgcatgatgagctatgaaccactggagcagcccacactggcttgatggatcacccccaggaggggaaaatggtggcaatgccttttatatattatgtttttactgaaattaactgaaaaaatatgaaaccaaaagtacaaaaaaaaaaacaaaaaaaaaaaaaaaa

SEQ ID NO: 3297 - DNA, 5497 bp, Homo Sapiens
  NM_014258
atacacaatcatcatcttactagttctctgtgttgctcgctaaccagtcccccagttcagtagactggagcccagagcctgcttacttgtcaggtgtttattttgtcttgctttttttttttttttaaatgaagtcaaaatgccaataagaccagatctccagcagttggaaaaatgcattgatgatgctttaagaaaaaatgatttcaaacctttgaaaacacttttgcaaattgatatttgtgaagatgtgaagattaaatgcagcaaacagtttttccacaaggtggacaaccttatatgcagggaacttaataaagaggatatccacaatgtttcagccattttggtttctgttggaagatgtggcaaaaatatcagtgtattggggcaagctggacttctaacgatgataaaacaaggactaatacaaaagatggttgcctggtttgaaaaatccaaggacattattcagagtcaaggaaattcaaaagatgaagctgttctaaatatgatagaagacttagttgatcttctgctggtcatacatgatgtcagtgatgaaggtaaaaaacaagtagtggaaagtttcgtacctcgcatttgttccctggttattgactcaagagtgaatatttgtattcagcaagagattataaaaaaaatgaatgctatgcttgacaaaatgcctcaagatgcccggaaaatactctctaaccaagaaatgttaattctcatgagtagtatgggagaaaggattttagatgctggagattatgacttacaggtaggcattgtagaagctttgtgtagaatgaccacagaaaaacaaagacaagaactggcacatcagtggttttcaatggattttattgctaaggcatttaaaagaattaaggactctgaatttgaaacagattgcaggatatttctcaaccttgtaaatggcatgcttggagacaaaagaagggtctttacatttccttgtttatcagcatttcttgataaatatgagctgcaaataccatcagatgaaaaacttgaggaattttggattgattttaatcttgggagtcagactctctcattctacattgctggagataatgatgatcatcaatgggaagcagttactgtgccagaggaaaaagtacaaatatacagcattgaagtgagagaatcaaagaagctactgacaataattctgaaaaatacagtaaaaattagcaaaagagaagggaaagaattgcttttgtattttgacgcatcactagaaatcactaatgtaactcaaaaaatttttggtgcaactaaacatagggaatctatcagaaaacaaggtatttcagttgccaaaacgtcgctgcatatactttttgacgcaagtggatcacagattctagtgccagaaagtcaaatctcaccagtcggagaagagctcgttagtttaaaggaaaaatcaaagtccccaaaggaatttgctaaaccttcaaaatatatcaaaaacagtgacaaagggaatagaaataatagtcagcttgagaaaactactcctagcaaaagaaaaatgtctgaagcatcaatgattgtttctggtgcagatagatacactatgagaagtccagtgcttttcagcaacacatcaataccaccacgaagaagaagaattaaaccaccactgcaaatgacgagctctgcagagaaacctagtgtttctcaaacatcagaaaatagagtggataatgctgcatcactgaaatctagatcatcagaaggaagacatagaagagataatatagacaaacatatcaaaactgctaagtgtgtagaaaacacagaaaataagaatgttgaattcccaaaccaaaattttagtgaactccaggatgttataccagattcacaggcagcggaaaaaagagatcatactatattacctggtgttttagacaacatctgtggaaataaaatacacagcaaatgggcatgttggacacctgtaacaaacattgaactatgtaataaccaaagagcaagtacttcgtcaggagacacattgaatcaagatattgttataaataaaaaacttactaaacaaaaatcatcctcttcaatatctgatcataattctgaaggaacaggaaaagtgaaatataagaaagaacaaaccgaccatatcaaaatagataaagcagaagtagaagtttgcaagaaacacaatcagcaacaaaatcatcctaaatattcagggcagaaaaatactgaaaatgccaagcagagtgattggcctgttgaatctgaaactacttttaaatcggttctcctaaataagacaattgaagaatcgctgatatataggaagaaatacatattgtcaaaagatgtgaatactgctacttgcgataaaaatccatctgctagcaaaaatgtgcaaagtcatagaaaagcagagaaagaattgacttctgagcttaattcctgggattcgaaacaaaaaaaaatgagagaaaagtcaaaagggaaagaatttaccaatgtagcagaatccttgataagccaaatcaataaaagatacaaaacaaaagatgacatcaagtctacaagaaaattaaaggagtctttgattaacagtggtttttcaaacaaacctgttgtacaactcagtaaggaaaaagttcagaaaaaaagctacagaaaactgaagactacctttgttaatgttacttctgaatgcccagtgaatgatgtttacaattttaatttgaatggagctgatgaccctatcataaaacttggaatccaagagtttcaagctacagctaaagaagcttgtgcggataggtcaattagattggtaggtccaaggaatcatgatgaacttaaatcttctgtcaaaacaaaagataaaaaaattataacaaatcatcaaaagaaaaatctgtttagtgatactgaaacagagtacagatgtgatgacagcaagactgatattagctggctaagagaaccgaaatcaaaaccacagctaatagactatagcagaaataaaaatgtgaagaatcataaaagtggaaaatcaagatcatccttggaaaagggacagccaagctctaaaatgacacccagtaaaaatatcacaaaaaagatggacaagacaattccggaaggaagaatcagacttccacgaaaagcaaccaaaacaaaaaaaaactataaagatctctcaaattcagaatcagagtgtgaacaagaattttcacattcatttaaagagaacataccagtaaaggaggagaatatccattccagaatgaaaacggtaaagctaccaaagaaacaacagaaagtcttctgtgctgaaacagaaaaggaactatcaaaacaatggaaaaactcatctctactaaaagatgctatacgagataattgccttgacttatctcccagatctttatctggcagtccatcatctatagaagtaacgagatgtatagagaaaataacagaaaaggattttactcaggattatgactgcataacaaaatctatatcaccttatccaaaaacttcatcacttgaatccttaaatagtaacagtggagttggaggtacaataaagtcacccaaaaacaatgagaaaaacttcctgtgtgcaagtgaaagttgttcaccaattccacgaccactgtttttgcccagacatactccaactaagagtaatactattgtaaatagaaaaaaaataagttctctggtacttacacaagaaacacaaaacagtaacagctattcagatgtaagcagttatagttcagaagaacggtttatggaaattgaatctccacatatcaatgaaaattatatacaaagcaaaagagaggaaagtcatttagcatcttcattatccaagtctagtgaaggaagagagaaaacgtggtttgacatgccctgtgatgctactcatgtatcaggccccacccaacatcttagtcgcaaaagaatatatatagaagataatctaagtaattccaatgaagtagaaatggaagagaaaggagaaaggagagcaaacttgcttcccaaaaaactgtgtaaaattgaagatgcagatcatcatatccacaaaatgtctgaaagtgtatcttcattatcaacaaatgacttttctattccttgggagacctggcaaaatgaatttgcagggatagagatgacttatgagacttacgagaggctcaattcagaatttaagagaaggaataatatccgacataaaatgttgagttattttactacgcagtcttggaaaacagctcagcaacatctgagaacaatgaatcatcaaagtcaggactctaggattaaaaaacttgataaattccaattcattatcatagaggagctggagaattttgaaaaagattcacagtctttaaaagatttggaaaaggaatttgtggacttttgggaaaagatatttcagaagttcagtgcatatcaaaaaagcgaacaacagaggcttcatcttttgaaaacttcattggctaaaagtgtcttctgtaatactgatagtgaagaaactgtttttacatccgagatgtgtttgatgaaagaagatatgaaagtgctgcaagacaggcttcttaaggacatgctagaagaggagcttcttaatgtacgcagagaactgatgtcagtattcatgtctcatgaaagaaatgctaatgtgtgaaatctagtttttatcaccatactttatctaattattattctctgtatataactgaggaaataagaatagtcctacaaagagaaaaatatacatgtcaccgaagcaagtgtaccctttataggaaccctcaaattaaaaaaaaatgtcttttaatggatgagagggaaccactataacatgagtccaagcccagaagacttctgtctatacaatatttttttttaattttggagataaaagctttaagaaactttttgagttaattatactcataaaatgagtttctttaataaattaaattttattgtgtaaaatgtattattacataaaatgtgtttttgaatcaatgcagtttggggatgaatataattaaaatatgtttaataacttagaattcaactaataaaaatttagccacacttacaagggggaggaagtccctagtttaaaatgtataactgagtggtagatcagtactttcagcacactgttggaaacatttattcagatatggctctaatgtattaggaagcactaaatggcctaaaaaagctactacattgcctaaatatgttaattcaatatagaagtcctatttcataaccaggctgtttgacaaatacttttaatctagtagtcattgtaatatcttgctagattaatttataaaaatgagtatacatttgatttgcttttaatgaagttgaaataaatgcttatgtcacttgaataaatataaatcattataaaaaaaaaaaaaaaaaa

SEQ ID NO: 3298 - DNA, 3220 bp, Homo Sapiens
  NM_014265
tcactggagaggaggcagggacagacccagcagcacccacctgagcgagaagagcagacaccgtgctcctggaatcacccagcatgttgcaaggtctcctgccagtcagtctcctcctctctgttgcagtaagtgctataaaagaactccctggggtgaagaagtatgaagtggtttatcctataagacttcatccactgcataaaagagaggccaaagagccagagcaacaggaacaatttgaaactgaattaaagtataaaatgacaattaatggaaaaattgcagtgctttatttgaaaaaaaacaagaacctccttgcaccaggctacacggaaacatattataattccactggaaaggagatcaccacaagcccacaaattatggatgattgttattatcaaggacatattcttaatgaaaaggtttctgacgctagcatcagcacatgtaggggtctaaggggctacttcagtcagggggatcaaagatactttattgaacctttaagccccatacatcgggatggacaggagcatgcactcttcaagtataaccctgatgaaaagaattatgacagcacctgtgggatggatggtgtgttgtgggcccacgatttgcagcagaacattgccctacctgccaccaaactagtaaaattgaaagacaggaaggttcaggaacatgagaaatacatagaatattatttggtcctggataatggtgagtttaaaaggtacaatgagaatcaagatgagatcagaaagagggtatttgagatggctaattatgtcaacatgctttataaaaagctcaatactcatgtggccttagttggtatggaaatctggactgacaaggataagataaagataaccccaaatgcaagcttcaccttggagaatttttctaaatggagggggagtgttctctcaagaagaaagcgtcatgatattgctcagttaatcacagcaacagaacttgctggaacgactgtgggtcttgcatttatgtctacaatgtgttctccttattctgttggcgttgttcaggaccacagcgataatcttcttagagttgcagggacaatggcacatgaaatgggccacaactttggaatgtttcatgacgactattcttgcaagtgtccttctacaatatgtgtgatggacaaagcactgagcttctatatacccacagacttcagttcctgcagccgtctcagctatgacaagttttttgaagataaattatcaaattgcctctttaatgctccattgcctacagatatcatatccactccaatttgtgggaaccagttggtggaaatgggagaggactgtgattgtgggacatctgaggaatgtaccaatatttgctgtgatgctaagacatgtaaaatcaaagcaacttttcaatgtgcattaggagaatgttgtgaaaaatgccaatttaaaaaggctgggatggtgtgcagaccagcaaaagatgagtgcgacctgcctgaaatgtgtaatggtaaatctggtaattgtcctgatgatagattccaagtcaatggcttcccttgccatcacgggaagggccactgcttgatggggacatgccccacactgcaggagcagtgcacagagctgtggggaccaggaactgaggttgcagataagtcatgttacaacaggaatgaaggtgggtcaaagtacgggtactgtcgcagagtggatgacacactcattccctgcaaagcaaatgataccatgtgtgggaagttgttctgtcaaggtgggtcggataatttgccctggaaaggacggatagtgactttcctgacatgtaaaacatttgatcctgaagacacaagtcaagaaataggcatggtggccaatggaactaagtgtggcgataacaaggtttgcattaatgcagaatgtgtggatattgagaaagcctacaaatcaaccaattgctcatctaagtgcaaaggacatgctgtgtgtgaccatgagctccagtgtcaatgtgaggaaggatggatccctcccgactgcgatgactcctcagtggtcttccacttctccattgtggttggggtgctgttcccaatggcggtcatttttgtggtggttgctatggtaatccggcaccagagctccagagaaaagcagaagaaagatcagaggccactatctaccactggcaccaggccacacaaacagaagaggaaaccccagatggtaaaggctgttcaaccccaagagatgagtcagatgaagccccatgtgtatgatctgccagtagaaggcaatgagcccccagcctcttttcataaagacacaaacgcacttccccctactgttttcaaggataatccagtgtctacacctaaggactcaaatccaaaagcatgaagcaacagctaagcaagaactaatggctaaattatcaacttggaaaactggaaaatctggatggcagagaaatatactatctatctcaccagtatttgctctcgactcaagaaggttaacattttctgattcatgttagactttgaagagactaaagaaaattttcaagaggaacatatgcctgagaacctttgcatgaatttaaaatttcaattatccattcttataagaaggaagatgattgtaaagaaatatctccgaagttaaaatctgtaataggaattgattcattctctaatgaaaacaaaacataaaaacatcacactaatcttggaggaataagaaaaattgtacatccattaaatgtacaattgattgcaacatcttgattgttttaaccattaacttgtcaaattacaatcacagttaagaaaatgatgtaaaattctgttttgtggatctctttcctagattagcttctgaaatcattattagctatatcatttgaggttttctacaatttggtataactaagaatttaaaaatgttttatcatatatatttgtataattaattactggcatggttaaagtggttttcactttttaaatggagaaaatttcagttaaattaataggataaaccaggttgcgaactggtgacctgtaggccatgtttgcactgcaaatatatttggtctgaatgatattgatattggacacatagtacttttacatgttttgaatgtattgctaatatttaaaaattgagagatcttgcataaacaatagattcccagctttgtcaga

SEQ ID NO: 3299 - DNA, 524 bp, Homo Sapiens
  NM_014266
cttgacaccagcagggtgacatccgctattgctacttctctgctcccccacagttcctctggacttctctggaccacagtcctctgccagacccctgccagaccccagtccaccatgatccatctgggtcacatcctcttcctgcttttgctcccagtggctgcagctcagacgactccaggagagagatcatcactccctgccttttaccctggcacttcaggctcttgttccggatgtgggtccctctctctgccgctcctggcaggcctcgtggctgctgatgcggtggcatcgctgctcatcgtgggggcggtgttcctgtgcgcacgcccacgccgcagccccgcccaagaagatggcaaagtctacatcaacatgccaggcaggggctgaccctcctgcagcttggacctttgacttctgaccctctcatcctggatggtgtgtggtggcacaggaacccccgccccaacttttggattgtaataaaacaattgaaacaccaaaaaaaaaaaaaaaaa

SEQ ID NO: 3300 - DNA, 3209 bp, Homo Sapiens
  NM_014268
gtcagctgccagagggcggggccgcaggagggcggggcgcgagcgagagctgggagaaggcagtgagcgagcaggcggcaggcacggtccgtgcggagcaggcgagcgagcgggaagacgcagccaccttcctcaccagccagcccacagcggtttgttccccttctcgggagtgcgccaatgcctgggccgacccaaaccctgtccccaaatggcgagaacaacaacgacatcatccaggataataacgggaccatcattcctttccggaagcacacagtgcgcggggagcgttcctacagttggggaatggcggtcaatgtgtattctacctcgataacccaagagactatgagcagacatgacatcattgcatgggttaatgacatagtatctttaaactacacaaaagtggaacagctttgttcaggagcggcctattgccaattcatggacatgctcttccctggctgcattagtttgaagaaagtaaaatttcaagcaaagctggaacatgaatatattcacaattttaaacttctgcaagcatcatttaagcgaatgaacgttgataaggtaattccagtggagaagctagtgaaaggacgtttccaggacaacctggattttattcaatggtttaagaaattctatgatgctaactacgatgggaaggagtatgatcctgtagaggcacgacaagggcaagatgcaattcctcctcctgaccctggtgaacagatcttcaacctgccaaaaaagtctcaccatgcaaactcccccacagcaggtgcagctaaatcaagtccagcagctaaaccaggatccacaccttctcgaccctcatcagccaaaagggcttcttccagtggctcagcatccaaatccgataaagatttagaaacgcaggtcatacagcttaatgaacaggtacattcattaaaacttgcccttgaaggcgtggaaaaggaaagggatttctactttgggaagttgagagagatcgagctactctgccaagaacacgggcaggaaaatgatgacctcgtgcagagactaatggacatcctgtatgcttcagaagaacacgagggccacacagaagagccggaagcagaggagcaagcccacgaacagcagcccccgcagcaggaagagtactgacccaccccggctgctcttgacacttccattgtgtgtgggaacgtttcttctggagaattggaacatgtgtggccccaagctcaacagaaaccagttgttcccaatctgccgttaccatcaacgcactgttgcatatgccagccactgcgcttggttcccattttctttgccaaggtgtattagcggacggccctctggccacctacccgagagatcgtagggtcacatacatccaacttcaccacttggctgcttgagattggttctgctcttttcttcatttctttccagaacaactctttcccaccccaacaccactgccaccacccctctttttatcctggtgtgaaacaatggtaatttgatatatggtatttatattggcatttttcaacccagtgtcactagatgtcacacacatttgtggtgctttgatgtttgcaagtctaacctctgaacataaatttggtcaaataattggaacaaagggaaacagatacttgatatgaaagccataatgacggtgacttgtgtcgtgggggaaaacataaggtcattttctccctctactcacaatactaaagggaaaaaatggattcaaagctaggatttcagggcccagcagtgttcctccatcagcatgttagacaactacacagtatgttgttagttttgaaagacattcactcaaggaaaacaccatctcaactttgcccgctcaccatgtcccttgcccccatgtagcccatttcccaggttatgctcttttctttctcagggtcctctttggtgggcagccactccccgagatgttgccatcagttttctgcagtccaaagagggtatggttaggtacgggtcttcctgcctcattcctcttcctctttgtgtaggtttcagccacaaaactgtcattcactctaggggacccctactaaagggtaacttcaggtgtgcagccctgagctccaaggctctgcaccatgccacacacttgctgtaaggctagaagtgaagaccttattaataggagcataattgcgagggagaatcatggttctgcagtctggtgtagacactggaataacagcacagaaaaatctatgactcccaatatcttctagaataaagaattttccctctttaacacaagggccctccttgtcattgaccttagctaaaccatggcaattcataaatagaggaaacattaatgaattaaaagcattccttattttttaactaatatttgtacattttcttagtctctttccaagtctttgcctcttttttttctttatttttattttttcctttgacagatggtatcccttcctggatcattcatttcaccttggtttctaactttaggtttactttcacttgttatttgacttagcaggtgcaacaaaaacaagaaacaaatgtgcccaccccactttccgcttaactgaaaagcttaaaataaatttctgaattatgtatcctgaagctttgaaatttctttattaatcgatgaaatatgaattctaaattctagcattgaagcttttcaccaaaagaagtctctccaaaataaatcttttgcagcaaagtgatatttattgagttatgtggaaaagatggcttgtatttttcagattattacaacacactgtgcagaattagacagatgttccgtggtgtttggtttccctttcttctctctcctgctcactctgcattatagcagcagcttatttctctaaggctggacagcctggctctcggcagtgacgtcctcccacacctggtcacaagtagtagtggctgtgctatacccagcatcatgcttaacagcgtgttgcccttctgagcctgttgtactcactgatctctttaaaaacaaaaaatagctcttgtaaaaggtcacaataactctatgcacctgatactgcagtggttcctaggccattcttcatctgctctggacatctcagtcatacccaatgctcagtggatcatgaccaaactcctgtcatgtggatgcacgtgagtgggtagca

SEQ ID NO: 3301 - DNA, 2879 bp, Homo Sapiens
  NM_014279
atcctgtcccagcctgcttccccgccggccgccgccctcctccccgggagagagcgaggcgcgcgggtccctctgcgccacccccgcccccgccccttccgagcaaacttttggcacccaccgcagcccagcgcgcgttcgtgctccgcagggcgcgcctctctccgccaatgccaggcgcgcgggggagccattaggaggcgaggagagaggagggcgcagctcccgcccagcccagccctgcccagccctgcccggaggcagacgcgccggaaccgggacgcgataaatatgcagagcggaggcttcgcgcagcagagcccgcgcgccgcccgctccgggtgctgaatccaggcgtggggacacgagccaggcgccgccgccggagccagcggagccggggccagagccggagcgcgtccgcgtccacgcagccgccggccggccagcacccagggccctgcatgccaggtcgttggaggtggcagcgagacatgcacccggcccggaagctcctcagcctcctcttcctcatcctgatgggcactgaactcactcaagtgctgcccaccaaccctgaggagagctggcaggtgtacagctctgcccaggacagcgagggcaggtgtatctgcacagtggtcgctccacagcagaccatgtgttcacgggatgcccgcacaaaacagctgaggcagctactggagaaggtgcagaacatgtctcaatccatagaggtcttggacaggcggacccagagagacttgcagtacgtggagaagatggagaaccaaatgaaaggactggagtccaagttcaaacaggtggaggagagtcataagcaacacctggccaggcagtttaaggcgataaaagcgaaaatggatgaacttaggcctttgatacctgtgttggaagagtacaaggccgatgccaaattggtattgcagtttaaagaggaggtccagaatctgacgtcagtgcttaacgagctgcaagaggaaattggcgcctatgactacgatgaacttcagagcagagtgtccaatcttgaagaaaggctccgtgcatgcatgcaaaaactagcttgcgggaagttgacgggcatcagtgaccccgtgactgtcaagacctccggctcgaggttcggatcctggatgacagaccctctcgcccctgaaggcgataaccgggtgtggtacatggacggctatcacaacaaccgcttcgtacgtgagtacaagtccatggttgacttcatgaacacggacaatttcacctcccaccgtctcccccacccctggtcgggcacggggcaggtggtctacaacggttctatctacttcaacaagttccagagccacatcatcatcaggtttgacctgaagacagagaccatcctcaagacccgcagcctggactatgccggttacaacaacatgtaccactacgcctggggtggccactcggacatcgacctcatggtggacgagagcgggctgtgggccgtgtacgccaccaaccagaacgctggcaacatcgtggtcagtaggctggaccccgtgtccctgcagaccctgcagacctggaacacgagctaccccaagcgcagcgccggggaggccttcatcatctgcggcacgctgtacgtcaccaacggctactcagggggtaccaaggtccactatgcataccagaccaatgcctccacctatgaatacatcgacatcccattccagaacaaatactcccacatctccatgctggactacaaccccaaggaccgggccctgtatgcctggaacaacggccaccagatcctctacaacgtgaccctcttccacgtcatccgctccgacgagttgtagctccctcctcctggaagccaagggcccacgtcctcaccacaaagggactcctgtgaaactgctgccaaaaagataccaataacactaacaataccgatcttgaaaaatcatcagcagtgcggattctgacatcgagggatggcattacctccgtgtttctccctttcgagccggcgggccacagacgtcggaagaaactcccgtatttgcagctggaactgcagcccacggcgccccggttttcctccccgccctgtccctctctggtcaaacaacatactaaagaggcgaggcaatgactgttggccagttctcaccggggaaaaacccactgttaggatggcatgaacatttccttagatcgtggtcagctccgaggaatgtggcgtccaggctctttgagagccatgggctgcacccggccgtaggctagtgtaactcgcatcccattgcagtgccgtttcttgactgtgttgctgtctcttagattaaccgtgctgaggctccacatagctcctggacctgtgtctagtacatactgaagcgatggtcagagtgtgtagagtgaagttgctgtgcccacattgtttgaactcgcgtaccccgtagatacattgtgcaacgttcttctgttattcccttgaggtggtaacttcgtatgttcagtttatgcgatgattgttgtaaatgcaatgccgtagtttggattaataagtggatggtttttgtttctaaaaagaaaaaaaaaatcagtgttcacccttatagagacatagtcaagttcatgttgataataatcaaaggaattactctcttcttgttaaattagctaaatcatgtaaccgcagataggaagggctcgcctggggaaactctggtttccgatgggacaggaaagtcatacgggcaacagtatgcggaaagtacgttttttaagtaaaaaacaaaggcaaactttgtactatccagttatctaaggaacaataaaaacattaggagatcttttaaaaa

SEQ ID NO: 3302 - DNA, 1765 bp, Homo Sapiens
  NM_014280
gcagaagggtcacgtggtggctgggccggggaaatggcggcttcaggagagagcgggacttcaggcggcggaggcagcaccgaggaagcatttatgaccttctacagtgaggtgaaacaaatagagaagagagactcggttctaacttcgaaaaatcagattgaaagactgacccgtcctggttcctcttacttcaatttgaacccatttgaggttcttcagatagatcctgaagttacagatgaagaaataaaaaagaggtttcggcagttatccatcttggtgcatcctgacaaaaatcaagatgatgctgacagagcacaaaaggcttttgaagctgtggacaaagcttacaagttgctactggatcaggagcaaaagaagagggccctggatgtaattcaggcaggaaaagaatacgtggaacacactgtgaaagagcgaaaaaaacaattaaagaaggaaggaaaacctacaattgtagaggaggatgatcctgagctgttcaaacaagctgtatataaacagacaatgaaactctttgcagagctggaaattaaaaggaaagagagagaagccaaagagatgcatgaaaggaaacgacaaagggaagaagagattgaagctcaagaaaaagccaaacgggaaagagagtggcagaaaaactttgaggaaagtcgagatggtcgtgtggacagctggcgaaacttccaagccaatacgaaggggaagaaagagaagaaaaatcggaccttcctgagaccaccgaaagtaaaaatggagcaacgtgagtgaccgcccaaggtcacaggcacagaacctttcccctgctatctcccttcctgcttcgaaggactcattctttcctcccacttccaccccaacatagagtagtatttgctttttagtccattttgttttcaatacgatttaatatcgatcagagtaattcttttgtacattgaaatgaggggcttggtttaaaaaaagacctttccctctccctgcccctagaacaaccagtattagaaggtgccaccattggtgctgccttctcttcccacagcctgtaactcagtgttttgtacttcactgaattgtgatggttagaaacttcgtggatagtttgtggaaatcatccaattaaacatactgcttaaaacagtgttgctgtgacttcagagacaagcctggaaggggcaccttaggaagccccttcgcttcagttgctcgcttctgggtgtgctcccttcgaaggcccagataagacagggaacacttgtgagcacacagagcagcatctgatgccctgtggtgtttggcatgtgccccctgtctactgaccaatcagtgtggcatgaggcccacgccacccaaacctttcactttccaaagagctagccgtcctccacccagtaccatgtcctagcctgtctgcatttgttagtggtaatattctttatgtataataaatttttatacccaagccattgatgtacttttccttgtactctcccttgtgggtcccttgtctggcttggctgaaccccaaaatgctttggggttggacagacctggctgaaccttagtttcttcatctatgaaatgggaatatgaattactgcagcagcttttagggcagatttgccatggcatatacaaggtaactaccatagtgctccttgggtattgccaatatcctattatttctgtgtaaaatgaagatactgattgttttgaggattaaatgaagtaatatatgaaa

SEQ ID NO: 3303 - DNA, 1853 bp, Homo Sapiens
  NM_014281
atcgcgcgagacagcggaaggagcaagagtgggaggcgcgcgcggaggccgcgacggacgcaagatggcgacggcgaccatagctctccaggtcaatggccagcaaggaggggggtccgagccggcggcggcggcggcagtggtggcagcgggagacaaatggaaacctccacagggcacagactccatcaagatggagaacgggcagagcacagccgccaagctggggctgcctcccctgacgcccgagcagcaggaggcccttcagaaggccaagaagtacgccatggagcagagcatcaagagtgtgctggtgaagcagaccatcgcgcaccagcagcagcagctcaccaacctgcagatggcggctcagcggcagcgggcgctggccatcatgtgccgcgtctacgtgggctctatctactatgagctgggggaggacaccatccgccaggcctttgccccctttggccccatcaagagcatcgacatgtcctgggactccgtcaccatgaagcacaagggctttgccttcgtggagtatgaggtccccgaagctgcacagctggccttggagcagatgaactcggtgatgctggggggcaggaacatcaaggtgggcagacccagcaacatagggcaggcccagcccatcatagaccagttggctgaggaggcacgggccttcaaccgcatctacgtggcctctgtgcaccaggacctctcagacgatgacatcaagagcgtgtttgaggcctttggcaagatcaagtcctgcacactggcccgggaccccacaactggcaagcacaagggctacggcttcattgagtacgagaaggcccagtcgtcccaagatgctgtgtcttccatgaacctctttgacctgggtggccagtacttgcgggtgggcaaggctgtcacaccgcccatgcccctactcacaccagccacgcctggaggcctcccacctgccgctgctgtggcagctgctgcagccactgccaagatcacagctcaggaagcagtggccggagcagcggtgctgggtaccctgggcacacctggactggtgtccccagcactgaccctggcccagcccctgggcactttgccccaggctgtcatggctgcccaggcacctggagtcatcacaggtgtgaccccagcccgtcctcctatcccggtcaccatcccctcggtgggagtggtgaaccccatcctggccagccctccaacgctgggtctcctggagcccaagaaggagaaggaagaagaggagctgtttcccgagtcagagcggccagagatgctgagcgagcaggagcacatgagcatctcgggcagtagcgcccgacacatggtgatgcagaagctgctccgcaagcaggagtctacagtgatggttctgcgcaacatggtggaccccaaggacatcgatgatgacctggaaggggaggtgacagaggagtgtggcaagttcggggccgtgaaccgcgtcatcatctaccaagagaaacaaggcgaggaggaggatgcagaaatcattgtcaagatctttgtggagttttccatagcctctgagactcataaggccatccaggccctcaatggccgctggtttgctggccgcaaggtggtggctgaagtgtacgaccaggagcgttttgataacagtgacctctctgcgtgacagtggtccctctccccggacttgcacttgttccttgtttcctctgggttttatagtgatacagtggtgtccccggggccaggcgcgctctgcccagcccagcctacagtgcggataaaggtgcggatgctgctggccctgaaaaaaaaaaaaaaaaaaa

SEQ ID NO: 3304 - DNA, 2708 bp, Homo Sapiens
  NM_014282
gccgcgggggcgggcgccggtaggggccggacagggtagggcccggagggcggtggcggcggagcgggcggcatgggtcctggccgccggcttcgctgagacgcgctcgcgtgggctgccctcccgggcccgcagtggtcgcggcggcatgaagggcgctctggggagtcccgtggctgccgctggcgccgcgatgcaggagagtttcggctgcgtggtggccaaccgcttccatcagctgctggacgacgagtcggacccgttcgacatcctgcgcgaggccgagcgccggcgccagcagcagctgcagcgcaagaggcgcgacgaggcggcggcggcggccggggccggtccccgcggcggcaggagcccagccggggcctcgggccacagagccggcgcgggcggccggagggagtcgcagaaggagcgcaagagcctcccggcgcccgtcgctcagcggcccgatagccccgggggcggcctgcaggcgccgggccagaagcggactcctagaagaggggagcagcaaggatggaatgacagccgtgggccggaggggatgctcgaaagagctgagcggagatcctacagggaataccgaccctatgagacagagaggcaggcagacttcacagctgagaagtttccagatgaaaaaccaggtgataggtttgatcgagacagaccgttgagaggacgtggaggcccgagagggggtatgcgcggcagaggcagaggtggccctgggaacagagtttttgacgcttttgaccagagaggaaagcgagaatttgaaagatatggtgggaatgacaaaatagcagtcagaactgaagacaacatgggtggatgtggagttcgaacctggggatcgggtaaagataccagtgatgtggagccaactgcaccgatggaggaacccacagtggtggaggagtcccagggcaccccggaagaggagtctccagccaaagttcctgagttggaggtagaagaagaaacccaagttcaagagatgactttagatgagtggaaaaatcttcaagaacagaccagaccaaagcctgagtttaacatccggaaaccagaatccactgttccttccaaagccgtggtgattcacaagtcaaaatacagagatgatatggtaaaagatgactatgaggacgattcccatgttttccggaaacccgccaatgacatcacatcccagctggagattaattttggtaacctccctcgtcctgggcgtggagccagaggaggcacccggggaggccggggaaggatcaggagggcagagaactatggacccagagcagaagtggtgatgcaagatgttgcccccaacccagatgacccggaagatttccctgcgctgtcttgaaagagccctgtttcccagcaccgcggagctgcactgcacacctgtggggagacttttccagctgggccaagggagtcagactctaagaacaatagatgttgcttttcccgtgtcatgtaaatttgttgcacttttttgggctgagctgttagaggggcttctccagaggctcgagagcaggccatttcccaagaagatgaagaatggtgactgtgtttttattgaaggaatttcaaatgaagaataatgtttaaaatgtgtatatagagatagtatagactcctccgcggaagcatggagggaaaggaggttgtaaaatagactccatggagactcttaggaagcagtagattcccgggggctgtgcctttagcgttagaggaaacacatagagctggaactgttaatggaaagcagtcacagctgagttttcggagaccaagaaattaaaatacaattgcacttactgtttacttgtaaatgttatcttctctcctggaatattttgagttctggttttcacttaaccaatcatttaaaaatcgctattgtgtagccactggccaccactctgtgacacagaatcagagaaagcgttgatttttaatggtgatttaaactacctcgtggtttctgtgtgtgtgcacacacacatctagtgtttgggtggtttttaggaagaatattaagtatgtgacttcaaaaaccatgttatttaacctgccaatcaaatggaaagggatcatggcaaaagcaaataccgcatccttttcttccgcagaactagagtcagagttcggcagctgcgtacaaaggcctctgccctcggcttgagcaaaagttgtaaataactagtatttattaagcacttataagcagtttttctcacttagtcctggctccagttctagagttcctctttattgcttttggtgaaagtttggggttgggggtacacctcagaggttcagtaattcacctggagtcccaccctgaacagagctggacccagagccacacacgcccgggaacacacactgtgctggggaggaagtgggcctaggagggcctgcaggtccaggcagctgtagagctgctagaagctggggtgttgctctccccgctttctcatagacacagaggtactgtctgcctgttgtcacacagttcatatgctcgcttgagatggaatctgaaccttggtcccaggatctgtgctttttcccactttgccacactgtctaaggtggctttgaactggaacccaagtgcaaataaaggttggtattcgctcctgaaaaaaaaaaaaaaaaaaaaa

SEQ ID NO: 3305 - DNA, 3718 bp, Homo Sapiens
  NM_014284
agccaggagtgggcaacgcggcgtgagcagcggcccgaggctcccggagcatcgcgctgggagaagacttcgccgctcggggccgcagcctggtgagctcagcccccttcgggccctcccctgcatcccagccggggcctctccgagccggcgctgatcgatgccgacacaccccggggaccctatcgcgactccatcgcgccatatcgcgacaccatcgtgccctgtcgagactccattttgtcacagcccttttcaatatatatcttttttttttttaatttgccctgtcatctttgggggctgtctcccatgtcgtgattttgacgtgatctctccgtgacatcaccgcgccatcgtgaagtgtgatctcatcgccgccctgtcgtgacttcatcaatgtcgtgttgtgacctggctgcggcgggacagttgggcaaggcgagcatcatggcctcggattgcgagccagctctgaaccaggcagagggccgaaaccccaccctggagcgctacctgggagccctccgtgaggccaagaatgacagcgagcagtttgcagccctgctgctagtgaccaaggcagtcaaagcaggtgacatagatgccaaaactcggcggcggatcttcgatgctgtcggcttcaccttccccaatcgtctcctgaccaccaaggaggcgccggatggctgccctgaccatgttctgcgggctttgggtgtggccctgctggcctgcttctgcagtgaccctgaactggccgcccatccccaagtcctgaacaagattcccattcttagcaccttcctcacagcccggggggacccggacgatgctgcccgccgctccatgattgatgacacctaccagtgcctgacggctgtagcaggcacacccagagggcctcggcacctcattgctggtggcaccgtgtctgccctatgccaggcatacctggggcacggctatggctttgaccaggccctggcactcctggtggggctgctggctgctgccgagacacagtgctggaaggaggcggagcccgacctgctggccgtgttgcggggcctcagtgaggatttccagaaagctgaggatgccagcaagtttgagctctgccagctgctgcccctctttttgcccccgacaaccgtgccccctgaatgctaccgggatctgcaggccgggctggcacgcatcctgggaagcaagctgagctcctggcagcgcaaccctgcactgaagctggcagcccgcctggcacacgcctgcggctccgactggatcccggcgggcagctccgggagcaagttcctggccctgctggtgaatctggcgtgcgtggaagtgcggctggcactggaggagacgggcacggaggtgaaagaggatgtggtgaccgcctgctatgccctcatggagttggggatccaggaatgcactcgctgtgagcagtcactgcttaaggagccacagaaggtgcagctcgtgagcgtcatgaaggaggccataggggctgttatccactacctgctgcaggtggggtcagagaagcagaaggagccctttgtgtttgcctcggtgcggatcctgggtgcctggctggccgaggagacctcatccttgcgtaaggaggtgtgccagctgctgcccttcctcgtccgctatgccaagaccctctacgaggaggccgaggaggccaatgacctttcccagcaggtggccaacctggccatctcccccaccaccccagggcccacctggccaggagacgctctccggctcctcctgcctggctggtgccacctgaccgttgaagatgggccccgggagatcctgatcaaggaaggggccccctcgcttctgtgcaagtatttcctgcagcagtgggaactcacatcccctggccacgacacctcggtgctgcctgacagcgtggagattggcctgcagacctgctgccacatcttcctcaacctcgtggtcaccgcaccggggctgatcaagcgtgacgcctgcttcacatctctaatgaacaccctcatgacgtcgctaccagcactagtgcagcaacagggaaggctgcttctggctgctaatgtggccaccctggggctcctcatggcccggctccttagcacctctccagctcttcagggaacaccagcatcccgagggttcttcgcagctgccatcctcttcctatcacagtcccacgtggcgcgggccaccccgggctcagaccaggcagtgctagccctgtcccctgagtatgagggcatctgggccgacctgcaggagctctggttcctgggcatgcaggccttcaccggctgtgtgcctctgctgccctggctggcccccgctgccctgcgctcccgctggccgcaggagctgctccagctgctaggcagtgtcagccccaactctgtcaagcccgagatggtggccgcctatcagggtgtcctggtggagctggcgcgggccaaccggctgtgccgggaggccatgaggctgcaggcgggcgaggagacggccagccactaccgcatggctgccttggagcagtgcctgtcagagccctgaggggtgtccaccggggacagacccaggggcgggcagagagggaaggagggaggaggcatcttccctgaagcccccaatctggcccccccctccccagacttcctccccaaaacaccccagctttctggcttttctgagggcaagggcatggtgcccacccctcaagtgtaaggaactgcgttccgcccctcaggcccccatgggggcagggatcggcttggaaatcaacgtggttgtccccgccaggccggggaaggttggagcagcccccagggaggggggcactaggtgtcattgtgcccgatgtctggctcccctgcaggagggaggctccagggtaagacagggctggcaggagcagactgcctcagcccatgtgccctgccggccagggcgtgggctcccctcggctgtggtgcctcctctggccccccaggtccacgtcctttaaattggccctttggctcttgcccttggctcccttgggcagacagcaggcttaggccattgatatcgcagttcttcctatcagcttcagtgacccagggtctgaactgcctccatcctagggcaacctggggcagacaggcctggtggggggtggggaaacctccttccacctgagcttgcttgaagggacccagagtctttgggcccagatctttaaacctttgtgtcgtgttgcagcagagtgacgatgggggttggggggttatttattttgcctgtccttatccctgcttggacacctgagcatctgattcctgtccccctggtgccatctggcctggctggagccaggaacaggagggacacttccccagaatccgcatgtttccccagtgattacactccactgccaccgtggtgcctggctttaactcccacccctgctatgactcctctctgcagagacgcgactggcggctccagcagggactacctttcttataaacccagggggaccacacacacacacacacacacacacacacacacacacacacacacacacactcttgatcccttgcttccctcccccagtgcgttctgtgatcgccaagttcaaagctgtgcacatgtggacactcaataaatgttcattggtgacgagaaaaaaaaaaaaaaa

SEQ ID NO: 3306 - DNA, 2194 bp, Homo Sapiens
  NM_014285
gcgcaactcattggcgccaagatggcgatggagatgaggcttccagtggctcgcaagcctcttagcgagagactgggccgcgacactaagaaacatctagtggtgccgggggatacaatcactacggacacaggattcatgcggggccatggaacgtatatgggagaagagaagctcattgcatctgttgctggctctgtggagagagtaaacaagttgatctgtgtgaaagctttgaaaaccagatacattggtgaagtaggagacatcgtagtgggacgaatcacagaggttcaacagaagaggtggaaggtggagaccaactccaggctggattcggtcttgctgctctcgtccatgaaccttcctggaggagagctgaggagaagatctgcagaagatgagcttgcaatgagaggtttcttacaggaaggggaccttatcagtgctgaggtccaggcagtgttctctgacggagctgtctctttgcacacgaggagcctgaaatatggaaaactaggtcagggggttttggtccaggtttccccctccctggtgaaacggcagaagacccactttcatgatttgccatgtggtgcctcagtgattctcggtaacaacggcttcatctggatttacccaacacctgagcacaaagaagaggaagcagggggcttcattgcaaacctggagcctgtctctcttgctgatcgagaggtgatatcccggcttcggaactgcatcatctcgctggtaactcagaggatgatgctgtatgataccagcatcctgtactgctatgaagcatcccttccacatcagatcaaagacatcttaaagccagaaataatggaggagattgtgatggaaacacgccagaggcttttggaacaggagggataaggaggtgctccagaagcacgggactgtggaccttgcaggagtgaagactgtgatgtgtggtccccatatgtggctcagcaaagactcgagagatcatccctttgtctgcattgacggccctgtgacggcctccagcccacaggcctgctttctcctgtcctaacaccaagcctgggtggcagatgaacagtgcttccttgggttgccagctgagtcccggtattagggaatagtttcagctctttcaaagtgcacagtgttacagtcgaatgggctcccatcctggaataatatggagaatcctttgtcttccactcactgtcattcacaaggcacagtgccccatgaaattgccccaatagaaaacatggcatccctgacctccaaatggtctgttttggcctccattcctatatcctttaaatgactgagaatgcagctggtaaagttggaagaataaagttaaccaagcaggccaggcacggtggctcacgcctataatcccagcacttagggaggccaaggcgggcagatcacctgaggtcaatagttcgagaccagcctggccaacaaggtgaaaccccatctctactaaaaatacaaaaaattagccaggtgtggtggtgtgcacctgtagtcccagctatttgggaggctgaggtgggagaatcacttgaacctgggaggcggaggttgcagtgagctgaaatcgcgtaccacactccagcctgggtgacagagcgagactgtgtttcaaagaaaaaaaaaaacaagcagccttttgcttggttggaatctgattttctgttgcgtgttccttgtagccatagatgtgattatgtccacaccgggctgccttaatctgtcctgcttggagagtgacttgtaagatgctgaattattcatgataatacagtgaatgttctgggtccatgtactcagataaacatgaagaaaataagcaaagaaaaatggagactgggaaagcaaagctgttttcatcctataattgaagtagtgtggagcattaacttgtggatgattcagagttaaaagataaaaagacgccagagttctcgctgaagaatgtgagaattcctgtgcattgttttttctgatgactatctaaaaatggtgccctgatgtaggtttgggggaacattcttaaaaacaagggtgctatgtgcctgtaatccagcactttgggaagctgagtgggcagatcacctgaggtcaggagttcaagaccagcccggccaatacagtgaaacctcgtctttaccaaaaatac

SEQ ID NO: 3307 - DNA, 3785 bp, Homo Sapiens
  NM_014290
agagccgaggccaggctgccctcgaagcggggcggggcgaagcggggcggggccgagcagggcggggcgggggcttgaggtgattcccaagccgcggggcggctccggtggtgcggggaaaccgaaagtgggcggcggccgcggcggggcccctggcggagacggcggcaggagctgggcccagagacgcggggacgggccgtgggcccccggaacgaggcaaagatgctggaaggagatctggtttcaaagatgctacgagctgttctgcagtctcataagaatggagtagcattaccccggctccaaggagagtacagatccttgactggagactggatccccttcaaacagctaggtttccctacactagaagcctatctgagaagtgtgccagcagtggtcaggatagagactagtagatctggagagattacctgctatgccatggcctgcacagaaactgcaagaattgctcagcttgtggctcgtcaaaggagttctaaaaggaaaaccgggcgtcaagttaattgtcagatgagagtgaagaaaaccatgccattttttctagaaggaaaaccaaaagcaaccctcagacaaccaggatttgcttcaaatttttctgttggcaaaaaacctaatccagcaccgttaagagacaaaggaaactctgttggagttaagcctgatgctgaaatgtctccttatatgctacacacaactcttggaaatgaagcattcaaagacattccagtgcaaaggcatgtgaccatgtccaccaacaacaggtttagcccaaaggcgtcccttcaaccacctttgcagatgcatctctcaagaacctctactaaggaaatgagtgataatttaaatcagactgttgaaaaacccaatgtcaagcctcctgcctcttacacttataaaatggatgaggttcaaaatcgcataaaggaaatactaaacaagcataacaatggcatttggatatctaagcttccacatttttacaaagagttatataaagaagaccttaatcaaggaattttacaacagtttgaacactggcctcatatttgcacggtggagaaaccttgcagtggtggccaagatttacttctttatccagctaagagaaagcagcttttgagaagtgaactggatactgagaaagtacctctatccccactacctggtcccaaacaaacaccaccgttgaaagggtgtccaacagttatggcaggagactttaaagaaaaagtggcagacctgctggtgaaatacacaagtggcctttgggccagtgcacttccgaaagcatttgaggaaatgtacaaagtgaaattccctgaggatgccttaaaaaatcttgcctcactttctgatgtatgcagcatagactacatttctggaaatccccagaaggccattctctatgctaaacttccattgcccactgacaaaatccaaaaggatgcagggcaagcacatggtgataatgatatcaaggctatggttgaacaagagtatttgcaggtagaagaaagcattgctgaaagtgctaatacctttatggaggacataacagttcctcctttaatgattccaactgaagcatcaccatctgtattggtggttgaactgagcaacacaaatgaagtggttatcaggtatgtgggcaaagactattctgctgctcaggaattaatggaagatgagatgaaggaatattacagtaagaatcctaagatcacaccagtccaggctgtgaatgttgggcagttgctggccgtaaatgccgaggaggacgcctggttacgggcacaggtcatctcaacagaagagaacaaaataaaggtatgctatgttgactatggttttagtgaaaatgttgaaaaaagcaaagcatacaaattaaacccgaagttttgttcactctcatttcaagctacaaaatgtaagcttgcaggcttggaagtcctaagcgatgaccctgatctagtgaaggtggttgaatctttaacttgtggaaagatctttgcagtggaaatacttgacaaagctgacattccacttgttgttctgtacgatacctcaggagaagatgatatcaatatcaatgccacctgcttgaaggctatatgtgacaagtcactagaggttcacctgcaggttgacgccatgtacacaaatgtcaaagtaactaatatttgctctgatgggacactctactgccaggtgccttgtaagggtctgaacaagctcagtgaccttctacgtaagatagaggactacttccattgcaagcacatgacctctgagtgctttgtttcattacccttctgtgggaaaatctgcctcttccattgcaaaggaaaatggttacgagtagagatcacaaatgttcacagcagccgggctcttgatgttcagttcctggactctggcactgtgacatctgtaaaagtgtcagagctcagggaaattccacctcggtttctacaagaaatgattgcaataccacctcaggccattaagtgctgtttagcagatcttccacaatctattggcatgtggacaccagatgcagtgctgtggttaagagattctgttttgaattgctcggactgtagcattaaggttacaaaagtggatgaaaccagagggatcgcacatgtttatttatttacccctaagaacttccctgaccctcatcgcagtattaatcgccagattacaaatgcagacttgtggaagcatcagaaggatgtgtttttgagtgccatatccagtggagctgactctcccaacagcaaaaatggcaacatgcccatgtcgggcaacactggagagaatttcagaaagaacctcacagatgtcatcaaaaagtccatggtggaccatacgagcgctttctccacagaggaactgccacctcctgtccacttatcaaagccaggggaacacatggatgtgtatgtgcctgtggcctgtcacccaggctacttcgtcatccagccttggcaggagatacataagttggaagttctgatggaagagatgattctatattacagcgtgtctgaagagcgccacatagcagtggagaaagaccaagtgtatgctgcaaaagtggaaaataagtggcacagggtgcttttaaaaggaatcctgaccaatggactggtatctgtgtatgagctggattatggcaaacacgaattagtcaacataagaaaagtacagcccctagtggacatgttccgaaagctgcccttccaagcagtcacagctcaacttgcaggagtgaagtgcaaccagtggtctgaggaggcttctatggtgtttcgaaatcatgtggagaagaaacctctggtggcactggtgcagacagtcattgaaaatgctaacccttgggaccggaaagtagtggtctacttagtggacacatcgttgccagacaccgatacctggattcatgattttatgtcagagtatctgatagagctttcaaaagttaattaatgactgcctctgaaaccttgacaactaattcagattttttagcaataacaaaatgtagtaggcttaaaaaaaatcttaactctgctacatggctctgactgctgtgggggattgaaaagaatatgcttatgtttgatgaaagatatttaacaagttttgttttaacagagttgacttttcaaagaaaattgtacttgaattattactataatattagaataaaaatgtttatcaatataaaaaaaaaaaaaaaaaaaaaaaaa

SEQ ID NO: 3308 - DNA, 1399 bp, Homo Sapiens
  NM_014300
gaaggtggcagagcagcctccccaactaagcctgggtcgccgcctcggtgaagggccgcggggccgagcgcgggaagtggcgtccagtcggtttttggcaggcgagagccagagcgtgagaaccctcccacggcgaggccaagccctgagactggactagcaaggtcgtgagtctctctgtcagctctccgcagcgaaggggcgcggggggcggggaccgtgcccgaccgtgccagctcccgctccggaagcggaagtgcaagcactgcggggtcctgtccagtgtgagcccgacccgagctccagtagttccgcccgctggtcatcgcgccctttcccctgccggtgtcctgctcgccgtccccgccatgctgtctctagactttttggacgatgtgcggcggatgaacaagcggcagctctattatcaagtcctaaattttggaatgattgtctcatcggcactaatgatctggaaggggttaatggtaataactggaagtgaaagtccgattgtagtggtgctcagtggcagcatggaacctgcatttcatagaggagatcttctctttctaacaaatcgagttgaagatcccatacgagtgggagaaattgttgtttttaggatagaaggaagagagattcctatagttcaccgagtcttgaagattcatgaaaagcaaaatgggcatatcaagtttttgaccaaaggagataataatgcggttgatgaccgaggcctctataaacaaggacaacattggctagagaaaaaagatgttgtggggagagccaggggatttgttccttatattggaattgtgacgatcctcatgaatgactatcctaaatttaagtatgcagttctctttttgctgggtttattcgtgctggttcatcgtgagtaagaagcctgccttgctgttcctgggaagatgccatagttttcgttactggatgtttggagtagatactggtctgtgattggtggaatggagaacacacgtgttggtgcttctgggtagcactggtttgcattagtttatgtttccatgccagagtttgtgtgggcgggcgcatgtgcaccacagagtgcactcgaggggactttcagtcacaggatttcataattgtcattgtcacactttcaaatttttgtacatcagtgaatttttttatattaaaaggttgagccaaagcccccagtgtttgtattttgaagccaagcttcacttctaaagtgcctacagagacttgtaaatgaaaatgcagctctgcacgagtttgaaaccgtcatacctccttctattaggaatggcatatactgaggtggtcgtaagtcttaacttctaaaattttaaataaaagactttgcacattgaaaaaaaaaaaaaaaaaa

SEQ ID NO: 3309 - DNA, 1952 bp, Homo Sapiens
  NM_014305
gcctctggctgctctgttaacgtgtcccgcgagcgaggcgcgtcgcaaaaggtcgcggcggaacttccctgcgcttttcagaccatactctttacggtactaggcactgctgagctgggagatgtcggcggcgtgttgggaggaaccgtggggtcttcccggcggctttgcgaagcgggtcctggtgaccggcggtgctggtttcattgcatcacatatgattgtctctttagtggaagattatccaaactatatgatcataaatctagacaagctggattactgtgcaagcttgaagaatcttgaaaccatttctaacaaacagaactacaaatttatacagggtgacatatgtgattctcactttgtgaaactgctttttgaaacagagaaaatagatatagtactacattttgccgcacaaacacatgtagatctttcattcgtacgtgcctttgagtttacctatgttaatgtttatggcactcacgttttggtaagtgctgctcatgaagccagagtggagaagtttatttatgtcagcacagatgaagtatatggtggcagtcttgataaggaatttgatgaatcttcacccaaacaacctacaaatccttatgcatcatctaaagcagctgctgaatgttttgtacagtcttactgggaacaatataagtttccagttgtcatcacaagaagcagtaatgtttatggaccacatcaatatccagaaaaggttattccaaaatttatatctttgctacagcacaacaggaaatgttgcattcatgggtcagggcttcaaacaagaaacttcctttatgctactgatgttgtagaagcatttctcactgtcctcaaaaaagggaaaccaggtgaaatttataacatcggaaccaattttgaaatgtcagttgtccagcttgccaaagaactaatacaactgatcaaagagaccaattcagagtctgaaatggaaaattgggttgattatgttaatgatagacccaccaatgacatgagatacccaatgaagtcagaaaaaatacatggcttaggatggagacctaaagtgccttggaaagaaggaataaagaaaacaattgaatggtacagagagaattttcacaactggaagaatgtggaaaaggcattagaaccctttccggtataatcaccatttatatagtcgagacagttgtcaaagaagaaagttatcctacctcgccaagtggtatgaaattaagtgaccaaatgaagtgcactcttttcttttggaattagattcatgactttctgtataaaattcaaatgcagaatgcctcaatctttgggagagtttcagtactggcatagaatttaaatgtcaaaattctttctgaaaccctttctcctagaaactaggaaataataggtgtagaagactctccctaagggtagccaggaagaagtctcctgattcggacaaccatgaggggtagtggtgctagggagaaggcaaccttcactggttttgaactcagtgcctaagaaagtctctgaaatgttcgtttttaggcaatataggatgtcttaggccctaattcaccatttcttttttaagatctgatatgctatcattgccttaataatggaacaaaatagaagcatatctaacactttttaaattgataattttgtaaaattgattacgttgaatgctttttaagagaagtgtgtaaagtttttatattttcacaattaacgtatgtaaaaccttgtatcagaaatttatcatgtttactgtttaaaatgattgtatttataaaattgtcaatatcttaatgtatttaatgtagaatattgctttttaaaataatgtttttattttgctgtagaaaaataaaaaaaaatttgattataaaaaaaaaaaaaaaaaaaaaaaaaaaaaaaaaaaaaaaaaaaaaaaaaaa

SEQ ID NO: 3310 - DNA, 2081 bp, Homo Sapiens
  NM_014306
gttgctcatctgctgcggcgctggtcgcgcctgcgctttggttcttggaaggcggtgctctgagaagccggactacgcggcagcggctcttcaaagcggagccgggagtttttgctacagttttcgccaccatgagtcgcagctataatgatgagctgcagttcttggagaagatcaataaaaactgctggaggatcaagaagggcttcgtgcccaacatgcaggttgaaggtgttttctatgtgaatgatgctctggagaaattgatgtttgaggaattaaggaatgcctgtcgaggtggtggtgttggtggcttcctgccagccatgaaacagattggcaatgtggcagccctgcctggaattgttcatcgatctattgggcttcctgatgtccattcaggatatgggtttgctattgggaacatggcagcctttgatatgaatgaccctgaagcagtagtatccccaggtggtgtcgggtttgacatcaactgtggtgtccgcttgctaagaaccaatttagatgaaagtgatgtccagcctgtgaaggagcaacttgcccaagctatgtttgaccacattcctgttggggtggggtcaaaaggtgtcatcccaatgaatgccaaagacttggaggaggccttggagatgggggtggactggtccttaagagaagggtatgcctgggctgaagacaaggagcactgcgaggagtacggaaggatgctgcaggctgaccccaataaagtttctgcaagggcgaagaaaagaggccttcctcagttggggaccctgggagcaggcaaccattatgcagaaatccaggttgtggatgagattttcaatgagtatgctgctaaaaaaatgggcatcgaccataagggacaggtgtgtgtgatgatccacagtggaagcagaggcttgggccaccaagtagccacagatgcgctggtagctatggagaaggccatgaagagagacaagattatagtcaatgatcggcagttggcttgtgctcgaatcgcttccccagagggtcaagactatctgaagggaatggcagctgctgggaactatgcctgggtcaaccgctcttccatgaccttcttaacccgtcaggctttcgccaaggtcttcaacacaacccctgatgacttggacctacatgtgatctatgatgtttctcacaacattgccaaagtggagcagcatgtggtggacggaaaggaacggacactgttagtacacaggaagggatccacccgcgctttccctcctcaccatcccctcattgctgttgattaccaactcactggacagccagtgctcattggtggcaccatgggaacctgtagttatgttcttactggcactgaacagggcatgactgagacctttggaacaacctgtcatggagcgggccgtgcattgtcccgagcaaaatctcgacgtaatttagatttccaggatgtcttagacaaattggcagatatgggaattgcgatccgtgttgcctcacccaaactggttatggaagaggctcctgagtcctataagaatgtgacagatgtggtaaatacctgccatgatgctggaatcagcaagaaagccattaaactgagaccaattgctgtgatcaaaggatagaaccttggacagcagggctgcctgacaccaccaaccctctctgaagtggaagtggactgacatgctcttctgacatcagactcaaggcgggacaagttgcaaagtgtgcagctgtaactgctcacgccaaaatggctgatggggaggctgctgctttcaggggcccgtgcttgtaaaataaccttccaggaagaggcacattgcccacctttggaaagggaggaatatgccttctccttggttgttccacagagttttaggaaaatctgttagggatgggtagatgtcaaactgccttacgcagtcatactgatctttagccatcagattgatcttcttcacaccaagctctgtttacattccgagaggtgtcatgaagaaagttctgttcaataaggttttggaatgtttcctttcaaaaaaaaaaaaaaa

SEQ ID NO: 3311 - DNA, 1679 bp, Homo Sapiens
  NM_014317
gccagaggcggagccgccgccctgccgcgactttcagactccgaccatggcctcgcgctggtggcggtggcggcgcggctgctcctggaagccggcggcgcggagccccgggcccggctcccccggccgtgcgggaccgttggggccgagcgccgctgccgaagtccgcgcgcaggttcataggcggaagggacttgacttgtctcagataccctatattaatcttgtgaagcatttaacatctgcctgtccaaatgtatgtcgtatatcacggtttcatcacacaaccccagacagtaaaacacacagtggtgaaaaatacaccgatcctttcaaactcggttggagagacttgaaaggtctgtatgaggacattagaaaggaactgcttatatcaacatcagaacttaaggaaatgtctgagtactactttgatgggaaagggaaagcctttcgaccaattattgtggcgctaatggcccgagcatgcaatattcatcataacaactcccgacatgtgcaagccagccagcgcgccatagccttaattgcagaaatgatccacactgctagtctggttcacgatgacgttattgacgatgcaagttctcgaagaggaaaacacacagttaataagatctggggtgaaaagaaggctgttcttgctggagatttaattctttctgcagcatctatagctctggcacgaattggaaatacaactgttatatctattttaacccaagttattgaagatttggtgcgtggtgaatttcttcagctcgggtcaaaagaaaatgagaatgaaagatttgcacactaccttgagaagacattcaagaagaccgccagcctgatagccaacagttgtaaagcagtctctgttctaggatgtcccgacccagtggtgcatgagatcgcctatcagtacggaaaaaatgtaggaatagcttttcagctaatagatgatgtattggacttcacctcgtgttctgaccagatgggcaaaccaacatcagctgatctgaagctcgggttagccactggtcctgtcctgtttgcctgtcagcagttcccagaaatgaatgctatgatcatgcgacggttcagtttgcctggagatgtagacagagctcgacagtatgtactacagagtgatggtgtgcaacaaacaacctacctcgcccagcagtactgccatgaagcaataagagagatcagtaaacttcgaccatccccagaaagagatgccctcattcagctttcagaaattgtactcacaagagataaatgacaactctttctgttctttctggcagctatcttaccagactgtgcctaaagaattttgtggaatacactttgtttgcttcatgtgcagataaccaaaaatcattttaaaagatatcaaacttattgatgggcaatttatttttttttattgcaaaagttttttcagaaaactttttaaatgtaattaataaaccacctgaatctgtcattctagtcctataaattataatcaaggtatcttgatggttatatgtggtattgtttacactgttaatatccacatgtaaggccattacacaaataaataaccaatgttaaaattcaaaaaaaaaaaaaaaaaaaaaaaaaaaaaaaaaaaaaaaaaaaaaaaaaaaaaaaaaaaaaaa

SEQ ID NO: 3312 - DNA, 4798 bp, Homo Sapiens
  NM_014319
agcttgtaaaacaccctggagagaaaatggcggcggcagcagcttcggcgcctcagcagctctcggatgaggagcttttctctcagctccgccgttacggcctgtctcccggaccagtgacggagagcacccgcccggtctacctcaagaagctgaagaagcttcgagaggaagagcagcaacagcaccggtcagggggccgcggcaacaagacgcggaacagtaataacaataacacggcagccgccacggtcgcagccgcgggaccagcggcggcggcggccgcggggatgggggtccggccggtctcgggcgacctctcctacttacggactcctgggggcctgtgccgaatctcggcctctggcccagagagcctcctgggagggcccgggggcgcctccgccgcccccgcggctggcagcaaagtgctgctgggcttcagctcggacgagtcggacgtggaggccagtccccgggaccaggccggcggcggcgggaggaaagaccgggcttcgctccagtaccgcgggctcaaagcgccgccggcgcccctggccgccagcgaggtgactaacagcaactctgcagagcgaaggaagccccactcgtggtggggggccaggaggccggcgggccccgagctgcagaccccgccggggaaagatggagcagtggaggacgaggaaggggagggagaggacggtgaggagagggacccggagaccgaggagccgctctgggcgagccggaccgtgaatggcagccggcttgtcccctacagctgccgggaaaactattcggactcagaggaagaggacgacgacgacgtggcctccagcagacaggtattaaaggacgactccctttcccggcatcggcccagacgaacccatagtaagcctctccccccgctgactgctaaatcggccggcggcaggctggagacttcagttcagggagggggaggactcgcgatgaatgacagggcggcggctgccgggagtctagacaggagccgaaacctcgaagaggcggcggccgcggagcagggaggagggtgtgatcaagtggactccagccccgttcctagataccgtgttaacgctaagaaactgacccctctcctgcccccgccacttactgacatggactcaaccttggattcgtcaacaggctcccttctgaaaaccaataatcatattggcggtggggccttcagtgtggactcccccaggatttattctaacagtctccctcccagtgcggcggtggccgcctctagttcactcaggatcaatcacgccaatcatacgggctccaatcatacctacctgaaaaacacatacaacaaaccgaagctttccgaacccgaagaggaacttctccagcaatttaaacgggaggaggtgtccccaacagggagtttcagtgcccactacttgtcgatgtttctcttaactgctgcctgcttatttttcctaatactgggactgacttacctaggaatgagagggacaggagtatctgaggatggagaactcagcatagaaaacccctttggtgaaacatttggaaaaatacaagaaagtgaaaaaactcttatgatgaacacattatataagcttcatgatcgattggcacagcttgcaggagatcatgaatgtggcagttctagtcaaagaacgctttctgttcaagaggcagctgcgtatttaaaagatttaggtcctgaatatgaaggtatatttaacacttcattgcagtggatcttagaaaatggaaaagatgttggaataaggtgtgttggttttggccctgaggaagaattgacaaatataactgatgtgcagtttttacagtccacaagaccactgatgtctttttggtgtcgttttcgacgtgcttttgttactgtaactcacagattattgttgttatgcttaggtgtagtgatggtttgtgtcgttctgcgttacatgaaatatcgatggacaaaagaagaggaggaaacaaggcagatgtatgatatggtggtaaagattatagatgttttacgaagtcataatgaagcctgccaggaaaacaaagatttacaaccttacatgcctattccacatgtacgcgattccttaatacagcctcatgacaggaaaaaaatgaagaaagtctgggatagagctgttgacttccttgctgctaatgagtctagagttcgcacggaaacacgaagaataggtggtgcagattttctggtttggcggtggatccagccttctgcatcctgtgacaaaatattagttataccttctaaagtatggcaaggtcaagcatttcatttagatagaagaaattcaccaccaaatagtttgacaccgtgtctaaagattcggaatatgtttgatcccgttatggaaataggggatcagtggcatttggcaattcaagaagcaattttagaaaaatgcagtgataatgatggcattgttcacattgcagtagacaaaaattcacgtgagggttgtgtatatgttaaatgtctgtctccagaatatgctggaaaggcttttaaagcattgcatggctcttggtttgatgggaaattggttacagtaaaatatttacgactagatagataccaccatcgctttccccaggctctcacttccaacactccattgaagccatcaaataaacatatgaactccatgtctcatcttcgtcttcggactggcctaaccaattctcaaggaagttcctgaaaagattttcttccatttctaagactgttatttacaataggaaaattcctgtttggctttttgtcttcctttttaaatgctttttgtatgtaatatttttattgatgaatacatctctgaacgttccagaagtcttaaggttccaaagggatttagcagtgaggcagcaatgctgagtaggtaggataattatttcattcagtttttggagctcagttaagccaatacatttaaagttttgcatgaggaacactgactttattaagcattttcagatgtggtggttgtatttttgccccaagaagtgtttggataaccacacaaaagcatgatgaaaaggcttcttgtagtcccataatttcttgtgaactaatgttgtgaatttttgtatacagtcacctgcatagttcctacaggctaatgtggtaaaactgttgatttcccaatttaaccttaggtttctgttgcttataagcgattcatttgctacggctggaatatgggaaaattaatttgggcttagtggttacaaatatgtgtaagtggatgtatatgtacttaaactggctttgtatatatgtataaatgctggtggtggtgaaagtagtcttgttttatgaggatgtctgcattaaagcagtaaaataagctttccattttattcataatctaatgtgtgtgtatatatgtatgtgtgtatgtgtgtgtatatatagatgtatatatatacacacacagagatatatacatatggctgtacttttgcatagatcaaacagccaaacacctggaagtattagatacaagtttaaaatatcttttataggttttatataaaaatgtctgagtatgattttgtgtgaaagttctgataccagttgtaatagagtcaaatttatgtgagcaataaagaagaaattggcagatattggaaaaatattttgtgaaaagctgtatttattataaatactagggccatgacatagtaccattggggttaagtcattttcccaatctatttataatttaatgatatgttagtgcctctgttatatgtcaagtttaaagcagggcacattgttgcagcaaaatgtgtatttgacaaattatacttgcaattttgggtcatgaaagtttgcaatatagtaaatgcacgattgactgttgctttgtgcctcagtatttaatttgtttcagtaaacttactttattactgtttatgatttcagataaaaatagttgctgagtaaattttacttgtaatctacaattggctttttaaaaataacctgttgatatataattgtcagtccaaatgaatatgtgaaacagctggaattgtacaaattttggttgtatttaaagctcagtttcctttttgttttattgtatgcgttgggtttgcagcatgaacttgcacagataatgcacgttttctggttaagtaaacatgatgcacactattctgtaacagaaagccctattgtgccttacctgtgtgcttttgtgggcaccttgtttatgaagaataaaaaatgatttgttatctgaagagaataaattttaaattctcagtttatgtctcagatgctaacgtgtgaaaatataaatatatataatatataaagtaaccagtcttcctgtattttatgtgcatcatagtgatttatctgagcttagtgacccccatcttgtaacctgttgcaagagtgaatgtaaaaaatagttgtggcattttaaaaggtcgcctttgatgcagatgcatctttttcttgcttctaaaacatatttcatgtaaacattgtacatttattattgtaatatatactattatgcagcttattttacctgaaactgttaagccgaccaagatccctccctgcaagacagatgggaatgtgtataataactaggtatttgagaagttctgaagtttgatgtaatctgttacttgtcctgttaaaaaaaggaaaaaattctaattaaaaatttattagtttttttttatgtgtcttggctttttaaaaacattttaa

SEQ ID NO: 3313 - DNA, 1282 bp, Homo Sapiens
  NM_014320
ggcgggccgaagcgaggtgcggctccctgtcgccgcggaggggcgggggcaggacgcgcaactccggccggagctgtccggggtcgtgagccggccccgccttggtggcggcgccccctcgcggtccagaggcagacgcatcgggtgggctcgggtctccagcccggccgggaggagggaccgggtctgcggagcggggactcggggcctcggcggggcgcgcacacgcaggcggggcggcccggggtgcggggcctctgcgcggctgaccaggctcccagagcgtcagcgccgcccatggccgagccgctccagccagaccccggggcggccgaggacgcggcggcccaagctgtggagacgccgggctggaaggccccggaggacgccggcccccagcccggaagttatgagatccgacactatggaccagccaagtgggtcagcacgtccgtggagtctatggactgggattcagccatccagacgggctttacgaaactgaacagctacattcaaggcaaaaacgagaaagagatgaaaataaagatgacagctccagtgacaagctacgtggagcctggttcaggtccttttagtgagtctaccattaccatttccctgtatattccctctgaacagcaatttgatccacccaggcctttagagtcagatgtcttcattgaagatagagccgaaatgactgtgtttgtacggtctttcgatggattttctagtgcccaaaagaatcaagaacaacttttgacattagcaagcattttaagggaagatggaaaagttttcgatgagaaggtttactacactgcaggctacaacagtcctgtcaaattgcttaatagaaataatgaagtgtggttgattcaaaaaaatgaacccaccaaagaaaacgaatgagaaaaatgaaaggaagttctgctgtcagaggcaaaacatctgtttatcatagacatcaacatgacctataagtaaagtgcgtgtctagtgtcttctattgagagtactactattaattaagcttatttccaatgtgcctttttaatgcttgaagttttatctacatacacaggtaacagaggacagtagtctgtaaacatataaatcggtcataactatcgtggtctttatttctgtgaggatctagggaaatttcatgtcacttccctccttcactgcatcacaatcatattcccttttttttttcttggatttgtgtcagttggatgatatcccctccagatagtatcaataaaatgttaaaatt

SEQ ID NO: 3314 - DNA, 2632 bp, Homo Sapiens
  NM_014322
gggcccggcgcgcggtagcgcgggcccctcagtgcacaatggctagagcaggcggcggagccccaaccccacccagtgcggagcgcgccgcgagccccgccgcaagctgagcgcctccgcccgccaggcgcgccggcgccgggccatgtactcggggaaccgcagcggcggccacggctactgggacggcggcggggccgcgggcgctgaggggccggcgccggcggggacactgagccccgcgcccctcttcagccccggcacctacgagcgcctggcgctgctgctgggctccattgggctgctgggcgtcggcaacaacctgctggtgctcgtcctctactacaagttccagcggctccgcactcccactcacctcctcctggtcaacatcagcctcagcgacctgctggtgtccctcttcggggtcacctttaccttcgtgtcctgcctgaggaacggctgggtgtgggacaccgtgggctgcgtgtgggacgggtttagcggcagcctcttcgggattgtttccattgccaccctaaccgtgctggcctatgaacgttacattcgcgtggtccatgccagagtgatcaatttttcctgggcctggagggccattacctacatctggctctactcactggcgtgggcaggagcacctctcctgggatggaacaggtacatcctggacgtacacggactaggctgcactgtggactggaaatccaaggatgccaacgattcctcctttgtgcttttcttatttcttggctgcctggtggtgcccctgggtgtcatagcccattgctatggccatattctatattccattcgaatgcttcgttgtgtggaagatcttcagacaattcaagtgatcaagattttaaaatatgaaaagaaactggccaaaatgtgctttttaatgatattcaccttcctggtctgttggatgccttatatcgtgatctgcttcttggtggttaatggtcatggtcacctggtcactccaacaatatctattgtttcgtacctctttgctaaatcgaacactgtatacaatccagtgatttatgtcttcatgatcagaaagtttcgaagatcccttttgcagcttctgtgcctccgactgctgaggtgccagaggcctgctaaagacctaccagcagctggaagtgaaatgcagatcagacccattgtgatgtcacagaaagatggggacaggccaaagaaaaaagtgactttcaactcttcttccatcatttttatcatcaccagtgatgaatcactgtcagttgacgacagcgacaaaaccaatgggtccaaagttgatgtaatccaagttcgtcctttgtaggaatgaagaatggcaacgaaagatggggccttaaattggatgccacttttggactttcatcataagaagtgtctggaatacccgttctatgtaatatcaacagaaccttgtggtccagcaggaaatccgaattgcccatatgctcttgggcctcaggaagaggttgaacaaaaacaaattcttttaattcaacgggtgctttacataatgaaaaaaccacttgtggcacacgatgggcatctaacatcatcatcttctaatgtgttggagattttcatttcaaatatattttttaaattactctattttccaaaacacgtaatgcatttttctcgaaaataccttactgtaaaaataactgtcgcgtacacatgtgtgaagtagctagaacatactgaattttttttgtactgttggactctattcagtgtcatgtcctatatctgatcaagttatcaaggagataattctagaatgaaaaagaaaatcctcttgttggaaacaaaagacgttttatatgtgcagtatgacaaagaggagtttcagagacaactttgaatccttgtcagcctggagaccagcaccagaggaatctacaaggcaaactcccatatatttgcttcccccaaattgctgcccctacagactcaaagctctttttctttgttttgttgtttctctaaaaatttactgttctttgtcgatgctatataagccagggagttctaagacgccagctctttgagatttgctcattcccctgtatttcccacatatatattacatatacccgctaataaatttatgtttgtttttctcttgtcaatctgtcttttgttataggggccccagccaaggaacctaaagtgggtagaaggaaaaattattttttctttccctacaaactgaacatggattattagaactcaaggttttcattgacaatatagaaaagaaacactgaatcattttattttattgcccaatttttatttcttatatgactctagtgtttcatcttcataattaatcatgtttgaaggatttctgagtgactcagcagcctgttaaagaaggatgaaccaaagaaaacatttcactaaatgtgcttttaaaaatcaagtgtattgctggttctgctgcagtatgtagtcgaagaataaattagtaaattgcttctgagggtctgaaattgaataaagtaatggctttgtatttctataaaagttgtctccccttgtttcctttccattctggcacatgtagacatttaattta

SEQ ID NO: 3315 - DNA, 3812 bp, Homo Sapiens
  NM_014323
gggcctactctgccgccgccgccgcccgcccgctccagccgccgccgccgccgccaccgccctccaggctccgggacccggcccgcgccaccgcccccgtgcgcgccccgccgccgccgccttcgccttcgccttttgtttcctccgctccggcgcccccgccccggctcgcgctttgcaggggacgcagcgcgcgcccccagcgggcccgggaaaagccgcggcgcgcgcgcgcgcctgcgcggcggacccctccttctcctccccgcgtgcgcgtgcccttcttggctgcgcgccggcgccgcctggcgggcgggaggggaggtggcaggcgcgtttgcaggaggggcgcacctcttcgctcgcgcacccccccggaaggtagaccgggaaggggaggcgggcgggcggagaggagagagtggcgcgcagtccagcgagggcgggggttggctatgtggggggtggtgcaccccgcagtctagacagtctgatccgggctgggggcgtgtacactcggcgcacctgcgagactacagagcctcgggccggcacgtgtggggagtgtggacacgtctgctgcgccccgcttctcgctgctgaggggaagggagggggcgggcaggtgcagcggccgggctagtgggagggggcggcggccatggagcgggtgaacgacgcttcgtgcggcccgtctggctgctacacataccaggtgagcagacacagcacggagatgctgcacaacctgaaccagcagcgcaaaaacggcgggcgcttctgcgacgtgctcttgcgggtaggcgacgagagcttcccagcgcaccgcgccgtgctggccgcctgcagcgagtactttgagtcggtgttcagcgcccagttgggcgacggcggagctgcggacgggggtccggctgatgtagggggcgcgacggcagcaccaggcggcggggccgggggcagccgggagctggagatgcacactatcagctccaaggtatttggggacattctggacttcgcctacacttcccgcatcgtggtgcgcttggagagctttcccgaactcatgacggccgccaagttcctgctgatgaggtcggttatcgagatctgccaggaagtcatcaaacagtccaacgtacagatcctggtaccccctgcccgcgccgatataatgctctttcgcccccctgggacctcggacttgggcttccctttggacatgaccaacggggcagccttggcagccaacagcaatggcatcgccggcagcatgcagccagaggaggaggcagctcgggcggctggtgcagccattgcaggccaagcctctttgcctgtgttacctggggtggaccgcttgcccatggtggctggacccctatccccccaactgctgacttccccattccccagtgtggcatccagtgcccctcccctgactggcaagcgaggccggggccgcccaaggaaggccaacctgctggactcaatgtttgggtccccagggggcctgagggaggcaggcatccttccatgcggtctatgtggtaaggtgttcactgatgccaaccggctccggcagcacgaggcccagcacggtgtcaccagcctccagctgggctacatcgaccttcctcctccgaggctgggtgagaatgggctacccatctctgaagaccccgacggcccccgaaagaggagccggaccaggaagcaggtggcttgtgagatctgcggcaagatcttccgtgatgtgtatcatcttaaccggcacaagctgtcccactctggggagaagccctactcctgccctgtgtgtgggttgcggttcaagagaaaagaccgcatgtcctaccatgtgcggtcccatgatgggtccgtgggcaagccttacatctgccagagctgtgggaaaggcttctccaggcctgatcacttgaacggacatatcaagcaggtgcacacttctgagcggcctcacaagtgtcagacctgcaatgcttcttttgccacccgagaccgtctgcgctcccacctggcctgtcatgaagacaaggtgccctgccaggtgtgtgggaagtacttgcgggcagcatacatggcagaccacctgaagaagcacagcgaggggcccagcaacttctgcagtatctgtaaccgaggtttctcctctgcctcctacttaaaggtccatgttaaaacccaccacggtgttccccttccccaggtctccaggcaccaggagcccatcctgaatgggggagcagcgttccactgcgccaggacctatggcaacaaagaaggccagaaatgctcacatcaggatccgattgagagctctgactcctatggtgacctctcagatgccagcgacctgaagacgccagagaagcagagtgccaatggctctttctcctgcgacatggcagtccccaaaaacaaaatggagtctgatggggagaagaagtacccatgccctgaatgtgggagcttcttccgctctaagtcctacttgaacaaacacatccagaaggtgcatgtccgggctctcgggggccccctgggggacctgggccctgcccttggctcacctttctctcctcagcagaacatgtctctcctcgagtcctttgggtttcagattgttcagtcggcatttgcgtcatctttagtagatcctgaggttgaccagcagcccatggggcctgaagggaaatgaggcagctgctgtgtccccacggaaacaaccatctggggactgctgggaaatgctgtgaatgcggagggaagtgatgtttgggttctgtagctgagagatttttattcatttttaactgccccccaaccccactccaactccttctccaccacccattctcccaatggtctttagaaatagattttcatctgatattctgcagaaatatcaatgagacttggtatgggacaggggcagaaaacactacataggcctccaaggcaaaaccagtcccagtttctttaatgggaagaagctggaattcctggtgctcaattcttagtgaccccaatcctatacccaaatctatgatattctgggacctcagtgattttggtcccctcccacttctctagttcgtcatcctcccttcccatatccttcaaaagaaccacactagggtctccacctacttatacaatgcggatgcccaactgtttttaaggaagccagaagcatcccatggaccatggggtgagtgtcctccaagagccccctgagctcagccctctgcctggagggctccagacctttctgagccctgcttggaggcgagcattttcactgctaggacaagctcagctgttgaggacacccccaccccaaatttcagttcttacgtgattttaaccattcaacatgctgttgggttttaattctctaattattattattattgttattattttttaggaccagttgtagtgaattgctactgaaagctatcccaggtgatacagagctctttgtaaaccgcagtcacacattagggttagtattaaactttgtttagatgtaccataattaacttggctagttgattgtttgaagtctatggaagaaatagttttatgcaaaattttaaaaaatgccagtctggtcagggaagtagggggtttcaatgctgttgggaaccaggaaggtgggacagccggcaggtagggacattgtgtacctcagttgtgtcacatgtgagcaagcccaggttgaccttgtgatgtgaattgatctgatcagactgtattaaaaatgttagtacattactcta

SEQ ID NO: 3316 - DNA, 2078 bp, Homo Sapiens
  NM_014328
acgtgctccccggggctccgcaggcaggactgggccccggggcggtgcgctgggctgcacctccctccccgcgccccgtcctctcccgccctacaggccctagcagggcaggcgggaggtgagcgcggccatcccgctcccggagttccgggatcctggagtccgtagttcgtggtccttcgccggtgtccccggagcccagcggctgtggatggcagaagcccagagtgggactggtcagctgcaggagcagaagaaaggtcttctgatagccgtcagcgtctccgttgataaaatcatctcgcatttcggggccgcccggaacttggtgcagaaggcccagttgggtgatagccggctgagcccggatgtggggcacctggtgctgaccaccctctgcccggccctccacgccctggtggcggacgggctgaagcctttccggaaggacctcatcaccgggcagcgcaggagcagcccctggagcgtggtggaggcgtcggtgaagccaggctccagcacccgctcccttggaaccctgtatagccaggtcagccgtctagccccgctgagcagcagccgtagccgcttccatgcctttatcctgggcctcctcaacaccaagcagttggagctgtggttttccagtctccaggaagatgcaggcctgctctccctcctgtacctgccaacaggatttttctccctggcccgcggtggttgtccctccctgtccacagagctgctgctcctgctgcagccattgtcggtgctcactttccacctggacctgctctttgagcaccaccaccacctgcccctgggcccacctcaggcccctgcccctccaggcccacctccagctctgcagcagactatgcaagccatgctgcactttgggggccggctggcccagagccttcgggggacttccaaggaagctgcttcagacccctctgactctccaaaccttcccacaccagggagctggtgggagcagttgacccaggcctcccgggtctatgcctctgggggcactgagggctttcctctttcccgatgggcaccggggcgtcatgggactgcagctgaagaaggtgcacaggagagacccctgcccacagatgagatggcaccaggcaggggcctctggttgggaagactatttggagtgcctgggggccccgcagaaaatgagaatggagccctaaagtccaggagaccatctagctggctgcccccgacagtgagtgtgttggctcttgtgaagcggggggcacctcccgagatgccttctcctcaggagcttgaggcctcagcacccaggatggtgcaaacccatagggcagtgcgggctctctgtgatcacactgctgcaagacctgaccagttgagcttccggcgtggggaagtgctgcgtgtcatcaccacagtggatgaggactggctccgctgtgggcgggatggcatggagggtctggtgcctgtggggtatacctcccttgttctgtagccctgggaccctttcctgcgtatgtgtctccttcctgtcacctgggaatggaatggccagtgaacaccatcccagaagcattttccctctgcaaaatgacgtttcttcccacgtctgtttctgctaatatttaaaataaactttccttcttccctcctatacccacctgtaaggtgaaatctgctcttcttccaaatatataaaaaaggaattgccctccaggtaatccctttcctttttcccgtctatataagggaatgtcttccttcctatctatctgcaaaatggaaatctagacctccttcttcatccataagtggactgtgccagtacaatacatgcctcagcccccaagcctagaaggacctctagtctccttcctgtgtggaatcttccccactccatccctcccaagttgcctgtattgataatgtactcactcatgctgtactaggtgctgaagcctggacacccttggtgggtgggcctgtggtgatggtttgcatccttcctcctttgtcccaataaagtatgggagttgaatgtgaaaaaaaaaaaaaaaaaa

SEQ ID NO: 3317 - DNA, 4739 bp, Homo Sapiens
  NM_014329
tggcggggctcagcgacgctgcgcgggtggcggtttgcgaactgcgggtggactgtgtagtgaccggcgtcccgctgtctcgccccgtggcgggtgagcgagggtgcgtggtgcgcggcggcggcggaacgaacgcggtgcgggcggggcgcccgccgcagggcccatggcctcctgcgcgagcatcgacatcgaggacgccacgcagcacctgcgggacatcctcaagctggaccggcccgcgggcggccccagtgcagagagcccacggccatccagtgcctacaatggggacctcaatggacttctggtcccagacccgctctgctcaggtgatagtacctcagcaaacaagactggtcttcggaccatgccacccattaacctgcaagagaagcaggtcatctgtctctcaggagatgatagctccacctgcattgggattttggccaaggaggtggagattgtggctagcagtgactctagcatttcaagcaaggcccggggaagcaacaaggtgaaaattcagcctgtcgccaagtatgactgggaacagaagtactactatggcaacctgattgctgtgtctaactccttcttggcctatgccattcgggctgccaacaatggctctgccatggtgcgggtgatcagcgtcagcacttcggagcggaccttgctcaagggcttcacaggcagtgtggctgatctggctttcgcgcacctcaactctccacagctggcctgcctggatgaggcaggcaacctgttcgtgtggcgcttggctctggttaatggcaaaattcaagaagagatcttggtccatattcggcagccagagggcacgccactgaaccactttcgcaggatcatctggtgccccttcatccctgaggagagcgaagactgctgtgaggagagcagcccaacagtggccctgctgcatgaagaccgggctgaggtgtgggacctggacatgctccgctccagccacagtacctggcctgtggatgttagccagatcaagcagggcttcattgtggtaaaaggtcatagcacgtgcctcagtgaaggagccctctctcctgatgggactgtgctggctactgcgagccacgatggctatgtcaagttctggcagatctacattgaggggcaagatgagccaaggtgtctgcacgagtggaaacctcatgatgggcggcccctctcctgcctcctgttctgtgacaaccataagaaacaagaccctgatgtccctttctggaggttccttattactggtgctgaccagaaccgagagttaaagatgtggtgtacagtatcctggacctgcctgcagactattcgcttctccccagatatcttcagctcagtgagtgtgccccctagcctcaaggtttgcttggacctctcagcagaatacctgattctcagcgatgtgcaacggaaggtcctctatgtgatggagctgctgcaaaaccaggaggagggccacgcctgcttcagctccatctcggagttcctgctcacccaccctgtgctgagctttggtatccaggttgtgagtcgctgccggctacggcacactgaggtgctgcctgccgaagaggaaaatgacagcctgggtgctgatggtacccatggagccggtgccatggagtctgcggccggtgtgctcatcaagctcttttgtgtgcatactaaggcactgcaagatgtgcagatccgcttccagccacagctgaaccctgatgtggtggccccactgcccacccacactgcccacgaggacttcacatttggagagtctcggcccgaactgggctctgagggcctggggtcagccgctcacggctcccagcctgacctccgacgaatcgtggagctgcctgcacctgccgacttcctcagtctgagcagtgagaccaagcccaagttgatgacacctgacgccttcatgacacctagcgcctccttgcagcagatcactgcctctcccagcagcagcagcagcggtagcagcagcagcagcagcagtagcagcagctcccttacagctgtgtctgccatgagcagcacctcagctgtggacccctccttgaccaggccacctgaggagctgaccttgagccccaagctgcagctggatggcagcctgacaatgagcagcagtggcagccttcaggcaagcccgcgtggcctcctgcctggcctgctcccagccccagctgacaaactgactcccaaggggccgggccaggtgcctactgccacctctgcactgtccctggagctgcaggaagtggagcccctggggctaccccaagcctcccctagccgcactcgttcccctgatgtcatctcctcagcttccactgccctgtcccaggacatccctgagattgcatctgaggccctgtcccgtggttttggctcctctgcaccagagggccttgagccagacagtatggcttcagccgcctcggcactgcacctgctgtccccacggccccggccagggcccgagctcggcccccagctcgggcttgatggaggccctggggatggagatcggcataataccccctccctcctggaggcagccttgacccaggaggcctcgactcctgacagtcaggtttggcccacagcacctgacattactcgtgagacctgcagcaccctggcagaaagccccaggaatggccttcaggaaaagcacaagagcctggccttccaccgaccaccatatcacctgctgcagcaacgtgacagccaggatgccagtgctgagcaaagtgaccatgatgatgaggtggccagccttgcctctgcttcaggaggctttggcaccaaagttcctgctccacggctgcctgccaaggactggaagaccaagggatcccctcgaacctcacccaagctcaagaggaaaagcaagaaggatgatggggatgcagccatgggatcccggctcacagagcaccaggtggcagagccccctgaggactggccagcactaatttggcaacagcagagagagctggcagagctgcggcacagccaggaagagctgctgcagcgtctgtgtacccaactcgaaggcctgcagagcacagtcacaggccacgtagaacgtgcccttgagactcggcacgagcaggaacagcggcggctggagcgagcactggctgaggggcagcagcggggagggcagctgcaggagcagctgacacaacagttgtcccaagcactgtcgtcagctgtagctgggcggctagagcgcagcatacgggatgagatcaagaagacagtccctccatgtgtctcaaggagtctggagcctatggcaggccaactgagcaactcagtggctaccaagctcacagctgtggagggcagcatgaaagagaacatctccaagctgctcaagtccaagaacttgactgatgccatcgcccgagcagctgcagacacattacaagggccgatgcaggctgcctaccgggaagccttccagagtgtggtgctgccggcctttgagaagagctgccaggccatgttccagcaaatcaatgatagcttccggctggggacacaggaatacttgcagcagctagaaagccacatgaagagccggaaggcacgggaacaggaggccagggagcctgtgctagcccagctgcggggcctggtcagcacactgcagagtgccactgagcagatggcagccaccgtggccggcagtgttcgtgctgaggtgcagcaccagctgcatgtggctgtgggcagcctgcaggagtccattttagcacaggtacagcgcatcgttaagggtgaggtgagtgtggcgctcaaggagcagcaggccgccgtcacctccagcatcatgcaggccatgcgctcagctgctggcacacctgtcccctctgcccaccttgactgccaggcccagcaagcccatatcctgcagctgctgcagcagggccacctcaatcaggccttccagcaggcgctgacagctgctgacctgaacctggtgctgtatgtgtgtgaaactgtggacccagcccaggtttttgggcagccaccctgcccgctctcccagcctgtgctcctttccctcatccagcagctggcatctgaccttggcactcgaactgacctcaagctcagctacctggaagaggccgtgatgcacctggaccacagtgaccccatcactcgggaccacatgggctccgttatggcccaggtgcgccaaaagctttttcagttcctgcaggctgagccacacaactcacttggcaaagcagctcggcgtctcagcctcatgctgcatggcctcgtgacccccagcctcccttagctgctaagcctgccttgcccaggggtgggatggcactgaaggccagcagacaggcctaggctggggcagggtcacggctggcctttacctgctcaggcccccatctctggggtgtttgggggtcagggagcagggagcactggccgtggtctacagcgtgtggtagtcagaaggtttagctgggcccagggcaggtattgcgcctgcttgggttctgccatgcctggagcatgaccctgagatcgtgacaccacttgagtggaattttccatgttcctttttacctctaatttggatctttttgtttttgaaaaacattgagaaattcaattaaatgcttttggaataaaatggaaaaaaaaaaaaa

SEQ ID NO: 3318 - DNA, 2693 bp, Homo Sapiens
  NM_014338
ggaagctggagccacctgcggctctgagagggacagacggtgctcagcctgtgtcctggggcaaagctggattcattttcctccctggcgatcttctggggcccacagctggtgatatggaggcactgacaccctggtctcggcgcttgttttagaagaggcagaacagtgataaagacaaggatctaaatgggcaaggacgccctgccctcactgggctcactggcagccctgaccctctattctgcaccctgtgagccaccgagactgaaccaaacccaggaagcggcgccaccaaccagcctcgcagaggcagaggccctggagcagtgacagcacaggagatctgctggctcgggggaaggggaggaaagaggaaaacaaagggagtgatcgagtgagcctcgccccgccctccctgcgccggcccatgatgtgtcagtcagaggcgcggcaaggaccagagctccgcgcggcgaaatggttgcacttcccccagctggccctgaggcggaggctggggcagctgagctgcatgtccagacccgctctgaaactgcgctcctggcccttgaccgtcctctactacctcctgcccttcggcgccctcagaccgctcagccgggtgggatggaggcccgtaagcagggtggctttgtacaagtcagtgccaacgcgcttgctgtcacgggcctggggtcgcctcaatcaggtggagctgccacactggctgcgcaggcccgtctacagcctgtacatctggacgtttggggtgaacatgaaagaggccgctgtggaggacctgcatcactaccgcaacctcagcgagttcttccggcgcaagctgaagccgcaggcccggcctgtctgtggcctgcacagcgtgattagcccatcggatggaaggatcctcaactttgggcaggtgaagaactgtgaggtggagcaggtaaagggggtcacctactccctggagtcgttcctgggcccgcgtatgtgcacagaggacctgcccttcccaccagccgcgtcgtgtgactccttcaagaaccagctggtcacccgggaagggaatgagctctatcactgtgtcatctacctggcccctggggactaccactgcttccactcccccaccgactggactgtgtcccaccggcgccacttcccaggctccctgatgtcagtgaaccctggcatggctcgctggatcaaagagctcttctgccataacgagcgggtggtcctgacgggggactggaaacatggcttcttctcactgacagctgtgggggccaccaacgtgggctccattcgcatctactttgaccgggacctgcacacaaacagcccaaggcacagcaagggctcctacaatgacttcagcttcgtgacgcacaccaatagagagggcgtccccatgcgtaagggcgagcacctgggcgagttcaacctgggctccaccatcgtgctcatcttcgaggcccccaaggacttcaatttccagctgaaaacaggacagaaaatccgctttggggaagccctgggctcgctctagagtctctttcctgattatggctgctaagggatcttttccaaacagagtgagggtcttttcaagagggaggcccatgaggccatccaggtaagggcctgcctcagcgtggttgggagtctgaccaggtaggacttgaatgattcggctaccacctgttccagaggtgcagacaagaggtggcgagagcccccatcatgcccctcaacctatcccgttccttctgcctacaaataaaaagtgcaggctggaatgatctcagtcacatttggatctttttaaacactgtatagacggaagagcctgcattcctgaccgaaccttcagttggtctcggttgtcgttttttcttgctgctcctccccccatcacctgagctgttttctgttggccccttttgttttttggccttaacgctcctgctgcacagggtgaggtgcctccttggcacagactgtggatgcctctcccccagcagagccacacagccttcgtgacaactgctttccgttcccacattcacctcatcctgctctttagaaaaagcagtctttgtgcttgtggctgaacgcatcaccctggactctgctagtgtcttctgaggacactgatgacactgattaatgatacagacctttgcaggacctgatgagtgacccttctggagctggccaggtcctctgcagcaggcaagaccaatcaatcactgaacctgcctcatggcaccagagtgaacagggcaggcaggtagtaggcccagctggggaaatgggagagttcctgtccccctccacatatccctacatgaaatatgggaaagttgctgctattgattcagggtctgtcttggaggcagaggacccttggtggatagttggtcagtgcctggaaaacctgtcccagtttatcaggaacgcaggcctggggagcccccagtggcggggacagggccagatttcatgttgaccctggggatgctgtgaatttctcctgcaggagagacatcattgaattttttcaactgtatcagtagcacagtatttttgtatgaaaagtgggagacttctgaacagtaattcatttaattgcaaagcattttgaaataaaaaaaatcaaacttaaaaaaaaaaaaaaaaaa

SEQ ID NO: 3319 - DNA, 3637 bp, Homo Sapiens
  NM_019053
acttggagctcgcccccgtcgttcccgcggcgccgcgcctcgctggctcctcagcttccagccaaaatggcggagaacagcgagagtctgggcaccgtccccgagcacgagcggatcttgcaggagatcgagagcaccgacaccgcctgtgtggggcccaccctccggtctgtgtatgatgaccaaccaaatgcgcacaagaagtttatggaaaagttagatgcttgtatccgtaatcatgacaaggaaattgaaaagatgtgtaattttcatcatcagggttttgtagatgctattacagaactccttaaagtaaggactgatgcagaaaaactgaaggtgcaagttactgataccaaccgaaggtttcaagatgctggaaaagaggtgatagtccacacagaagatatcattcgatgtagaattcagcagagaaatattacaactgtagtagaaaaattgcagttatgccttcctgtgctagaaatgtacagtaagctgaaagaacagatgagtgccaaaaggtactattctgccctaaaaactatggaacaattagagaatgtgtactttccctgggttagtcaataccggttttgtcagctcatgatagaaaatcttcccaaactccgtgaggatattaaagaaatctccatgtctgatctcaaagactttttggaaagtattcgaaaacattctgacaaaataggtgaaacagcaatgaaacaggcacagcatcagaaaaccttcagtgtttctctgcagaaacaaaataaaatgaaatttgggaaaaatatgtatataaatcgtgatagaattccagaggaaaggaatgaaactgtattgaaacattcacttgaagaagaggatgagaatgaagaagagatcttaactgttcaggatcttgttgatttttcccctgtttatcgatgtttgcacatttattctgttttgggtgacgaggaaacatttgaaaactattatcgaaaacaaagaaagaaacaagcaagactggtattgcaaccccagtcgaatatgcatgaaacagttgatggctatagaagatatttcactcaaattgtagggttctttgtggtagaagatcacattttacatgtgacccaaggattagtaaccagggcatacactgatgaactttggaacatggccctctcaaagataattgctgtccttagagctcattcatcctattgcactgatcctgatcttgttctggagctgaagaatcttactgtaatatttgcagatactttacagggttatggttttccagtgaaccgactttttgaccttttatttgaaataagagaccaatacaatgaaacactgcttaagaaatgggctggagttttcagggacatttttgaagaagataattacagccccatccctgttgtcaatgaagaagaatataaaattgtcatcagcaaatttccctttcaagatccagaccttgaaaagcagtctttcccaaagaaattccccatgtctcagtcagtgcctcatatttacattcaagttaaagaatttatttatgccagccttaaattttcagagtcactacaccggagctcaacagaaatagacgatatgcttagaaaatcaacaaatctgctgctgaccagaactttgagtagctgtttactgaaccttattagaaaacctcatataggtttgacagagctggtacaaatcatcataaacacaacacacctggagcaagcttgtaaatatcttgaggactttataactaacattacaaatatttcccaagaaactgttcatactacaagactttatggactttctactttcaaggatgctcgacatgcagcagaaggagaaatatataccaaactgaatcaaaaaattgatgaatttgttcagcttgctgattatgactggacaatgtctgagccagatggaagagctagtggttatttaatggaccttataaattttttgagaagcatctttcaagtgtttactcatttgcctgggaaagttgctcagacagcttgcatgtcagcctgccagcatctgtcaacatccttaatgcagatgctactggacagtgagttaaaacaaataagcatgggagctgttcagcagtttaacttagatgtcatacagtgtgaattgtttgccagctctgagcctgtgccaggattccagggggataccctgcagctagcattcattgacctcagacaactccttgacctgtttatggtttgggattggtctacttacctagctgattatgggcagccagcttctaagtaccttcgggtgaatccaaacacagcccttactcttttggagaagatgaaggatactagcaaaaagaacaatatatttgctcagttcaggaagaatgatcgagacaaacagaagttgatagagacagtcgtgaaacagctgagaagtttggtgaatggtatgtcccagcacatgtagacctcacatggcttgcactcagtgacaccaaatccatgattcaatgttgatcttgagcaagtattggtcatgatacagtaatttgtttacagaatccaaaaatacaatagagaagatacatgagggcttaaacaagaaatagtaataaatatcatttgtatggatttttaaataatcgaatactattttatatatggaaaaaaatgaccattttttcacttttaggggaaaatgcaaaagtgtaatacataaattgtcacaaattatacctgaaattgattacaaatacatttgaaaaacatatgcctctactcataagtatttttttctatttagacttgaatgataatctgttttttgatcagtatatggctttggaattcaatcatgtctgatatggtagtatttcactaccattttctgacttttagcttttattttcacctcaatgtgatttaagcagaccaaaatttctaattctgctaattctgaaggggaaatagacaaatcttaaaagctgcctgaaatcaaacttgatttaactcagtaagaatgtgaattatttgttctacttgggtggtttaatttaatcgttctgaatatgaacaaaaggttttggattttctaaagatgcagtgttgtttctgttcatcagggttaatatttctaactatattgcttgtaggtgaccccattctggatttgtttggtttggtttggttccagttaaaagagaggacaggaactaaatggggctaaccacttcaggtgcagcttgtgcgagggtagatggttcctgcacacagaagttaccacaggggtcaggttactttcttcaaatagcagatttcagtactttatcctcattgtggaaacaagccaaaccaaatgaactctggaaaacctaaaacaaatgtacattttcctttgtgtatgtttccgtggtccaaatggcaatataaatccagtctttattctccctttgttgtatttatgctgaatcttccctttgccttttcaggatttaggcctgtaagaaactatgcctgattctgtaaaataagtgtaaagaattatatgtacatctctggattttgtgatgaaatattaaaaatattgagcaagttgttgaaaatgcaaaaaaaaaaaaaaaaaa

SEQ ID NO: 3320 - DNA, 3417 bp, Homo Sapiens
  NM_019054
acgggcggccggatttgcccggaggccgcacccgcctccggcggggctctcagtgaaaaatgtactctgacctgaatcctgaattttccttgatggtcaaaagattaagaaatcatgagtggaggatctcaagtccacattttttggggtgctccaattgctccactgaaaatcacagtatcagaagacacagcttctttaatgtctgttgctgacccctggaaaaaaattcagcttttatacagtcaacattctttatatctgaaggatgaaaaacagcacaaaaatcttgaaaactataaagtcccagaatctattggttctccagatcttagtggtcatttcttagcaaactgtatgaatagacatgttcatgtgaaagatgactttgtacgttctgtttctgaaacacagaatatagaatcccagaagattcactcctctagactgagtgatataactagctctaatatgcaaatatgtggatttaaaagcacagttccgcatttcaccgaagaagaaaagtatcaaaagcttctcagtgaaaataaaattagagatgaacagcctaaacatcagccagatatatgtggtaagaactttaacacaaatttgtttcagttgggccataaatgtgcagctgtgttggatttggtttgtagtactgaaaaaattaatatagggcctgaagtggtacaaagagagtgtgtgccaacagaatatcatgaaatacaaaaccagtgtttgggattattttcctcgaacgcagtagataagtcaaggtctgaagcagcagttaggaaggtctcagaccttaaaatatcaactgatacagaatttctcagtataattacctccagccaggttgcttttttagctcaaaagaaagataaaaggcggagtcctgtaaataaagggaatgtaaacatggagactgaaccaaaggcaagttacggggagataagaatacctgaagagaattcgattcagcttgatggttttacagaagcatatgaaagtggacaaaaccaagcatattcccttgaactttttagtcctgtttgtcctaaaacagaaaatagccgcattcacataaactctgataaaggtcttgaagaacatacaggatctcaagaacttttcagttctgaagatgaactgccaccaaatgagatacgtattgagttgtgtagctcaggaatactgtgttcccaactaaataccttccacaaaagtgctattaaaagaagctgtacctctgaagataaagtgggccagtctgaagctctatctagagtccttcaagtagctaagaaaatgaagttgatttctaatggaggagattctgctgtagaaatggatcggagaaatgtgtctgaatttaagagtattaaaaaaacatcattaataaaaaactgtgattctaaaagccagaagtataattgtttagtcatggtgctatctccatgccatgtgaaggaaataaacataaaattcggaccaaattctggctctaaagtgcctttagcaacagttacagtaattgatcaatcagaaactaagaagaaggtttttctgtggaggactgcagcattttgggcatttacagtgtttcttggagatataattttactcacagatgttgttattcatgaggaccaatggattggcgagacagtactacaatcaacatttagcagtcagttattaaatcttgggagttattcatctattcagcctgaagaatattccagtgtagttagtgaagttgtacttcaagacttactggcatatgtgtcctcaaaacattcctacctcagagatcttcctccgaggcagcctcagagggtgaacagtatagactttgtagaattggagcaccttcaacctgatgtattagtccacgcagtactaagagttgttgatttcactatactgacagaggcagtatacagttatagaggacagaagcagaaaaaagttatgttaacagtggaacaggcccaagatcaacattatgcgcttgtattatggggtcctggagcagcctggtaccctcaacttcaaaggaaaaaaggagtggttctgattaaagcccagatttcagagctggcatttcctattacagcatctcagaagatagcgctaaatgctcacagttctctgaagagtattttttcttctcttcccaacatcgtatatactggttgtgcaaaatgtggattggaactagaaacagatgagaacaggatctacaaacaatgttttagctgcttgccatttactatgaagaaaatatattataggccagcgttaatgactgccattgatggaagacatgatgtttgtatccgtgtagaatcaaagctgatagagaagattcttctcaacatttctgcagactgcctcaacagagtgatagttccttcctcagagatcacctatgggatggtcgtggcagacctgttccactccttgttggcagtcagcgcagaaccttgtgtattaaagattcagagcctttttgtgttagatgaaaacagctatccattacaacaagatttctccctcctggatttttatcctgacattgtaaagcatggagccaatgcccgtctctgaggccagaggaagaaattgcaggcatttcaaggaagaagtactgaaatgatttgtcttttgaaataaatgaatgacagggcttttgctttggattttttatgaaatatattttacaaagagaattgcactagatatataaattaaaacttttttctaagaaaatcctgtgaggtttaaaaagattgtttttgtcttttggtttcttactttctcctggagaaatgatctaccagtcaaggcaatatgtagcagatccctgggaattaaaggtttgcccatttgttcactgtatttagtccctgctacattccaggcattgtactaagtatggggaaccacagagaagacattccctcagaaactgctgcagtgctttcgcttatccctacctaaaaaaccgtcaatgtgaaatcatttccttgattataactataatgataatggattagtttatataaacctatgtttagacaagttcaagacaagcgtgtctttctataaaaagtattgaaaatgaaggaaatgagatcatgtttcaatttattaaagcagggaagagcgttctgtgcttagttcgtgtctaggatttgagtgccttactgaatgcatttaccagcaaacatgtagcaatctgttctctcattgtgattgtggaagaagctcatgtaaaatgatagtcattaatgaggaagtatggcgtggtacttattctgtaagttcagagtatgctgagtgttaatagattatcatattgcctgaaaataaattcatgatgacatgaaaaaaaaaaaaaaa

SEQ ID NO: 3321 - DNA, 5565 bp, Homo Sapiens
  NM_019063
ggcgcggcgctcgcggctgctgcctgggagggaggccgggcaggcggctgagcggcgcggctctcaacgtgacggggaagtggttcgggcggccgcggcttactaccccagggcgaacggacggacgacggaggcgggagccggtagccgagccgggcgacctagagaacgagcgggtcaggctcagcgtcggccactctgtcggtccgctgaatgaagtgcccgcccctctaagcccggagcccggcgctttccccgcaagatggacggtttcgccggcagtctcgatgatagtatttctgctgcaagtacttctgatgttcaagatcgcctgtcagctcttgagtcacgagttcagcaacaagaagatgaaatcactgtgctaaaggcggctttggctgatgttttgaggcgtcttgcaatctctgaagatcatgtggcctcagtgaaaaaatcagtctcaagtaaaggccaaccaagccctcgagcagttattcccatgtcctgtataaccaatggaagtggtgcaaacagaaaaccaagtcataccagtgctgtctcaattgcaggaaaagaaactctttcatctgctgctaaaagtggtacagaaaaaaagaaagaaaaaccacaaggacagagagaaaaaaaagaggaatctcattctaatgatcaaagtccacaaattcgagcatcaccttctccccagccctcttcacaacctctccaaatacacagacaaactccagaaagcaagaatgctactcccaccaaaagcataaaacgaccatcaccagctgaaaagtcacataattcttgggaaaattcagatgatagccgtaataaattgtcgaaaataccttcaacacccaaattaataccaaaagttaccaaaactgcagacaagcataaagatgtcatcatcaaccaagaaggagaatatattaaaatgtttatgcgcggtcggccaattaccatgttcattccttccgatgttgacaactatgatgacatcagaacggaactgcctcctgagaagctcaaactggagtgggcatatggttatcgaggaaaggactgtagagctaatgtttaccttcttccgaccggggaaatagtttatttcattgcatcagtagtagtactatttaattatgaggagagaactcagcgacactacctgggccatacagactgtgtgaaatgccttgctatacatcctgacaaaattaggattgcaactggacagatagctggcgtggataaagatggaaggcctctacaaccccacgtcagagtgtgggattctgttactctatccacactgcagattattggacttggcacttttgagcgtggagtaggatgcctggatttttcaaaagcagattcaggtgttcatttatgtgttattgatgactccaatgagcatatgcttactgtatgggactggcagaagaaagcaaaaggagcagaaataaagacaacaaatgaagttgttttggctgtggagtttcacccaacagatgcaaataccataattacatgcggtaaatctcatattttcttctggacctggagcggcaattcactaacaagaaaacagggaatttttgggaaatatgaaaagccaaaatttgtgcagtgtttagcattcttggggaatggagatgttcttactggagactcaggtggagtcatgcttatatggagcaaaactactgtagagcccacacctgggaaaggacctaaaggtgtatatcaaatcagcaaacaaatcaaagctcatgatggcagtgtgttcacactttgtcagatgagaaatgggatgttattaactggaggagggaaagacagaaaaataattctgtgggatcatgatctgaatcctgaaagagaaatagaggttcctgatcagtatggcacaatcagagctgtagcagaaggaaaggcagatcaatttttagtaggcacatcacgaaactttattttacgaggaacatttaatgatggcttccaaatagaagtacagggtcatacagatgagctttggggtcttgccacacatcccttcaaagatttgctcttgacatgtgctcaggacaggcaggtgtgcctgtggaactcaatggaacacaggctggaatggaccaggctggtagatgaaccaggacactgtgcagattttcatccaagtggcacagtggtggccataggaacgcactcaggcaggtggtttgttctggatgcagaaaccagagatctagtttctatccacacagacgggaatgaacagctctctgtgatgcgctactcaatagatggtaccttcctggctgtaggatctcatgacaactttatttacctctatgtagtctctgaaaatggaagaaaatatagcagatatggaaggtgcactggacattccagctacatcacacaccttgactggtccccagacaacaagtatataatgtctaactcgggagactatgaaatattgtactgggacattccaaatggctgcaaactaatcaggaatcgatcggattgtaaggacattgattggacgacatatacctgtgtgctaggatttcaagtatttggtgtctggccagaaggatctgatgggacagatatcaatgcactggtgcgatcccacaatagaaaggtgatagctgttgccgatgacttttgtaaagtccatctgtttcagtatccctgctccaaagcaaaggctcccagtcacaagtacagtgcccacagcagccatgtcaccaatgtcagttttactcacaatgacagtcacctgatatcaactggtggaaaagacatgagcatcattcagtggaaacttgtggaaaagttatctttgcctcagaatgagactgtagcggatactactctaaccaaagcccccgtctcttccactgaaagtgtcatccaatctaatactcccacaccgcctccttctcagcccttaaatgagacagctgaagaggaaagtagaataagcagttctcccacacttctggagaacagcctggaacaaactgtggagccaagtgaagaccacagcgaggaggagagtgaagagggcagcggagaccttggtgagcctctttatgaagagccatgcaacgagataagcaaggagcaggccaaagccacccttctggaggaccagcaagacccttcgccctcgtcctaacaccctggcttcagtgcaactcttttccttcagctgcatgtgattttgtgataaagttcaggtaacaggatgggcagtgatggagaatcactgttgattgagattttggtttccatgtgatttgttttcttcaatagtcttattttcagtctctcaaatacagccaacttaaagttttagtttggtgtttattgaaaattaaccaaacttaatactaggagaagactgaatcattaatgatgtctcacaaattactgtgtacctaagtggtgtgatgtaaatactggaaacaaaaacagcagttgcattgattttgaaaacaaacccccttgttatctgaacatgttttcttcaggaacaaccagaggtatcacaaacactgttactcatctactggctcagactgtactacttttttttttttttttcctgaaaaagaaaccagaaaaaaatgtactcttactgagataccctctcaccccaaatgtgtaatggaaaatttttaattaagaaaaacttcagttttgccaagtgcaatggtgttgccttctttaaaaaatgccgttttcttacactaccagtggatgtccagacatgctcttagtctactagagaggtgctgccttttctaagtcataatgaggaacagtcccttaatttcttgtgtgcaactctgttttatcctagaactaagagagcattggtttgttaaagagctttcaatgtatattaaaaccttcaatactcagaaatgatggattcctccaaggagtcctttactagcctaaacattctcaaatgtttgagattcaagtgaatggaaggaaaaccacatgcctttaaaactaaactgtaataattacctggctaatttcagctaagccttcatcataatttgttccctcagtaataggagaaatataaatacagtaagtttagattattgaattggtgcttgaaatttattggttttgttgtaattttatacagattatatgagggataagatactcatcaaattgcaaattcttttttttacagaagtgtgggtaacagtcacagcagttttttttaccaacagcatacttaacagacttgctgtgtagcagtttttttctggtggagttgctgtaagtcttgtaagtctaatgtggctatcctactcttttgggcaatgcatgtattatgcattggaaaggtattttttttaagttctgttggctagctatggttttcagtacatttcctactttaagagtaattactgacaaatatgtatttcctatatgtttatactttgattataaaaaagtattttgttttgattttttaacttgctgcattgttttgatactttctatttttttggtcaaatcatgtttagaaactttggatgagttaagaagtcttaagtatgcaggcgtttacgtgattgtgccattccaaagtgcatcagaactgtcattcccttctaatatcttctcaggagtaatacaaatcaggtatttcatcatcatttggtaatatgaaaactccagtgaactcccaaggacatttacaacatttatattcacacgctgtatggaagggtgtgggtgtgtgtgaaggggcgagtggagacactgtgtgtatctctagataagaagatatgcaccacgttgaaaatactcagtgtagatctctatgtgtataggtatctgtatatctttccttttgtttacaactgttaaaaaacctcaaaatagttctcttcaaaagaagagagattccaagcaacccatctttcttcagtatgtatgttctgtacatacttatcggagcgcgccagtaagtatcaggcatatatatctgtctgttagcaatgattattacatcatcagatcagcatgtgctatactccctgcaagaaatatactgacatgaacaggcagttcttggagaagaaagagcatttctttaagtacctggggaatacagctctcagtgatcagcagggagtttatttgaggacatcagtcacctttggggttgccatgtacaatgagatttataatcatgatactcttcggtggtagtttcaaaagacactactaatacgcaggaagcgttccagctatttaatgctggcaactactgtttaatggtcagttaaatctgtgataatggttggaagtgggtggggttatgaaattgtagatgtttttagaaaaacttgtgaatgaaaatgaatccaagtgtttcatgtgaagatgttgagccattgctatcatgcattcctgtctcatggcagaaaattttgaagattaaaaaataaaataatcaaaatgtttcctctttctaaaaaaaaaaaaaaaaaa

SEQ ID NO: 3322 - DNA, 6628 bp, Homo Sapiens
  NM_019064
tcaccatccccaaccccaccggcagcgacgccggctactacgagtgcgaggctgtcctgcgcagcagcagcgtcccctctgttgtccggggcgcctacctctcagtgctggaaccgcctcagtttgtcaaggagccagaaagacacatcactgcggagatggagaaggtggtggacatcccctgtcaggccaaaggtgtgccgccgccctccatcacctggtacaaggacgcagccgtggtggaggtggagaagttgacccgcttccggcagcgcaacgacgggggcctgcagatcagcggcctggtgcccgatgataccggcatgttccagtgcttcgcccgcaatgcagccggcgaggtgcaaacttccacctacctggctgtcaccagcatcgcccctaacatcaccagaggccccctggacagcacggtgatcgatggcatgtcagtggtgctagcatgtgagacctcgggggcgccccgaccagctatcacttggcagaaaggggagcgcatcttggccagtggctctgtgcagctgcctcgcttcacacccctggagtcgggcagcctcctcatcagccccacacacatctccgatgcggggacctacacctgcctggccaccaactctcggggggtcgatgaggcctcagcagacctagtcgtttgggctcggacccgcatcaccaagcccccccaggatcagagtgtcatcaagggcacccaggcctccatggtgtgcggagtgacccacgacccccgagtaaccatcaggtacatctgggagaaggacggggccaccctgggcacggagagccatcctcgtatccgcctggacagaaacggctccctgcacatctcacagacgtggtcgggagacatcggcacgtacacctgccgggtgatctcagcaggaggcaacgactctcgcagtgcccacctgcgagtcaggcaactgccccacgcgcccgagcacccagtggccactctcagcaccgtggaaaggcgagccatcaacctgacgtggaccaagccctttgatggcaacagccccctgatccgctacattctggagatgtcggagaacaatgccccctggactgtactcctggccagtgtggaccccaaagctacctcagtgacagtcaagggcctggttcctgcacgctcctaccagttccgtctttgtgccgtcaacgacgtggggaaaggacagttcagcaaagacaccgagagggtctccctccccgaggagccccccacggcccctccacagaacgtcatcgccagcggtcgaaccaaccagtccatcatgatccagtggcagccgcctcctgagagccaccagaatggaattctcaagggttacatcatcaggtactgcctggccgggctgcccgtggggtaccagtttaagaacatcacggatgctgatgtgaacaacctgctgctggaggatctcatcatttggaccaactacgagatcgaggtggctgcttacaacagcgctgggctgggggtctacagcagtaaagtcaccgagtggacgctgcagggagttcccacagtccctccgggcaatgtgcacgcggaagccaccaattccacgaccatccgcttcacctggaacgcccccagcccccagttcatcaacggcatcaaccagggctacaagctgatcgcctgggagccggaacaggaagaggaggttaccatggtgaccgcccggcctaactttcaagacagcatccacgtgggcttcgtgtctggcctgaagaagttcaccgagtacttcacctcagtgctgtgtttcaccacccccggggacgggccacgcagcaccccgcagctggtgcgcacccatgaggatgtgcctgggcccgtgggacacctgagcttcagtgagatcctggacacatcgctgaaggtcagctggcaagagccgggagagaaaaatggcatcctcacagggtaccggatctcctgggaggagtacaatcgaaccaacacccgtgtgacccactacctgcccaacgtgaccctggagtaccgtgtcacgggcctcaccgcgctcaccacctacaccatcgaggtggccgccatgacctcaaagggccagggccaagtgtccgcctccaccatctcctctggggtgcccccagaactcccagggccccccaccaacctgggcatttccaacatcggcccccgctctgtgaccttgcagttcaggccaggctacgatgggaaaacctccatctcccgctggctggtggaagcccaggtaggcgtggttggggagggagaggagtggttgctgatccaccagctctccaatgagcccgatgcccgctccatggaggtgcccgacctcaaccccttcacctgctacagcttccgcatgcgccaggtgaacatcgtgggcaccagcccccccagtcagccttctagaaagatccagaccctgcaggcaccccctgacatggccccagccaatgtgtctctgcgcacagccagtgagaccagcctgtggctgcgctggatgcctctcccggagatggaatacaatgggaaccctgagtccgtgggctataagatcaagtacagccggtcagacgggcatggcaagacgctgagccacgtggtgcaggaccgtgtggagcgggactacaccatcgaggacctggaggagtggacagagtaccgcgtccaggtccaggccttcaacgccatcgggagcgggccctggagccagacggtggtgggcaggacccgggagtcagttccctcttccggccccaccaatgtgtctgcactggccaccacctccagcagcatgctggtgcgctggagcgaggtccccgaggctgatcgcaacgggctcgtgctgggctataaggtgatgtataaggagaaggactcggacacccagccccgattctggctggtggaaggcaactcgtctcgcagtgcccagctcaccggcttgggcaaatacgtgctctatgaagtccaggtgctggccttcacacgcatcggggacggcagccccagccaccctcccatcctggagcggacgctggatgatgtcccaggaccacccatgggcatcctgttcccagaggtgcggaccacgtctgtgcggctgatctggcagccccctgccgcccccaatggcatcattcttgcttaccagatcacacaccggctcaacaccaccacggccaacaccgccactgtggaggtgctggcacccagcgcccggcagtacacagccacgggcctcaagccagagtctgtctacctgttccgcatcacggcccagacccgcaagggctggggagaagctgccgaggccttggtggtgaccaccgagaagagagaccgtccgcagccccccagcaggccgatggtgcagcaggaggatgtgagagcacgcagcgtgctgctgtcctgggagccagggagcgacgggctctcccctgtgcgctactacaccatccagacccgcgagctgcccagcggcaggtgggcactgcactcggcctccgtgagccacaatgcctccagcttcattgtggacaggctgaagcccttcacgtcctacaagttccgagtgaaggcgaccaatgacattggcgacagcgagttcagcgaggagtcggagtcactgaccaccctgcaggctgcccccgatgaagcacccaccatcctctccgtgacgccccacaccaccacctccgtgctaatccgatggcagccgccagcagaggacaagatcaatggcatcctcctgggcttccggatccgataccgggagctgctctatgaaggactgaggggcttcacgcttcgaggcatcaacaacccaggggccacatgggctgagcttacctccatgtactccatgcggaacctgagccggcccagcctcacgcagtacgagctggacaacctgaacaagcacaggcggtacgagatacggatgagcgtgtacaacgctgtgggtgaggggccctccagccccccgcaggaggtctttgttggggaggcagtgcccacagcagcacctcgtaacgtggtcgtccacggcgccacggccacacagctggacgtgacttgggagccacctccgctggacagccagaatggagacatccaggggtacaagatttatttctgggaagcccagcgggggaacctcacagagcgagtgaagacgcttttcctggctgagaacagcgtgaagctcaagaacttgactggctacacggcctacatggtcagcgtggccgccttcaacgccgctggggatgggcctcggagcacccccacccaaggccagacccagcaagcagcccccagcgctcccagctcggtcaagttcagtgagctgaccacaacctcagtgaatgtgtcctgggaagccccgcagttccccaatggcatcctggagggctacaggctggtgtacgagccctgcagccccgtggatggagtcagcaagatcgtgaccgtggacgtgaaggggaacagccccctgtggctgaaggtgaaggacctggcggagggggtgacctacaggttccgcatcagagccaagaccttcacctacgggccggagatcgaagccaacgtcaccacgggccccggagaaggtgccccaggaccgcctggcgtgcccatcatcgtgcggtacagctctgccatcgccattcactggtccagcggagacccgggcaaagggcccatcacccgctacgtcatcgaggccagaccttcagacgagggactatgggacatcctcatcaaagacatccccaaggaggtgagctcctacacgttcagcatggacatcctgaagccgggcgtgagctatgacttccgggtcatcgcggtcaacgactatggtttcggcacccccagcagcccctcccagtctgtgccagcccagaaagccaaccccttctatgaggagtggtggttcttggtggtcattgccctggtcggcctcatcttcatcctgcttctggtcttcgtgctcatcatccggggccagagcaagaagtacgccaagaagacagactcggggaacagtgccaagtctggagccctaggccacagcgagatgatgagcttggatgaaagcagcttccctgccctggaactcaacaacaggcggctctccgtcaagaactctttctgccgaaagaacggcctgtacaccaggtctccccccaggcccagcccaggcagcctgcactactcggatgaggatgtcaccaaatacaacgacctcatccctgcagagagcagcagcctgacggagaagccctcagaaatctccgactctcagggaagtgacagcgagtacgaggtcgactcaaaccaccagaaggcccactcctttgtcaaccactacatcagtgaccccacatactacaactcgtggcggcgacagcagaagggcatctcgagggcacaggcctacagctacacggagagcgactcgggtgagccagaccacaccaccgtcaccaacagcaccagcacccagcagggcagcctctttcggcccaaggccagtcggactccaacgccccagaacccccctaaccccccaagtcagcagagcaccctctaccgtccccccagcagcctggccccaggctcccgggctcccatagcaggattttcatcatttgtttgacatcagaagaggaaaaagcagaaagagaaatggcaccaaactcctccttcacccctcctctcactgcctgccagaaaacaaaaacaccaagaaaccaagtcaacttttcacctcctgagtttatttttccagagattccagggccagcaaagccggcgttcagaaggagggagaaaaccgtgagaggatgtgtgtggccagcagctcttcagctttgagatggtggggttcactgctcccttgggaattacacggagctggggaagtggctgtgtcactgctatggacacggagtggggcgggcatctggagagagagagggagcggaggctaaggactggaggccgccaggcaggcgtggccgagggaagaaaaagcttctggatgtccagccagctgcccccttccagcccctccaggacccctggacccactgccgctgctctctgcaaaaagaatgggcatcccggaggccacgcctatcttctctctctgctcctccttccctccatgcaccatcactgtggctggcaggcatcggacagcctcatccagaccccctgccctgtcttggcaacctctactgcccatctcccctgctcaacttctccaccaagcatttggtttatttagaaaaaggaagaaaaacaaaaaacaaaaaactaaagggtgagaatttgcttagcgccttccttgttcctgcatattttttaaaatattgaatccaaggaagagagcccaagggtaggggagaaaccccccacaactgacccctgcctccctgtgctggaattgactttcctgagcatggacaaggaaaggtgaagtctggggagcagaggtgtaaataaggcgactggccttggcactgtgggatgattaggtttaacgcattgtgggcaagataagaatga

SEQ ID NO: 3323 - DNA, 8573 bp, Homo Sapiens
  NM_019067
gatccggaagtcggagcctagctgcgcgagagtttctgctcgctcaaccgagttgtcgtgttgccctcgcttctcagatccccgccggaagtgaagagagcaagcagatttgaacctatctgctttcaagctggtcatcatgatgaaacttagacacaaaaataaaaagccaggtgaaggttccaagggccacaagaagataagttggccctaccctcagcctgcaaagcaaaatgggaagaaagcaacctccaaagtgccctctgcacctcattttgttcaccccaatgatcatgccaatcgagaggctgaattaaagaagaagtgggttgaggagatgagggagaagcagcaagccgcccgggagcaagaaagacaaaaacgcaggaccattgagagctactgtcaggatgtcctaagacgccaggaggagtttgagcataaggaggaagttttgcaggaattaaatatgtttcctcagctggatgacgaggccacgaggaaggcttattacaaggagttccgtaaggtggtggaatactctgatgtgattctggaagtcctggatgccagagacccattaggctgccgctgcttccaaatggaggaggctgtcctgcgagcacaaggcaacaagaagctggtcctggtcttgaacaagattgacctggtccccaaggaggttgtggagaaatggctggattaccttcggaatgagttgccaaccgtggctttcaaggccagtacccagcatcaggtcaaaaacctgaatcgttgcagtgtgccagtagatcaggcctctgagtcactgctgaaaagcaaagcctgctttggagctgaaaacctcatgagggttctggggaactattgccgccttggtgaagtgcgcacccacattcgtgtgggtgttgtgggtcttcccaatgttgggaagagcagcctgatcaatagcctgaagcgcagccgcgcatgcagcgtgggagctgttcctggaattaccaaattcatgcaggaggtctacctggacaagttcatccggctcttggatgctccaggcattgtcccagggcccaactcagaggtgggcaccatcctgcgtaactgcgtccacgtgcagaagctggcagaccctgtgaccccagtggagaccatcctgcagcgctgcaacctggaggagatttccaactattatggcgtctctgggttccagaccactgagcactttctgacggcagtggcccaccgtttggggaagaagaagaagggaggcttatatagtcaggaacaggcggccaaagctgtcctagctgactgggtgagcgggaagatcagcttctatataccaccaccagccactcacactctgcccacccatctcagtgctgagatcgttaaggaaatgaccgaggtctttgacatcgaggatactgagcaggccaatgaagacaccatggaatgcttggccaccggagaatctgatgagctgttgggtgacacggacccacttgaaatggagatcaagttgctccattctccgatgacgaaaatagcagatgccattgaaaataaaaccaccgtgtataagattggagatctcactgggtattgcaccaatccgaaccgtcatcagatggggtgggctaaacgcaatgtggaccaccgccctaagagcaacagtatggtggatgtctgctcagtggaccgccgctcagtgctgcagaggatcatggagacggaccccctgcaacagggccaggctctggcatctgccctgaaaaataagaagaagatgcagaaacgtgcagataaaatcgccagcaagctgtctgattccatgatgtctgctctcgacctctctggcaatgctgatgatggtgttggtgactaatcgactgatctcacttcccttccgctccaagcaccagttccggtggtacgggggaataccagtgaaatagtttggttctccctgaagcatctgcatattgaaagaacgctttccccactgtgtgtcttctccccctcctccagtaaaaacagtcccggctaggtgctgtggctcacgtctgtaatcccagcactttgggaggccgaggtgggcagatcacctgaggtcaggagttcgagaccagcctggccaacatggtgaaaccccgtctctactaaaaatacaaaaaaatttagccgtgcttagtggcacctataatcccagctacttgggaggctgaggcaggagaatcgcctgaacctgggagactaaggcaggagaatcgcctgaacctgggaggcagaggttgcagtgagcccagacggcaccattgcactctagcctgggcaacaacacgaaactccgtcccaaaaaaaaaaaaaaaaaaaaaatcccaaggggctgcagctgccaaacccaataccctctatttaacccctactctgttttacaagagaaataaaagaagtatcagcagagctcaggtgctaacacctgttgagggctgacctacaaaactctgcctacaaaactctcttagacaggtgaatatgccactagaagttaggttgctggtagacctgggggtccctgcgggagggtgatggtttctttaccaccccacaggagatttcagtggcaaggcatgcctgcagtgggctttgggccatgcatcttccaagtccataggtcttcacctgggtggcagtgagaaaaagtagaaagtaatgagcctcctgtgtctctggaaggttctagggatagggtagagggaagaagagaacaaacaagcctggcttgtgctgaagtgtggtaggcactaccctgtttgcgtgaagagaaaacaaagcacctgttagtagggaggctttagggggaagccccgtcttgggggcatttctgggcagattgtgaattggaggaatctctttaactgaagtactctggctggaccctgcccttgtgtgaccatgtctcctattgcaccagcatttgaattccatggctcaagagggttctggtaccatttattcacagactgtatcctcgagagagctgctatatatgggagtgtaccagccaactccttttccagtgtctgtaagtcacctcattaaagtataattagctgtctcctctgggagatcctaccccatcagacaagggcagtgagcccaagcagtgccagaggccctcagaaagggattagggtagatgattgcaactgaaacacaatcttctttctttgccagggtattttgggggttttgccccaaaatataccctgggcatagcattactgcagtcttggatgtctaccccaaacttccacaccatccttcgacccacagctgcacctttatttatttattttgctctgttgcccaggctggagtgcaatggcgtgatctcggctcactgcaacctctgcctcccgggttcaagtgatcctcctgccttagcctcccaagtagctgggattacaggcacctgccaccacgcctggctagtttttgtatttttagtagagacgatgtttcaccatgttgaccaggctggtctcgaactcttgacctcaagtgatccactcgcttcggcctcccaaagtgctgggattataggcgtgagccactgtgcccagcctcacagctgcatcttaaccttacctttgcctctgcctctcaagctggtacctcctaatttacatcctaagagtggaaccatgtgacaaggactggagtgccattggctgtggactgttcaggcagggaagtacaagaccactcttgtattcaggggcaaccaaaggagagaattacgtacttgttgagtacaaactgcaccaagccctggagacccattaccaccgttaaccctcaatacagctctgctagtaagggattcgtctccccaaatgaaaaaaaaaagtaatctcagaatgttggccgagcatggtggctcacacctgtaatcccagttatgcaggaggctgaggcaggagaatcacttgatctcaggaggcggaggttgcagtgagtcgacatcacaccactgcactccagcctgggggacagagtgagacttcgtctcggaaaaaaaaaaaaaaagttgacaggatggccagacccaagtgggcgtattaagtggtggtgctaggattggaacccaagcgtgattaaaaccctatgcaggccctttcctctatattgtactgcctccttaacaaaggaagattgattaagcccctactttgtgccagtctctgttatcaagtccgttaaatgcatttaacgttaaattttttcttttttggtttaaaaaactctagtttcttaaactactagtttttagtgtcttgctaaaactatgtgctcttgaataggctacaacttatttcacactatctcattgaactctcctggtatgtgatagtgttataatgaaaaattgcataccaggacagctaagtctattttgcaaccatacagcgtttcataatttagcatttaaaatacagacagtccccgacttttggtggtttgatgtgggatttttggtggaaaagcagtatacattcagaatgcacctctacttatgatggggctacttcctggtaaacccattgtaatgtgcaaattacgggtttatcaggaggtgaccccatcggtaatggagaagtgctgggaggtaaatattagaaatggaagtatctaaatgagtaagaaacagcatgggagcataatttggccaaaatcaaacagaactaaagtagtcatgtcggtaagaatttgggactgcaggccagttacgatagctctcacctgtaatcccagcattttgggaggccgaggcaggcggatcacttgaggtcaggagttcaagaccagcctaaacaatatggcgaaacctcatctctaccaaaaaaatacaaagattagctgggcatggtgtctcatgcctgtagtcccagctacctatggggctgaggcaggaggatctcttgagcccaggaggtcgatgctgcattgagccgagattgtgccactgctctccagcgtgggcaacagagtgagactgtctcagggggaaaaaaaaagaggaaaacaaaaaagacgttgggagtgcagtttctctacctacagcatatctcaaaggttttttttaaaaaagtattttcttaactttttaccttcatttttcaaaacaattagggtacaatttacatatagtaaagttcactctttatagttttagttatgtgagtttgtacaaacatatacaggagtgaaccactaccacaatcgaaatatagttgcatcacccccctaaaactctccaggcccttttgtagtcaactcctacccccgaccctcagattctgctaaccactgatttgttttctgcccctatagttttgctttagtatgactgtcatatcaatagaatcatacaatgagtaggcttattttatgccttcaggttttaaaaattataaacatttacattacagtaaaattcactctggtatacagttctataaagctctgataaatgtgtagagttgtgtaaccaccaatgcaaccaaggtacagaacagtcctcttagcctctccctaccaaatttattcctgctactttgtagtcaaaaccagtcccctacacccaaaccctggcagtcactggtttttttcttcgttctcttttttttttttttttttttgagacagagtctagctctgttgtccaggctggagtggtgcagtggcgtgatctcggttcactgcaacctccgcctccagggttcaagcggttctcctgcctcagcctcccgagtagctgggattatgggcgcccgccaccacgcccagctaatttttgtatttttagtagagatggggtttcactgttttggccaggctggtctcgaactcctgacctcatgatcctcctgcctcagcctcccaaagtgctgggattacaagagtgagccactgcgcctggcctttttctttgttcttatatttttgtcttttttttttttttttttttgaaacagagtctcactctttcactgaggctggagtgcagtggcgtgatcttggctcactgcaacctccacctcctgggttcaagcgattctcctgccttagcctcccgagtaacagggactacaggtgcccaccaccatgctgggctaatttttgtatttttagtagaggcgggggtttctccacactggccaggctggtcttgaacttctgacctcaaaagatccacccacctcggcctcccaaagtgctgggattataggcatgaaccaccgtgtccggccatatattttcgtcttttgaagactgttatatacatgaaattatatggtatgtagcattttgagagcgacttcttttgctatgagtaatacatttgagattcatccatatttctcagtatattaatagttcttatttctgagtcactccattgtgtggatttactactgtttgttccccagttgaaggatgtttaggatctttgcagttttggacaattacaagtaaagctgctataaacatttgtatgcaacattttgtgttttcatttatctatagtaaatacctagagttggattgctgggatatatggtaagcatatgtttgacattttaagaaacttctaaactgtttttcaaagtggctctaccatttcacattcccatcagtatgaaagtttcatttccacatcctctctagtacttgggggtgtcagtttagttttttaatttttaaattttttaatttttttaatacatttaaatagagatggggtctcactgtgttgaccaggatggtcttgaactgctggcctcaagtaatcctcccatctcggtctcccaaagtgctaggattacaggtgtgagccaccatgcccagccaggttttttgacattaagtatgtggtggtatctcatcgtttttatttgcatcctctaatgatttgagcatattttatatgcttatttgctatctacatatcttctttggcaaggtgttcacatctcttgcatattttggattgttttattatttttgaattttgaggattatatgctggatacaggggtgtttttttttttttttttttttgaaacagagtcctcacccaggttggagtgtagtggtgcaatctcggctcactgcaacctctgcctcctgggttcaagtaattctcatgcctcagcctcctgagtagctggaattacaggcgcaggccaccatgcttggctaacttttatatttttaccagagacaaggtttcaccatgttggcaaggctggtcttgaactctggacctcaagtgatacacccgtcttagcctcccaaagttctgggattacaggcatgagccattgtgcctggccagtatcttgtcttctcattctgtaaacggtgtctttttttcattatgggaaagctttattgacacatttgtttttatttttaaaaattatggtaaaatacacagaacataaacgttaccatctgatatggtttggctgtgtccacacctaaatctcgaattgtagttcccataatccccacacatatgtaccacattttctttatccagtctttcgttgatagacatttaggtcgattccatgtctttggtattgtgaatagtgctgcagtgaacatatgtgtgcatgtgtctttatggcagaatgatttatattatgcataaccaaaactgtacttattaaacaataacctcccaaccccttctgcccacaacctctggcgactgccatgctactttctgtctctgaatttgaataccctgatagtcatataatatttatctttttgtgactggcttatttcactttgcataatgtattcaagcttaatctgtgttgtagcctgcgtcagaatttcttttctttttaatgctgagtattattctattgtgtgtatataccacattttatttatccattcatccactgatggacatgtgcattgttcccaccttttggctattgtgaaaaatgctgttatgaatatgggtatggagatctctccccttattttgagacaggatctcactgtcacccaggctggggtgcagtggtgtgctcataggtcactgtagcttcgacctcctgggctcaagcgaacctcccacctccgcctcttgagtagctgggaccacaggcatgtgccaccatggctgttaaatttattaatttgtttttctatggatcatgctttttgtgttacatcagaggagtctttgcttaacatgagatgacaaaggttttctcccatgtttcctcctaaaagttttatagttttaggttttacatttaggtctatgatccattttgagtcaatttttgtatatggtacaaggtatgaatctatgctttttaaaaaaatatggttacccaatttttctagcagtatgtgctaaaactttgctaaagtcacttagttctagtagctttttttgcagatttaaccagactttctacatagacaatcatatcttctgtgaataaacatggttttatttcttcatgtct

SEQ ID NO: 3324 - DNA, 4183 bp, Homo Sapiens
  NM_019069
gtagccgacaggccagagtttccagtttcggtggcttcgtaggcttttagcttctgaaatccgctaaaagcggcggttcattcatcttcaagtacctagcctgactggtagggctgctcagcattccgaaacatttcgacctggggaggggggcggcggtgaaagaatactttctgtagagagtgcccctcgcgtcgcccctgctttgaaggctttatgtattaacggaatgccgaacatttgtgtcctacttgctgacagcgcacaggatccttctaacagtatttctcaagtacttaacaaaaagatgaaaacttgaagtccaagccgtgctgctgattccgtctcacagtttaaagactgtccagaaactttaagctttcaaaactgtacattttaaaatcctgtgcgtttatcttcattttgctgggcagaaagccaaagtactggactgcctggttcagggctgaacgcctagtacacctgctaacttggagcttcagagccatggcaaccaaggagtcaagagacgccaaagcacagttggccctctcctcatcggccaatcagagcaaggaagtgcctgaaaacccaaactatgctctcaaatgtactcttgtgggacacacggaagcagtgtcatcagttaagtttagtcctaatggagaatggctagcaagttcttctgctgataggctaatcataatttggggagcatatgatggaaaatatgagaaaacactctatggtcataatttggaaatatcggatgttgcctggtcatcagattccagtcgtcttgtttctgcctcagatgataaaactctaaaattatgggatgtgagatctggaaaatgtttgaaaacactgaaggggcacagtaattatgtcttttgttgtaacttcaatccgccatccaaccttataatctcgggatcttttgatgagactgtaaaaatatgggaggtgaaaacaggaaagtgtctcaagactttgtctgctcattctgacccagtttctgctgttcattttaattgtagtgggtccttgatagtgtcaggtagctatgatggcctctgtagaatctgggatgctgcatcaggtcagtgtttaaaaacgctcgttgatgacgataaccctcctgtctcttttgtaaaattttctccaaatggtaaatacattctcactgcaactttggacaacactcttaaactatgggattatagcagaggcaggtgcctgaaaacatacactggtcataagaatgagaaatattgcatatttgccaatttttcagttactggtggaaagtggattgtgtctggttccgaggataacctggtttacatttggaaccttcagactaaagagattgtgcagaaattacaaggccatacagatgttgtgatctcagcagcttgtcatcctacagaaaacctcatcgcatcagcagcattagaaaatgacaaaacaattaaactgtggatgagtaaccactaatccctttgaaaatcaagtagtagagccaagttggccaaaaaacttggatatttaaaaagacggtttcttttaattttggcagtttggtattttaaaaattgtctattgttaaattttgagattcatacactacatttacaaaatgagatagttgaaaaagcacatctagaattcagcttctgactaccaatcttttttgagcaactttttgtaatttttatggatttatgtcacttttattacagggatatattgcatagtggtgaaatctgggcttagtataccctcacccaaatagtatacattgtacctagtaaatactttcccatctctcaccccactcccacctttgaaggctctagtgtctatgattctgctctccacgtccaggtgtacacattgtttatctcccacttacgagaacatgtggtttttgactttctgtatcattacttcacttaatggcctccaggtccatccatgttgttgcaaaagataagatttcattatttttttttggctgagtagtattctgtggtgtgtatgtgtgtgtgtgtatgcatatatgtgtatgtgtatgtatataagtatatacaccacattatccagtcatctggatatgtatataagtatatacaccacattttctttatccagtcatctcttgatggacccttaggttggttccataactttgctattacgaatagtgctgcgataaacagcactattatgaatagtgctgcgataaacagtgcaggtgattttaaaatataatttcctttgggtagatacctactagtgggattgctggatcgaatggtagtttttagttggaaaatctccatactgttttccagaggttgtaaaatgtacattcctccccacagtgtataagctgtgcctttactctgcatctttgccatgattctttttgagacagagtctctggtgcccaggctggagtgcagtggcacaatcttggctcactgcaacctctgcctcccgggttcaagcagttctcatgtctcaacatcccaggtagctaggattacaggcgtgccaccatgcctggctaatgtttctatttttagtagagacagggtttcaccatgttcgaggctggtcttgaactcctggcctcaagtgatccacctgcctcggcctcccaaagtgctgggattacaggcatgagccactgtacccagccattttttgactttttaataatagccattctaactggtttaagagagtatctcattgtggttatattttgtattcctctgatgattagtgatgttgagcatttttttgtgtgtgtttgttggccacttgtatgtcttctttgaaaactgacttctaatcttgaggcctattaataatttcatttgtctgtcactggacaatttctcattcctctcagtgactatcctagaggatcagtgtatttgagaaatatttagaagtaaagttgacaggacaggatgattgattaaaagaggggagcaagggaatttgaaataattccagggtttctggtttgggagatcagatgaacaagtgcataagcctgggatgctggtggaggactggagagacatggcagatgctacctgcacacttttggtaatattctgtgtgatgggatatgaaatggtccatagaaaaaaaccggaaaaatacgccaaggttaggttcattctaagagtctaaaaatttcaaaaaccaaaacaacattataaatggtgtttctcaaggacctttcactacctttttagattgtgcttgtgattttcaggcaagctaaatgtctgatgaagactgctcttcttttgttctgtgtctgacctactaattcctgcccatgcttcaaactcagttcagaaatcactgaaggaaccatccactgccggcctgcctgcaaccacagctgacagctgagttagttaggttttcctgtccctattatttaccagtttgtactgaaatgctttcatgggctgtgcttccagattatgagttctgtggaatcaggaagtatgtctctgtattcttgtattctttggcttttttgtgtagtaaagggactcaagtaatgtttgacagtgaaggatacaacttcattccttgcctgctttgataaattttagtaataaattcccaaaactatcatgttgattaaaaataaaaagtaaccgtaacctcacacattaactttattcaaacaaacagcacttacaggaaatgtaaagtagaaaaagatttctgcccactttacctacggagacatgataaacacgcaaaaaaaacctagaaattaagcaaaaaatagcacaataatttaactgaaagcaacaagggcaaaactgtctccttttgtagtttgtggtaccttatagtagtgctcattcagtttcgtttgcttgataaatctgaggactatgagatatcagagttactagtagggtaggagtgctgtaagggtactgggagaagtaggattagttaggggcagatcttgaattctggccaagaaactgatatttaacccataaagagatagtcactatatgttatcaaataggagaataacacaaatgagaaatgactgttaattcctgatgcataataacagttgtgagctttagtttaatgtaatatttgtaataaaaacgtttgg

SEQ ID NO: 3325 - DNA, 2221 bp, Homo Sapiens
  NM_019071
tttttttttttttgccggagtcgagcgggtgctgctagcggaggcgccatattggaggggacaaaactccggcgacagcgagtgacacaaataaacccctggacccccttgttccctcagctctaagggccgcgatgttgtacctagaagactatctggaaatgattgagcagcttcctatggatctgcgggaccgcttcacggaaatgcgcgagatggacctgcaggtgcagaatgcaatggatcaactagaacaaagagtcagtgaattctttatgaatgcaaagaaaaataaacctgagtggagggaagagcaaatggcatccatcaaaaaagactactataaagctttggaagatgcagatgagaaggttcagttggcaaaccagatatatgacttggtagatcgacacttgagaaagctggatcaggaactggctaagtttaaaatggagctggaagctgataatgctggaattacagaaatattagagaggcgatctttggaattagacactccttcacagccagtgaacaatcaccatgctcattcacatactccagtggaaaaaaggaaatataatccaacttctcaccatacgacaacagatcatattcctgaaaagaaatttaaatctgaagctcttctatccacccttacgtcagatgcctctaaggaaaatacactaggttgtcgaaataataattccacagcctcttctaacaatgcctacaatgtgaattcctcccaacctctgggatcctataacattggctcgttatcttcaggaactggtgcaggggcaattaccatggcagctgctcaagcagttcaggctacagctcagatgaaggagggacgaagaacatcaagtttaaaagccagttatgaagcatttaagaataatgactttcagttgggaaaagaattttcaatggccagggaaacagttggctattcatcatcttcggcacttatgacaacattaacacagaatgccagttcatcagcagccgactcacggagtggtcgaaagagcaaaaacaacaacaagtcttcaagccagcagtcatcatcttcctcctcctcttcttccttatcatcgtgttcttcatcatcaactgttgtacaagaaatctctcaacaaacaactgtagtgccagaatctgattcaaatagtcaggttgattggacttacgacccaaatgaacctcgatactgcatttgtaatcaggtatcttatggtgagatggtgggatgtgataaccaagattgccctatagaatggttccattatggctgcgttggattgacagaggcaccaaaaggcaaatggtactgtccacagtgcactgctgcaatgaagagaagaggcagcagacacaaataaaggtggtccttttgtttgatgaagaaataaacttcagctgaagattttatataggactttaaaaagaagagaagagaaagaagaaacaatgcatttccaggcaaccacttaaaggatttacatagacaatcctataagatcttgaacttgaattttatgggttgtattttaataatgtaagtaaattatttatgcactcctggtgtgctatgaatattattccagttagccttggattatttcagtggccaacatatgcagacatttgtactcctcaaccattttctcaaagtaatgggcattctatgatttagacttcaaggaattccaatgatgaagattttaaggaaagtattttatattcaacaggtatattctgctgcatgtactgtactccagagctgttatgtaacactgtatataaatggttgcaaaaaaaaaaaaaagtcagtgcttctaaaaagaatttaagataatggtttttaaaatgcctttataataagctttgtttctttgtgaaactaattcagcaggctgaaggaaatggttcatgtgataatgtgggctggtatcctctagagtacctgggtacataaacagaaactcctgtaggtaaaaagtaatttgtgccattagtctttctatgtttctgcatccagatagagtgcagttcatgagggagggggcgggggactgaaggggaaagggcgttaaagtgatacatttttataccaaatgtgtttatttttttgtgcaagtaatccttaaaattgcaattgtattaggtgttaaaataaagtttttaaaaaattaaaaaaaaaaaaaaaaaa

SEQ ID NO: 3326 - DNA, 4666 bp, Homo Sapiens
  NM_019080
acaacctagacagctcccccggacttgccttacttttccatctcctcccacccagctataccctcccactggcggcgcggatggcacgccggcggagccagcgagtctgcgcgagcggtccgagcatgctcaatagcgcgcgcggcgccccggagcttctccgcggaaccgcgaccaacgcggaggtctcggcggccgctgcgggagccacaggaagtgaagagcttccgccgggagaccgcggctgcaggaacggaggcggaaggggccctgcggcgacgacgtcgtcgacgggggtggccgtgggagctgagcacggagaagactccctctctcggaagccggatcccgagccgggcaggatggatcaccaccagccggggactgggcgctaccaggtgcttcttaatgaagaggataactcagaatcatcggctatagagcagccacctacttcaaacccagcaccgcagattgtgcaggctgcgtcttcagcaccagcacttgaaactgactcttcccctccaccatatagtagtattactgtggaagtacctacaacttcagatacagaagtttacggtgagttttatcccgtgccacctccctatagcgttgctacctctcttcctacatacgatgaagctgagaaggctaaagctgctgcaatggcagctgcagcagcagaaacatctcaaagaattcaggaggaagagtgtccaccaagagatgacttcagtgatgcagaccagctcagagtggggaatgatggcattttcatgctggcatttttcatggcatttattttcaactggcttggattttgtttatccttctgtatcaccaataccatagctggaaggtatggtgctatctgcggatttggcctttccttgatcaaatggatccttattgtcaggttttctgattattttactggatatttcaatggacagtattggctttggtggatatttcttgtacttggcctgctccttttcttcagaggatttgttaattatctaaaagtcagaaacatgtctgaaagtatggcagctgctcatagaacaaggtatttcttcttattgtagagactgcatcaacccgacattcctttcttataccaatgtgaaatttccagatcatctgtaaacctacaactttaatagaagactactaataacagaagacaaattagtgaagaaaagacggagtttcgaaattgaatggcagggtggtttttgcttacaagccatttctgttcattctttaagtatctatatttcatttgttttgcacatatgcatatgtgcccatttaagatatttgcatatacttgatagaaaccataaagttgtagcagttaagtccagtcacatttggttaatcagtgtttgatataattgaaagagttgagtggataaacagtcttccagcttgtaaatgccattgacttctgacctgacatttagtataataaaaatgaaattcttaaccatgtcaaatgatttagtttctggctcttagactcatctggcagttctacacatgaaacatcttttgttatataaggtgtattgaaacctgcagtgctgattattagaaaggatttgtcagatttttgaacatgatatttacattattatttaggaaaactcttcctgtaaataaccatgcataacttactttctgcaatgttttcttagaaattgtgtccagatagctttcactaattttaaattaagtgaactaaatatatatgtgtatatgtatacacatatatatacacacacacatatatatatttagaaacgtgagtgttaaagatagaatttgttttaggacaaattttaagaaaatgtgggaataccaaatgtcctttataagaaaaataaattttattttaagggacatactagttttagggattttcagatgggaagctgcatttttaggattgcccatcttaagagatcttgcaggaagagattgtattagatattatatttatttcatttaagataattttcaaagttaattttctaaataagataattctcatttgtgtttgtcttttaaaaggccaataaaatatctttcagtatcattgtaataattttttagagtttaatttgtaaagcttagcaaataaaatcttgtactatgaatagcttcttgctttatgactttaggattaacttgtaaaaaacatatcctgaactgagatatgcaaaatactcattttcaagttatggaaatgtgtttgtggcatataggactgtggggtctgtgtgtgtagtgagagtgtgtagccactattataactggaatttaatttacattcataaactactatatttcccatcttgcaaatcattttatgtctcatctgtttttcctttcggttatatctttggttttgaataccaacatttaaaatgatggtattttatcttttaaacttaaaaattatttaatacagctatatggaccttataaaattgatttcttatttattattagacattactactaaaaggtacatctaactattcagggacatttttccatttccaaaaaataaaatttattatgctttataacctcttctgtattttctaattttttcattgtctttgataaataaaacagttttgttttgctaatatagcctattttttgttttgtctcattcagtttactttcctgcgtagaatttttattgttatattaaaatttttattgttgtattaaagtacctgtgttacaccccttgaagtaagacagtagcatggggtaaagaaaaaatatttagtttagttgcctaatttggaagttaattaaaattaaactgtactaataacatattcaaactcatgctggatctctttcatattaatttcttatagacctgtactttattctttcaataatttttaaatgaaattaagctttgctacatggtaattaaataattactaggaagcttagctatcaaacatcgacttactaaaatttcattttagcttttatggtatatgtgcttgttttctgaatatggatacatgttacttttgatccagcatcaaaacttcactttttgttttgacttttccccccaaatctgtaaggttcaagtatacatattactgaatcctctataattggcataattcaatggtagccttaaatctcatcatgtaagcaggggaatcagaatgttattttcaagaacttaatgttcccttcagatatataaaatcctgcatacttcatttcctgtgagcttgaacagctgctgttgtgttttggggatgcttgatcatctttgcactctgccttaaagattgaaaaatcaaaactcttgttagggtatctaaacatttttgagtgtgaactggggattggaagttaatacaaaaaaatttcaaattatttctattgtaaatgaataagctagtcatggctaggataatccattttcatgtatttatgcaataaactgaattttaaggcaaaaacaacacttttctatatagtgtatgcaggacagattttagaaacttagattaaaatacaaatcccattacatttggttaaaatgaaaatctctgcttaatggaaaaaatactaatctttagcctattttgagtctataagatatatttcattttagacatgccttctaagttgttcacagatttttacctgctaaaacaatattatttccagtaaaacctctcctaacaggaaaagtggagttcaaaatatccaattggagaaaaattcagagttccttcattaaatataatttttttcatctagtatgtactatttcaagaagtgcaaaaagtaatgatagtgaatgtgataccatacttaactaaggtaatatatatccttagtttgctcaaaagagtcctggttattcctgttttctcagcttaatagtgcctcatcgtactctcaaaagtgttctaatttggaggataagttatatgatcatcctgtgtataattgtagactgtaccaagaagcaactaccttagctccactgccctttgagggatggaactggggtaagggcaggagccagttattattgccacagtgttttctaatgaaccatttggcctgtagaagaggaatagtattttttttaatagttgtatttgaatgattccagcttatcgtaaatactaaactgaatggcttttatatttttaactgctgttaaatgttattttagcatttattagttgtttattatttaattcttcaaatagtcatatgaaaacatatatttgataaaggtcaattgttagatgataatgtgccattcattatcataggaatgtccttgcccatatataaaacatgctggcatgtattttacttgttaataaagttgtatagatgtggaagtgtgaacctgtgatgcatccttttcaaaatcagtttaagattcgcatattatcatgactgtgacctcactaaactgtttatgtgacaaacctttcaagattggagatgaaaacaacacttgtgaaattaggttggggttgcaacatcttttaacttctcagttatttgtatgtcaggagacagattgtggtttaattttaataaacaaaatatcatctttttgaaaataaaaaaaaaaaaa

SEQ ID NO: 3327 - DNA, 2499 bp, Homo Sapiens
  NM_019082
taccacaaatttactggcttaaaacgacgcaagtctgtaggtcagaagtctgacacgggtcttaactggtgacccgagtcagatttgggacacaaagaacagaaaccaagctgtgcaggtttctgacaggcagtccggttagggagccctacagcaacccgccggtcctctctctcaggcagttgctgccatggctcattattccaaccggttctcctcagcccagtctatctcagtggctccattcatagggtgatgtgcccggcgggacactaaccctaaccaagcagagagacggtcatgcccgtcacgacctcggccctcgccccggccgaggcttctcctgcaggtcgcgagaatcaggtgcgtcagcggcgtccgggaacgccggaagagccagtggagcggctctgtagtccaaagtaccccgtcgaccccagcacggccgctccaccgcctcctactagacccagtcctagggactgcgcagtcgcagagctccgtccgagtaccggaagcctaggccgccagcacttccgggaagtgacttcgtctccgaagccgattggttgttgctttgctcccgctcgcgtcggtggcgtttttcctgcagcgcgtgcgtgctgcgctactgagcagcgccatggaggactctgaagcactgggcttcgaacacatgggcctcgatccccggctccttcaggctgtcaccgatctgggctggtcgcgacctacgctgatccaggagaaggccatcccactggccctagaagggaaggacctcctggctcgggcccgcacgggctccgggaagacggccgcttatgctattccgatgctgcagctgttgctccataggaaggcgacaggtccggtggtagaacaggcagtgagaggccttgttcttgttcctaccaaggagctggcacggcaagcacagtccatgattcagcagctggctacctactgtgctcgggatgtccgagtggccaatgtctcagctgctgaagactcagtctctcagagagctgtgctgatggagaagccagatgtggtagtagggaccccatctcgcatattaagccacttgcagcaagacagcctgaaacttcgtgactccctggagcttttggtggtggacgaagctgaccttcttttttcctttggctttgaagaagagctcaagagtctcctctgtcacttgccccggatttaccaggcttttctcatgtcagctacttttaacgaggacgtacaagcactcaaggagctgatattacataacccggttacccttaagttacaggagtcccagctgcctgggccagaccagttacagcagtttcaggtggtctgtgagactgaggaagacaaattcctcctgctgtatgccctgctcaagctgtcattgattcggggcaagtctctgctctttgtcaacactctagaacggagttaccggctacgcctgttcttggaacagttcagcatccccacctgtgtgctcaatggagagcttccactgcgctccaggtgccacatcatctcacagttcaaccaaggcttctacgactgtgtcatagcaactgatgctgaagtcctgggggccccagtcaagggcaagcgtcggggccgagggcccaaaggggacaaggcctctgatccggaagcaggtgtggcccggggcatagacttccaccatgtgtctgctgtgctcaactttgatcttcccccaacccctgaggcctacatccatcgagctggcaggacagcacgcgctaacaacccaggcatagtcttaacctttgtgcttcccacggagcagttccacttaggcaagattgaggagcttctcagtggagagaacaggggccccattctgctcccctaccagttccggatggaggagatcgagggcttccgctatcgctgcagggatgccatgcgctcagtgactaagcaggccattcgggaggcaagattgaaggagatcaaggaagagcttctgcattctgagaagcttaagacatactttgaagacaaccctagggacctccagctgctgcggcatgacctacctttgcaccccgcagtggtgaagccccacctgggccatgttcctgactacctggttcctcctgctctccgtggcctggtgcgccctcacaagaagcggaagaagctgtcttcctcttgtaggaaggccaagagagcaaagtcccagaacccactgcgcagcttcaagcacaaaggaaagaaattcagacccacagccaagccctcctgaggttgttgggcctctctggagctgagcacattgtggagcacaggcttacacccttcgtggacaggcgaggctctggtgcttactgcacagcctgaacagacagttctggggccggcagtgctgggccctttagctccttggcacttccaagctggcatcttgccccttgacaacagaataaaaattttagctgccccaaaaaaaaaaaaaaa

SEQ ID NO: 3328 - DNA, 3157 bp, Homo Sapiens
  NM_019083
ggaagcgagccctagaattatggcgacctccgcgacgtcgccgcacgcgcctggttttccagctgagggtagatgcggttactatgtggaaaagaagaaacggttctgcaggatggtggtggccgcagggaaaagattttgtggtgaacacgctggagccgcggaggaagaagatgctcggaaaagaatcctgtgtcctttagatccaaaacacacagtatatgaagatcaactagcaaagcatttgaaaaaatgtaactcaagagagaaaccaaaacctgatttctatattcaagatattaatgcaggcttaagagatgaaacagaaatacctgaacaattagttccaatttcttctctatctgaagagcagttggaaaagttaattaagaaattgagaaaagcaagtgaaggcttgaattctacacttaaagatcatattatgtcccatccagcattacacgatgcacttaatgaccctaaaaatggcgattctgcaaccaagcacctgaaacagcaggcttctattttaggtaacattgaaaatttaaagttacttggtccaagaagatgctttgttgagtttggagcgggaaagggaaaattatctcattgggttgatattgccttaaaagatgctgaaaaagttcacttcatcctagtggaaaaggtgaccacaagattcaaggtggatggaaaacacagaaagaaaaattcagtgtttgaaagacttcaaattgatattcaacacttgtgtttgaacaagattcctgtgctaagagaagaaaaactacctgtggtaggaattggaaagcatctgtgtggtatggcaacagatcttgcattacgatgtttggttgaaacctatgctgccagttttgaggaaaggaatgaagaacctttagccaaacgcataaagaatgataaaacagaaaaagaaatttacactttggccaaggaaggaaatgaaaaaaatgtcccagagaagtggaaccctgtggctggcattgttattgcactctgttgtcaccacaggtgtgattggagacattatgtgggcaaagaatatttcagggctctaggccttggagcagtggaattccattatttccagcgaatgagtagttgggcaacttgtgggatgcggaaaacatctttggaaacctcaaatagtaccacaaagaggcaagataatcagaatgatgatagtgaagagcatgatgatggaggatacagaatcacagatgatggcgctgattgtttgcctgggcttcttagtgttgaagaaaagaagaaaatagggcatctttgtaaattgctgattgaccaaggtcgaatccagtatttgcagcagaagggattcagtcctgctttgcagtactatacagaccctctggtgtctttggaaaatgttttgttaactgctttaccaaatcattcttcatcaccagaaacaactgcttaatggaaaagaaatttgagcatcatctgtcttccaccaaaaaaaattttttaattatatttttatatcaaaaaaatatatactttaaatagcaaataatatgaactttaaaaaatgctgtggcctcattaaactttggtaatagcttttctttttacttcagaaatccaaacattagagaattcaccaaagtaatcctctttagaagggcatcttgaattatattatccatccgtatttatggagattggtaaagtagttgaaccgttgacttggtgatctgaaacatacataacatgtcaacacataattagcgtatttctgtttgtattaattttggaaatttatcttcctttgattttatttaatattttttatttcttaagttcaagaggtagtgattgattgtaacaagggccaatctgagaatttgacttatatgtggacatttttccctacagatctggaaagcacaattgtgattttctcaaatgcagacaattcagagatattcacaattaataaacacaattaattaatgaagtcaccttcaaatttccagagccatacatgtatatattgtcagaatctgtccatgacaaacacaaaactgaagagctgttttcaaagaaaaaagattatttcacttaattattttgttggataattgtctagttagaacttccaaaaagatacttacaaacataattcacaaatttgaaataatttctgaagttgattagctatctcatatcttttatcaggtcattttttatatatgtaggcacaaacaataagtatgttctcttctgtttgggaaaataatttggaataaaatagaaattagataatgaaaccaaaaaccttctcaaatttaggccttatttaactcatgactggtttctatgcacaagaaaatactaaaccaaatatatggtaggactgttattctcttctgcatcttatccctattttgtttctgcctttatttgtaaaaattgtcttaattgatggtacatttgccaagacaaaggttcagaattactaattttagatattatgatattctgaaataactatttttatcctgtagttctatgattatatgatttgtaaataagaagcctaaccaatttaaaattcctgactttagtctcatatatcttgtcagactgtctcggttcaaattccaaacctaccatcttcagttgtgcgaccttgggcatgctacctaatctctttgtgcctcaatttcctccttttaaaatggggatgatgatgataacaataatacctacctcacaaggttgttgtgagcatcaaatgagataacacaagtaaaatgcatagaacagttccaagcacagagtaattcaataaatattaactagtaatagtagtggtagtaactcgtgaatctttttaataacataataggctttgattttattatctctttaagttgttaacttttttcccttgttataagttttatgtcaagtaaggtagtttgtttaagttagttacccatgtccccaatcaagggaacctaaatgaagatatatcattaaataattaacctttttttattgtgtcaagcaatactaatttgtgtcataaaatttgttttgcatcattcaacaatttatgcccagaaataaacaatattctacaacaggcaaaaaaaaaaaaaaa

SEQ ID NO: 3329 - DNA, 2501 bp, Homo Sapiens
  NM_019087
gttgctggctttttcaggagctgctcgctcgcagccagagacgctgctttttttttccgggttcggagccgttccggatgctttaggctgccggatgtctgatctccgaataactgaggcgtttctgtacatggattatctgtgttttagagcactttgctgcaagggaccaccacctgcacgaccagaatatgacctggtttgcataggcctcacaggttctggcaaaaccagtctgttgtccaaactctgcagtgaaagccccgataacgtcgtgtcgaccacaggttttagtattaaagcagtgccattccagaatgccatcttgaatgtaaaagaacttggaggggctgataacatccggaaatactggagccgctactaccaaggatctcaaggggtaatatttgtattagacagtgcctcttcagaggatgatttagaagctgctagaaatgagctgcactcagctcttcagcatccacagttatgcactttaccctttttaatattggccaatcatcaagacaagccagcagctcgctcagtacaagagatcaaaaaatattttgaacttgaaccacttgcacgtggaaaacgctggattctacagccctgctcactggatgacatggatgcactgaaagacagcttctctcagctgattaatttgttagaagaaaaagaccatgaagctgtaagaatgtgaaatctggcaaagaaaacaggctcccaaaaggccttgaacctatcatgttagtttctcattttaattttattttggtatcaagactatattggcttcagtatctattttcctctggtcatttcagactctcatctctctattaaagtgaatattctgtagatcagatgaattatcatcggcattaacgtcaagtacacactactgagagagaatttattctctgtttaccactaattatcttccccgcatgtctcttccttctgttgttctaagcatctcttctatactctgtgctgaaacggatggaattcatggcttatggaaatcaaatcccttttgaaggactcagaaagactcacaagaccttgatcattttctctgggtttgggagtggagtattatgtgactgggactccacaaaatatttatattattttcaagacctattgggggttttgttttattttatctaatttttttttttttttggtatactgagcttatagactatgagagaaaagtgagcaccaaaaacttcattaatcaccttatcaggaaggaatatcctgccatagtaaaattggctctgaagagcttagaggcaagttacacaatgttttcttgattacatctgaagtctcttctcttttaagagcaaagacattgtttcagtttctgagagtggttagaggaaatttaggtacaatgcatgcatcacagactgtatttgattgattcgagtcttcaaatattgtttaatggaatgatgagcctgcataaagtgaagctgcaatgtaacataggtatctttttctaaaaacttcaagtgtttgattaaaatagagaaaataatttttaaaataatagataaaaattttaaaaacagccagaaaaagtataatttatactggttagggtttaagatggcatggatttgacaaagataacaaagacagaatcatctatatattcattcattacgtgttactgtagtttattggaatctgttaatgccttcctctagtagttaaaggtttatcagtatttctattataaacctctattttcaggggtttcaatgtgcccttaaaattgtgctggggctgcagcaaataaataatattgggactcatattcagtctttggaactagttttttttccatttaatttaaatgacaaaattgcatagggataaatgtacagttttactaaggtttagcacctttgatcttttctaaatcaggaaaaaaatctatgcatattgaggttcacagatgaaatattctttggcatactttgtagactttgaccacttaaaatactaagtggccaaatgataaaaaaaactgctccctgcacatgagtgtaaaaacatgtttgtaattttaagtaaaatggactgatacccaaataccacagactcacactatattacagaatgatgtaatacctggtaattctccagaagatagacttcagacccttaatgccatttaaatgtagtttttgtggtttaatcttatgagtagattgtaatgaaatcattacctttgaaacatcaaacacttctttaagctttttttttttaatgtcatgaatcaggaaggatacatagtgattcgtatacaattttgtctgcagcattcttgaatatttttaacactgtgtaatccctgagcagcacaaaacttttattccgatgaccagttacacaattcctgtttttattttgtcctgttgtgctcatcttctatgaaaaataaatgattattaggcaaaaaaaaaaaaaaa

SEQ ID NO: 3330 - DNA, 3968 bp, Homo Sapiens
  NM_019095
ataagtggagtgtgctggggtgtgtaaagtagtatggaggcagcggtagcccagtgtctgagtggttgccgggtctccatggagaagcggctcgccagtgtcccaggctgctgagctctcgccgcccgagaccccgcggcgcggccgcagggccatgctagccttgcgcgtggcgcgcggctcgtggggggccctgcgcggcgccgcttgggctccgggaacgcggccgagtaagcgacgcgcctgctgggccctgctgccgcccgtgccctgctgcttgggctgcctggccgaacgctggaggctgcgtccggccgctcttggcttgcggctgcccgggatcggccagcggaaccactgttcgggcgcggggaaggcggctcccaggccagcggccggagcgggcgccgctgccgaagccccgggcggccagtggggcccggcgagcacccccagcctgtatgaaaacccatggacaatcccgaatatgttgtcaatgacgagaattggcttggccccagttctgggctatttgattattgaagaagattttaatattgcactaggagtttttgctttagctggactaacagatttgttggatggatttattgctcgaaactgggccaatcaaagatcagctttgggaagtgctcttgatccacttgctgataaaatacttatcagtatcttatatgttagcttgacctatgcagatcttattccagttccacttacttacatgatcatttcgagagatgtaatgttgattgctgctgttttttatgtcagataccgaactcttccaacaccacgaacacttgccaagtatttcaatccttgctatgccactgctaggttaaaaccaacattcatcagcaaggtgaatacagcagtccagttaatcttggtggcagcttctttggcagctccagttttcaactatgctgacagcatttatcttcagatactatggtgttttacagctttcaccacagctgcatcagcttatagttactatcattatggccggaagactgttcaggtgataaaagactgatgaaagtcatccctcactgttagtaaggaagcagtatacatcaatgggaacagggcccatggaaatgtacaggagtttccctattttggtgttcagcttgaaaaaggacttgtcagaatcaactgtgtcatcaaaatttaagtaatgtgcattgaaaataaggttgatcatgggaatatgcagaatttccaatgtatttttaaatacaaataaaattgtaatttagaatttttaatcttaggtttcttgattaatttataagagatcaattattgtcagtcttttttgtatgttttttaaaaacatagtccagagcatgggcagaattgacacctctcttttaagtgaaatttggattgctcacaaagcactaggaaatgtcatggggttcaaatatatatcctacacaactgggcaatacatttttgtttgatttttaggtctgtgtatacattaacagttcatgtaattaatacctgatcatttgggataatgaaagtgaagttagttgtagatgaagtaaagttataaaagagattaaaaatgcggtaactttttaagataataatcatacagaaggtatgaagttcattttcggtagtcttccaacctctcaggtgcctaataatttatgtttgaggataacaggtaacaaagatagtcgagataggagaacgtgtctattagtctttgcatctaaaaggcagtgagttacgttcctgccttccactgtgtttctgacatagcaatgtttgtttgatattggaacctggattcatattttatgtaaataatatcaagctgtatatttttcaaaggttttttaaactttggagactctttcttttgttaagcagttaaaggaataaaagagctggaaaaaaaattgtaccttcaactcaggttgttccatataacatacgtattctctgctgttacgtaagttttccgattcacagagtccattcatgtacatcacttacacttaaattgtaaaaataattagtctgaccatctgactttaaaagactgttgctacacgtacatcatgtttaggagaatgtgggatatggggaaggggagaagaagacagtccagtggtgactagttgctgctgcttaacctatggcctattgctgcccattgtccctggttttaatccaagcctattatggaatactgcagtgagattatccattctcagcctgttgagctgcattaaattagaatgggaggctgtaagtaaaactcatgcctcttggccaggcattctgcaccagcgtgtccctctgtggcttgctggtcctggttgttctcagactggcagctgagctgcgcttggcttgaagcatactgaagcctgcagccagggacaccgccattgaatcagatggagggggatgaaaaagcagagaagggggcatgtggctggctattcttgctctctggagaacagcttcattgttaggagtagttaggctgaaagtggacttcccactgctgagccacccaagaggcacactgagcattagtgacgggtgagccacataagaataatgtttaaaaaagagaggacttgaagtagctatgcgaaaatttagaactttgcactttgttaacgcttatttatggtttagtgttgatgccatttggagtgacctatgggttggacccatatctttttattattaaggtctcaatctggctctggttaataaacgtttcccgcttcatcccttaggaaaatggtccaagtctcctcaggcttttggatactgaattgttataaaacacatcaattctgccagtttataaaacactggaattgtattagacatgtctgagtatgtacttgtttatagactcaaaacatgatgaaaattcatttcattgtcttcactgaatagacttaaccttgacagtaagcttaaagcattagtgtcatttaattacatgtctgaggaatttatgctaactagattttgggcttttgcagcgaattttagtcggggcctcattcctgagcccaagtgaccctttcacctcagcttcccaagtagctgggattacaggtgcacaccaactgtgctttgcagttttgtttgtgtgtgtgtgtgtgtgtgtgtgtgtgtgtgtgtgtgtgtgtattttgttttttttacaagcccacaacatcatagctttgcagtttttaaccaggagctggtggagatctttgaaatcatttaggccaattcttttagttacatttatgatgaaactagggatctaccttaaagttttgggaagctctttcaaaacttcagacacctagaaatatatatagtgcagttcagttttagtttctgcagcatggtttggaaacaaaagatacataggatttaaactcgatttgttttcttcttacagtagaagtaaatgctcttgtggcttgaatcgcatctcccaagaaagatacgttcacgttcaaacccccagtactgtacatgtgaccttatttggaaatagggtctttttagatgcagtcaagatagaattagatcatactggattacagtgggccccaataactaggtttttttgttaaaaaaaaaaaaaaaggaaatgtgaacagagagagaatgccgtgagatgatggagggatagattggaatgatgtctgcgagctaaggaatactgaggattgctgccaaccatccgaagctgggagaggagatggaacaactccctcggagcctccaagaggaaccaaccccactgatgctttgatttgggatttccggcctgaactgtaggaaaataaatttctgttcttttaagccatttttaccagtttgtggtaacttgttacagcagctgcaggaaattaataaatgccaatgttgaaaattaaaaaaaaaaaaaaaaa

SEQ ID NO: 3331 - DNA, 2996 bp, Homo Sapiens
  NM_019096
ggggaggggccgggcggggggctggcggcagcggcggatggactcgcgggtatcggagctgttcggcggctgctgccggcccggagggggcccggccgtgggcggaaccctcaaggctaggggggccggcagcagcagcggctgcggggggccaaagggaaagaagaagaacggaaggaacagagggggcaaagccaacaaccccccgtatttgccccccgaggctgaagatggaaacattgaatataaattgaagctggtgaatccatcccagtaccgctttgagcacctggtgacacaaatgaagtggcggctccaggagggacgtggtgaggccgtctaccagattggggtagaggacaatgggctgctggtggggctggctgaggaggaaatgcgagcttcgctcaagaccctgcaccggatggcagagaaggttggggcagacataaccgttcttcgagagcgagaagtggattatgatagcgacatgccccggaagatcaccgaggtgctagtacgaaaggtccctgacaaccaacagttcctagacctccgtgtggccgtcctggggaatgtggactctgggaagtcaactctgcttggagtcctgacccagggagagctggacaatgggcggggccgggctcggctcaaccttttccgccacctgcatgagattcagtctggccgaacctccagcatcagcttcgagatcctgggctttaacagcaagggagaggtggtgaattacagcgactcacggacagcagaagagatctgtgagagcagctccaagatgatcaccttcatcgacctggcaggccaccataagtacctacacaccaccatctttggcctcacatcatactgccccgactgcgccctgctcctcgtcagtgccaacactgggattgctggcaccacaagggaacatctggggctggccctggccctgaaagtgcccttcttcatcgtggtcagcaagatcgacctatgtgccaagaccacagtggagaggacagtacgccagctggagcgggtcctcaagcagcctggctgccacaaggtccccatgctggtcacctctgaggatgatgccgtcactgctgcccagcagtttgctcagtcacccaatgtcacccccatcttcacattgtccagtgtgtctggagagagtctggacctcctcaaagtctttctgaatattctgccgccactcaccaacagcaaagagcaggaggaactcatgcagcagctgacggagttccaggtggatgaaatctacacagtaccagaggtggggactgttgttggaggaacactttccagtgggatttgccgtgagggggaccagctggtggtgggccccacggatgatggctgcttcctggagctgagagtatgcagcatccagcgcaaccgctctgcctgtcgtgtgctgcgagctggtcaggctgctacactggcgcttggggactttgaccgtgcactgcttcgcaagggcatggtgatggtgagcccggagatgaatcctaccatctgctcggtgtttgaggcagagatagtcttactgttccatgccaccaccttccgacgaggattccaggtgacagtacacgtgggcaacgtacgtcagacggcagtggtggaaaagatccatgccaaggacaaactgcggacaggcgagaaggcagtggtacgtttccgcttcctgaaacacccagagtacctgaaggtgggcgccaaactgctgttccgggagggtgtcaccaagggcatcggccatgtcactgatgtacaagccattacagcaggagaagcccaggccaacatgggcttctgaacccttcaggcagggacagttctattgctgtccctacaatatataaggtgacttctggccatgctgccctgccattggcggctctgtgtgttaataggctagggagagaggggtgctgtctgccacttgctccctgccaactttctggagaggtgccaaacttggtgtggccaggaaagggcagtcctgagggagaagacaggattcagggcagtgctccgaagctgtgtgctcacctggttggctcatcaaacctggcaaccctgtggcctgtctgccggagctgactggatccactcatcaattcttcgtccccactactaagactgggcatgttttgctggtgtggtctctgcacttcaggaatggtcacaacagggggtagccctcaaaagcactcctttttctatacctcttctcaaggccatgtaagttgcccatctctacctggctgtggacaaaaggttatctgctcttggccatctggtggtggtggcggcccagagtctgaagaaatggcacagggacagtgaatggtagtgttgccaccctgtgctgaggcctgaggcctcttcctcagctttatctccctttccttcactcaagggccatttccccagtccctatctcccccatcccctcccggcttataggccccacaggtgctatttgttgtgctggcccaggcgtggggctaccaagcaaaggcttggcatataccaaaggccagctgcatgcccatcagtctggtctttttcctctgcggtcatgttggctttcatgctggatcaaatgttttactttcccagactggtggcatctgagttccccatcctaccactctcaccccactttcctgccccacctaaaccctcgttttagtaatttgtagtgactgttcccttccctctgttgcagggaaccaggaggaaagggaaagatgttgccatatttcctactctttaggcatggactctcctttccctttgttagtgtcctgggttcccatggactcagggatttgttggctaaggtttctctgtgcatatatatatatatacatatgtatatatatttaaatacacatatatattgtacagaataaaaatgttttattgaatacactgtgcttaaaaaaaaaaaaaaaaaa

SEQ ID NO: 3332 - DNA, 1051 bp, Homo Sapiens
  NM_019103
ggagcccggagctgcagccaccggggagccaggtaccttccgcgagacgtcgaggggcgagtcctagtctcttttctccgcactggaagacttgaacacttccttctctggtctctgtcacccaggctggagtgtagtggcgcaatctcagctggctggagccttgacctccttgggctcaagctatcctcccacctcagcctctcaaatagctgggactacaggcagcaaagcacctgctctgagtggccatggggaagcgatacttctgtgactactgcgaccgctccttccaggacaacctccacaaccgcaagaagcacctgaacgggctgcagcacctcaaggccaagaaggtctggtacgacatgttccgagatgcagctgccatcttgctggatgagcagaacaagcggccctgcaggaagtttctactgacaggccagtgcgactttggctccaactgcagattttcccacatgtcagagcgagacctgcaggagctgagcatccaggtggaggaggagaggcgagccagggagtggctactagatgctcctgagctccccgagggccatctggaggactggctggagaagagagccaagcggctgagctcagccccaagtagcagggctgaacccatcagaaccactgtcttccagtaccccgtgggctggccaccagttcaggagctgcctccatccctgcgggcacccccacctggggggtggcctctgcagcccagagtccagtggggctgagccccttgcccccgactgacccccacgtggtcacttttctcatcagtcacaataggaagccaagcccggttcctgctacgccccatggaggctccgagaccatctgcccagcctcactgaggctcaggacacggccacaccaagtgcagccctcgtcctgggtctgcaccgggcagctctcccctcactctcctccacctgcccccctgcttcttaagaagatgggggagaaaacttccaaatgtttataaagaaagtctgtcaccacaaaaaaaaaaaaaaaaaaa

SEQ ID NO: 3333 - DNA, 2371 bp, Homo Sapiens
  NM_019108
atccacgcacgctcagcccggcgagcgcattcagttctcgagctccagccctcagcgcatgcgcaggacgagtcgcctgagggaactgatctcagctcgggcccgcgttacatcctcctcctcttcttccttcggcccagctttccttaggggctgcaacccggacgccgaggccggtttcggagtggggagtgcccattttctctccttcccacgttcctggcccccagacgccatttgcaggcgggtggcttgggtcagcctccccgcccccacccgactcccgtcacgggagagcgcacaccgcgccccgagaaccaatcagcagccgcgttaggtaaccatgtctgagtctggacacagtcagcctggactctatgggatagagcggcggcgacggtggaaggagcctggctctggtggcccccagaatctctctgggcctggtggtcgggagagggactacattgcaccatgggaaagagagagaagggatgccagcgaagagacaagcacttccgtcatgcagaaaacccccatcatcctctcaaaacctccagcagagcggtcaaaacagccaccacctccaacagcccctgctgccccgcctgctccagcccctctggagaagcccatcgttctcatgaagccacgggaggaggggaaggggcctgtggccgtgacaggtgcctctacccctgagggcaccgccccaccaccccctgcagcccctgcgccacccaagggggagaaggaggggcagagacccacacagcctgtgtaccagatccagaaccggggcatgggcactgccgcaccagcagccatggaccctgtcgtgggtcaggccaaactactgcccccagagcgcatgaagcacagcatcaagttggtggatgaccagatgaattggtgtgacagtgccatcgagtacctgttggatcagactgatgtgttggtggttggtgtcctgggcctccaggggacaggcaagtccatggtcatgtcattgttgtcagccaacactccagaggaggaccagaggacttatgttttccgggcccagagcgctgaaatgaaggaacgagggggcaaccagaccagtggcatcgacttctttattacccaagaacggattgttttcctggacacacagcccatcctgagcccttctatcctagaccatctcatcaataatgaccgcaaactgcctccagagtacaaccttccccacacttacgttgaaatgcagtcactccagattgctgccttccttttcacggtctgccatgtggtgattgttgtccaggactggttcacagacctcagtctctacaggttcctgcagacagcagagatggtgaagccctccaccccatcccccagccacgagtccagcagctcatcgggctccgatgaaggcaccgagtactacccccacctagtcttcttgcagaacaaagctcgccgagaggacttctgtcctcggaagctgcggcagatgcacctgatgattgaccagctcatggcccactcccacctgcgttacaagggaactctgtccatgttacaatgcaatgtcttcccggggcttccacctgacttcctggactctgaggtcaacttattcctggtacccttcatggacagtgaagcagagagtgaaaacccaccaagagcaggacctggttccagcccactcttctccctgctgcctgggtatcgtggccaccccagtttccagtccttggtgagcaagctccggagccaagtgatgtccatggcccggccacagctgtcacacacgatcctcaccgagaagaactggttccactacgctgcccggatctgggatggggtgagaaagtcctctgctctggcagagtacagccgcctgctggcctgaggccaaggagaggaatgtcatgcaggggacctcctgggtccgcagtgtactgcgagggagcacagatgtccatcccccgctggggtggagagcggcagcaggcctgatggatgagggatcgtggcttcccggcccagagacatgaggtgtccagggccaggccccccaccctcagttggggctgttccgggggtgactgtgagcgatcccaccccaaacctgagatggggtagcccgtcctgtgtcctccacagggacaagcagtgggaggagtctgaatggtcaccaggaagcccgggctccatcttgacctcctttttcagggacaggagcaacaggcccctcttccctgactctaagcccttccctgtaaggtgaggcagggtctggagagctctttattggaacagatctggtggttcaaataaacacagtcatgcaagcctgaaaaaaaaaaaaaaaaaa

SEQ ID NO: 3334 - DNA, 3946 bp, Homo Sapiens
  NM_019109
gcgaggaagcgcggtcacgtgactgctgcgggccagccaagatggcggcctcatgcttggtcctgctggcgctgtgtctgctgctgccgctgctgctgctgggaggatggaagcgctggcgccgggggcgggcggcccggcatgtagtagcggtggtgctgggcgacgtgggccgcagcccccgtatgcagtaccacgcgctgtcgttggccatgcacggcttctcggtgaccctcctggggttctgcaactccaaaccccatgatgagctcttgcagaacaacagaattcagattgtggggttgacagaacttcagagtcttgcagttgggccccgagttttccagtacggagtcaaagttgtacttcaggctatgtacttgctgtggaagttgatgtggagggagccaggtgcctatatctttctccagaaccccccaggtctgcctagcattgctgtctgctggttcgtgggctgcctttgtggaagcaagctcgtcattgactggcacaactatggctactccatcatgggtctggtgcatggccccaaccatcccctcgttctgctggccaagtggtacgagaagttctttgggcgcctgtcccacctgaacctgtgtgttaccaatgctatgcgagaagacctggcggataactggcacatcagggctgtgaccgtctacgacaagcccgcatctttctttaaagagacacctctggacctgcagcaccggctcttcatgaagctgggcagcatgcactctccgttcagggcccgctcagaacctgaggacccagtcacggagcggtcggccttcacggagcgggatgctgggagcgggctggtgacgcgtctccgtgagcggccagccctgctggtcagcagcacgagctggacagaggacgaagacttctccatcctgctggcagctttagaaaagtttgaacaactgactcttgatggacacaaccttccttctctcgtctgtgtgataacaggcaaagggcctctgagggagtattatagccgcctcatccaccagaagcacttccagcacatccaggtctgcaccccctggctggaggccgaggactaccccctgcttctagggtcggcggacctgggtgtctgtctgcacacgtcctccagtggcctggacctgcccatgaaggtggtggacatgttcgggtgctgtttgcctgtgtgtgctgtgaacttcaagtgtttacatgagctggtgaaacatgaagaaaatggcctggtctttgaggactcagaggaactggcagctcagctgcagatgcttttctcaaactttcctgatcctgcgggcaagctaaaccagttccggaagaacctgcgggagtcgcagcagctccgatgggatgagagctgggtgcagactgtgctccctttggttatggacacataactcctgggccagaggctaaaaccccaggacccctgctgtccttcccgcagcttcttcttggagtctcagggcaaaccctttcgagcagcacctcccagtggccagaagctgaaatgacagcagtggtactgcctggtaaaagaattggttctgtgacccgggaagctttggttggccttgatttcttctctggaggcttggaaacgcttcctctcttcttctgttcttcacgccccatgcccctgctagcgtattactgttctgtgacttccctgtgacctctgcagaactcctcatcctgcgtttggtctccaggtgtcccctttctgccgtgttcctaacattttgattcctgtcttgaaaaaagcacctgctgcaccgtaagcccagggatgtggcagctgcagtgggcttggctttgtgaggaactgagtgtgtccacgttgggggaacatcatacttgatacacacgtttttatttgcacaaagaaaatgctatttttggagccagaattttcatgtctgatttatggtgattttcttaagaaccagaactgctggcagaaagggggcacccacacgcttagatagccgatgtcttattagagggcagtttgtggttcctgatttggaaattaacattctccaaacattccagtccaatgaaagttttatccgctttcccatataaaaattcttcccatgagagtgacttgattctcacaatcccgttggagtcgtgtgtgagtcctacagggtgagattcagcattgccatctccaagtgctcttcgtagggaaacagtttctgctcatgacgaggttccacttcccatctgatcccggcccggcctggaaacagagcacatgtgtttgaggatggcggtgtttggggacaggacatgagggtattgtgtggggctgctaggacaggcctggcggggtaggggggtgtccaagtcagtttacttggttcacaggttcccaggcccacccaggtgcctagaattggcctccaggatgggaccagaaagctggttttgcatagaaatggctagcagcaggcaccgtgccgctgtccactctctgcctgtgtctgccccagcacttggcacagcgggacagaagcagagatctgaatagtcaacccactcttcacaaagcttagaaagcggccgggcacagtggctcatgcctgtaatcccaacactttgggaggccaaggcgggcggatcacttgaggtcaggagttcgagaccagcctggccaacatggtgaaatcccatctctacaaaaatacagaaattagccaggcatgatggcgagtgcctgtaatcccagctacttgggaggctgaggtgggagaattgcttgaacccaggaggtggaggttgcagtgagctgagattgtgccactgcactccagcctgagtgacagggtgagactaagtctcaaaaaaaaaaaaaaaaaaccacacgcaccacacacacacccacacacacacacagcttagaaggggctgctgttctcataagcacagatgtctgaagagccgttagccagaatgattctttttttttgttttgagatatgatcttgttctgtcacccaggctggagtgcagtggcacagtcattgctcactacagcctcgactcctgggctctagcaatcctcccacttcctgagtagctgggatgacaggtgcgtgccaccatgccagtaatttttttattttgtagagatggggtcctgaacgcatggcctcaagtgatgctcctgcctcagcctcttttattatttgtttttagacgaagttttactctgttccccaggctggagtgcagtggcacaatctcagctcactgcaacgcctcccaggttcaagtgattctcctgcctcagtctcccgagtagctttgactataggcgtgcaccaccacgcctggctaatttttgtgtttttagtagagatggggtttcaccatgtgggccaggctggtcttgaactcgacctcccgtgatctgctcacctcagcctcccaaagcctcagcctcttacagtgttgggattacaggcgtgagacactgtgacccgggacgattttcaatcacagttttttgttacgagtggaaaatgcgtatttataagaatgaagtagtacagacatgaatgtgtagaaatctctataatcctgccatccaaggatggcacctgttaatgtgtatatcagggatgtccaatcttttggcctccctgtgccacactggaagaagaagaatcgccttgggccacgcataaaatacactaacactagcaatacctgatgagctaaaagaaaaaaaatcacaaaaaaacctcgtactgtttgaagaaagtttacagatttgcgttgggccgcaagttggacaagactgctatatgtatattctaggttttcccctataggtatacttatgtgaaaatgattattgtgataaattttgttttgagatgaaaaaaaaaaaaaa

SEQ ID NO: 3335 - DNA, 2307 bp, Homo Sapiens
  NM_019110
ccaaagacatcctttggtgatacttactgtgggattcagagtggggtgcagaggacgaccctgcaaaggcacggactataagagagatctgtgcagctgcgcctcagggggtgtcctgggcccctgggcatgacaggagggggaccacttgcagttctactggaaaatttaccacccttccagaatcctctgaagatatacaggtcgcaactagagtgagacccgagtactgccttgggtcagaatggctagagaaccgagaaaaaacgcagccctggacgcccagtctgcagaagaccagacggggctcctgaccgtgaaggtggagaaggaggaagcctccgccttgacggcggaggtgagagcaccctgcagccctgctcggggccccgaacgctcccgccagcgcttccgaggcttccgctacccggaggctgcgggcccccgcgaggcgttgagccggctccgagaactctgcggacaatggctgcagcctgagatgcacagcaaggagcagatcctggagctgctggtgctggagcagttcctgaccatcctgccggggaatctgcagagctgggtgcgggagcagcatccagagagcggggaggaggtggtggtgctattggagtatttggagaggcagctggatgagccggcgccgcaggttcccgttggtgaccaggggcaagaactgctctgttgcaagatggcactattgacacaaactcaagggtctcaaagtagccagtgccagccaatgaaggctctgttcaagcatgaatctctgggatcccagcccttacacgatagagttctccaggttcctgggcttgcccagggagggtgctgcagagaagatgcaatggtagcttccaggctcactccagggtcccagggtttgctgaaaatggaagatgtggccctgaccctcactcctgggtggacacagctggattcatctcaggtgaacctctacagagatgaaaagcaggagaaccatagcagcctggtctcccttggtggtgaaatacagactaagagcagggacttgcctccagtcaagaagcttccagaaaaggagcatgggaagatatgccacctgagggaagacattgcccagattcctacacatgcagaagctggtgaacaggagggcaggttacaaagaaagcagaaaaatgccatagggagtaggcgacattattgccatgaatgtggaaagagttttgctcaaagttcaggcctgactaaacacaggagaatccacactggtgagaaaccctatgaatgtgaagactgtggaaagaccttcattgggagctctgcccttgtcattcatcagagagtccacactggtgagaagccatatgagtgtgaagaatgtggtaaggtcttcagtcacagctcaaaccttatcaaacaccagagaacccacactggggagaagccctatgagtgtgatgactgtgggaagaccttcagccagagctgcagcctccttgaacatcacaaaattcatactggggagaagccataccagtgcaatatgtgtggcaaagcctttaggcggaattcacatctcctgagacatcagaggattcatggtgataaaaatgttcagaatcctgagcacggggagtcctgggaaagtcagggtaggacggaaagccagtgggaaaatactgaggctcccgtgtcttataaatgtaatgagtgtgagagaagtttcacacggaatagaagtcttattgaacatcagaaaatccacactggtgagaaaccctatcagtgtgacacatgtggaaaaggtttcactcgaacttcataccttgttcaacatcagagaagccatgtagggaaaaaaactctttcacagtgacccatggtattcatgccaacattggtgctcatttgtcactgaactgaagccaccctggagcccttaatggttacagaaattgtggaccagggctttatttaccactatacatcatcgggtattagaaaatgtagtctggctgagacgatgagttatcttctacattctagaaagtgattggaagaagtcatttgataagaggccatgggagagtggtctggaagttgtaggacctaaaatagtttgttctcacccagtgtatttaaatggccttctggacttgttaattgccctcagccagcactttaggacatctggttggatggctctgatgtggggggctgctgctctgaccattcattttgcctctaatgaatctttcacaaattggtcagatccatgagaaaaaaaaaaaaaaaaaaaaa

SEQ ID NO: 3336 - DNA, 1312 bp, Homo Sapiens
  NM_019111
ttttaatggtcagactctattacaccccacattctcttttcttttattcttgtctgttctgcctcactcccgagctctactgactcccaacagagcgcccaagaagaaaatggccataagtggagtccctgtgctaggatttttcatcatagctgtgctgatgagcgctcaggaatcatgggctatcaaagaagaacatgtgatcatccaggccgagttctatctgaatcctgaccaatcaggcgagtttatgtttgactttgatggtgatgagattttccatgtggatatggcaaagaaggagacggtctggcggcttgaagaatttggacgatttgccagctttgaggctcaaggtgcattggccaacatagctgtggacaaagccaacctggaaatcatgacaaagcgctccaactatactccgatcaccaatgtacctccagaggtaactgtgctcacaaacagccctgtggaactgagagagcccaacgtcctcatctgtttcatagacaagttcaccccaccagtggtcaatgtcacgtggcttcgaaatggaaaacctgtcaccacaggagtgtcagagacagtcttcctgcccagggaagaccaccttttccgcaagttccactatctccccttcctgccctcaactgaggacgtttacgactgcagggtggagcactggggcttggatgagcctcttctcaagcactgggagtttgatgctccaagccctctcccagagactacagagaacgtggtgtgtgccctgggcctgactgtgggtctggtgggcatcattattgggaccatcttcatcatcaagggattgcgcaaaagcaatgcagcagaacgcagggggcctctgtaaggcacatggaggtgatggtgtttcttagagagaagatcactgaagaaacttctgctttaatggctttacaaagctggcaatattacaatccttgacctcagtgaaagcagtcatcttcagcattttccagccctatagccaccccaagtgtggatatgcctcttcgattgctccgtactctaacatctagctggcttccctgtctattgccttttcctgtatctattttcctctatttcctatcattttattatcaccatgcaatgcctctggaataaaacatacaggagtctgtctctgctatggaatgccccatggggcatctcttgtgtacttattgtttaaggtttcctcaaactgtgatttttctgaacacaataaactattttgatgatcttgggtggaaaaaaaaaaaaaaaaaaaaaaaaaaaaaaaaaa

SEQ ID NO: 3337 - DNA, 3612 bp, Homo Sapiens
  NM_019555
cactcggctccggagcccagtcgagtcctgcccggctagaagccggctgtcggtctccgtgtcgccgccgccgcccggcatcgtggagctggggcccccttttgcctgggagttttgtagtcgcctagggtcagcggtgacatcccaaagggcaggcccggcagccgccatggtggccaaggattaccccttctacctcacggtcaagagagcgaactgcagcctggagctacccccggccagcggtccggccaaggacgctgaggagcctagtaataaacgggtcaaacccctttcccgagtcacgtcgctagcaaacctcatcccgcccgtgaaggccacgccattaaagcgcttcagtcaaaccctgcagcgctccattagcttccgcagtgagagccgccctgacatcctcgccccccgaccctggtccagaaatgccgccccctcgagcacgaaacggagagatagcaagctgtggagtgagaccttcgatgtgtgcgtcaatcagatgcttacatccaaggaaatcaaacgtcaggaggcgatctttgagctttcccaaggagaagaagacttgatagaagacttgaaattagcaaaaaaggcctatcatgaccccatgctgaaactctccataatgacagaacaagagttgaatcaaatttttggaacactggactctctaattcctctacatgaagagctccttagtcagcttcgagatgttaggaagcctgatggctcgactgaacatgttggtcccatcctcgtgggctggctcccttgcctcagctcctatgatagctactgcagcaatcaagtagccgccaaagctctgctggaccacaaaaagcaagatcaccgagtccaggatttcctacagcgatgtttagaatccccctttagccgcaaactagatctctggaatttcctcgatattccaagaagccgcctggtaaaataccctctgcttctccgagaaatcttgaggcacacaccaaatgataatccagatcagcagcacttggaagaagctataaatatcattcagggaattgtggcagaaatcaacaccaagactggtgaatctgaatgccgctattataaagagcggcttctttacttggaagaaggccagaaagactccctgatcgacagctctcgagtcttgtgttgtcatggtgaactgaagaacaatcggggcgtgaaactgcatgttttcctgttccaagaagtgcttgtgatcactcgagccgtcacccacaatgagcagctttgctaccagctgtaccgtcagccaatccccgtgaaagacctcctgctggaagacctccaggatggagaagtgaggctgggtggctccctgcgaggggcattcagcaacaatgagagaattaaaaacttcttcagagtcagtttcaaaaatggatcccaaagtcagacccactcgctacaagccaatgacactttcaacaaacagcagtggcttaactgtattcgtcaagccaaagaaacagttttgtgtgctgccgggcaagctggggtgcttgactccgagggatcgttcctaaatcccaccaccgggagcagagagctacagggagaaacaaaacttgagcagatggaccaatcggacagtgagtcagactgtagtatggacacgagtgaggtcagcctcgactgtgagcgcatggaacagacagactcttcctgtggaaacagcaggcacggtgaaagtaacgtctgacagaagcatgtgcacttcgggaagcaggcctgcatcttacctgtacagtatttgcattccacagatggaacggtttggagaagcactttttcatacttttgtgaaagtatacatgttggcccagtctctcgtatctgtacctttgtccctagtactgtaactgccaatctgtctgtgtaagctggaatctgtggcaactattaccctgtgttgtatttcccaagtgtctggatggatggagaggtactcaaacaagttactttcagttgtcctgctggattttaaaaaaatagaaaaagaatctcaaaactactgttttacatagattgtttgaagagtccttcctcttgtgcttctgtaccactttcccagctcttagatgtggtagctaaaggcacggaatttagacggccttgtaaatagggcatgaggaactcatctgtgtattgggatggtattagagagagaatcaggaaagaccaactcatgaagtgaacttggtttgatcttactcaactagaaagcttgaaaacatccctggggattctgaaggcttaattttgcaaaggaggatgcattgtctgaactttgcaacttcatccagtgcaagtttgatgcaagaatgtattaggacataaaatagaggctgaccttaaaagggccaggacagaagcggctgccagctctgaatctttaactgaaatgcacatggcaccaggaggtgtctctcatagttggttgctagcctaaaacatcagaatagaacccaaagggcttaggaaggcctgccaggataacaagaaggccctgtattcattgtgtttcatctgcctaggcctactcattattttagagaatgaatgaagcaacaaggaagagagaccatgactctatcgatgacactgtttatagaaacacaggagaggaagaatttggaatgaaaagcacttcgtcagaaccttctgtgggagccattgagagaaaagcatggtccagtgccttctgagaaaggccagagctttgggctttcctgctctgcttttgggtcgtcaatttgccatctctggttctgtgctataatcagaattgtaattatgttctccagaggccaatttcattaactctgattaattagaatcagctagccagattagtaacctctttgtccagccttgatttacagtgcagggtaaagtgcagaccttaaaaacagctaagtacctagaagagctccctgcaagtgtaaatattaaggatgacctgtgcaaaattatacccacaccagcactagtggtaattattctaaattattgccaaaaagttttttttaatctgtctttcaagtttacagaaaagaaagcagtaaatgcattgatgtcattttattatgtacatatatcatgtgcattcaagctgtgtgacaagatatatcaatataaaaacaaggtatatactttattattttttgaaaacaaggatattgtgatcaattttaccctgtaaaacatatttctgtatttataggtcttaaacatgatgaattttttctattacaagtttatttaaaactgctttctcaagtcgttattgatacagcaagtgaacctgctgcagacagaagcagaggaaagccaagaacagcctttattggtgaagaaaagaatgaatgattctttgtaggcgccatcagccacttttagaagccatcagccagtgtgttgggaaaagaggtttgtcaagtgttggcctatgggaaggtggtcaatgaatgttttgatgaaatgaatgtttttgtataatggccttaaacttttctggaagtatttcaaataaattacattattaagtcatcaaaaaaaaaa

SEQ ID NO: 3338 - DNA, 3083 bp, Homo Sapiens
  NM_019591
gcggaggcgcggagctaagcggctcggattatcctgggcagaccagagacttgaccagctaaacacttccgtcggtccggggcgtggacggggccagatcagcctcctgctctcccgagtcagggccacggaaaggcacaaatccatccgtgcgactcctggtacccagaccgggaggttgtctagtcacgcgcggtctgtgttgggcgagagctgaggagccggcgtccctgccaacgactcggccccgggacggtcaggagcctggggccctggtcccgcacctgtcttcgggcggacgcatccctcacggtctctccgcagcccgcgggtcctgcccccgcaggcagcgcgcgaacgtgggcgtggggatggccaccagtttccggacagcttcgtgctggggattattgtcattcaaggatatatctatggagttcacctgggatgaatggcagctactggattctacacagaagtacctgtacagagatgtgatattggaaaactatcataacctgatatcagtggggtatcatggtaccaagcctgacttaatcttcaagttggaacaaggagaagatccatggataataaatgccaaaatttccaggcagagctgtccagatggctgggaagaatggtaccagaacaatcaagatgagcttgagagtattgaaagaagctatgcttgtagtgtgttgggaagacttaatctgagcaaaacccatgattcttcaagacagagactctataacacacgtggaaaaagtttgacacaaaactcagctccaagcagaagttatttaagaaagaatcctgataagtttcatggttatgaagaaccatattttcttaagcatcaaagagctcatagcatagaaaaaaactgtgtgtgtagtgaatgtgggaaagcttttcgttgtaagtcacagctcattgtacatctcagaattcatacaggagagagaccttatgaatgcagtaaatgtgaaagagccttcagtgccaagtcaaaccttaatgctcatcagagagttcatacaggagaaaaaccctactcatgtagtgagtgcgagaaggtcttctctttcaggtcacagctcattgtccatcaggaaattcacacaggagggaaaccctatggctgcagtgaatgtgggaaagcctacagttggaaatcacagcttcttttacaccagagaagtcacacaggagtgaaaccgtatgaatgcagcgaatgtgggaaagcctttagtttgaagtctccattcgttgtacaccagagaactcatacaggagtgaaaccccataaatgcagtgaatgtgggaaagcctttaggagtaagtcctatctccttgttcacatccgaatgcatacaggagaaaaaccctatcaatgcagtgattgtgggaaagccttcaatatgaagacacaactcattgtacatcagggagttcacacaggaaataatccttatcaatgcggtgaatgtgggaaagcctttggtaggaaggaacagctcactgcacatctgagagctcatgcaggagagaagccctatggatgcagtgaatgtgggaaggctttcagcagcaagtcataccttgttatacataggagaacacacaccggagagagaccctatgaatgtagtttgtgtgagagagccttttgtggaaaatcacagctgattatacatcagagaactcattcaactgagaagccctatgaatgcaatgaatgtgaaaaagcctaccctaggaaggcatcacttcagatacaccagaaaactcattcgggagagaaaccttttaaatgcagtgaatgtggaaaagccttcactcagaagtcatctctcagtgaacatcagagagttcacaccggagagaaaccatggaaatgctctgaatgtgggaaatccttctgttggaattcagggcttcgtatacatcggaagactcataaatgagaaatcagaatgatgcaatgtgagaaactgatgttcaggagacttcggataatatagacaggatttacaagcaggaggccctaaaattacactcatgtcaaaaatcagagaggagagagaccaaccatatttgggatgagtgtaaaagctttcagaaataagttacaaatctttgtagatgaaaataatggaaggaatgtggagcaataaatgtatcaaatgttgtagtatcatcatgaagattcagagaatttacactaggaacaccttataagttgaataaattaaggaagcattttcccattgaaagtgtgttccatggaaagtcacattccagatttgaagctgtgtttttgtaaaataaaatcttggtatgaacagttgacttcatggtggagtataaagttgtttttttaaaaatatgtaaataatgttcaggaaaaacgcagggaacagagtcttaaagttaatggatatttaatgtgactttcctgagttaacactgaatagtatttctaaaattttttgtactttattttttaatgtaacttgttctatctatctatatatatatttgatagtttgtggaataatatcccccagtattttccatattaaatgctaattatcttttgatttctttttcataagcagatctggcatttattacagggctgccgcttaagagaactcattataatgaacgtttattatattttgcagttccatgcctgttgtccattgattgacatgagcacccctgttttctctggagaaatacctcccctctctggggtgcttcctgtggtagtgtctttcaggtatccgttccactagctacaggtgagcattttacccattgttggataatggtaatctctttttcagaattttgagtctgtaattcatttgtacatgaaccagaaaatgtgggaactcattcattcttgtcccagaattctgttgagaacatccattcattctggctaattgattacaagaataactgtggatacgatccctttagaacctgcttctctgatctgtgtgtttcctcacttctcaataaaaatgtcttttgcttttaaaaaaaaaaaaaaaaaaaaaaaa

SEQ ID NO: 3339 - DNA, 3970 bp, Homo Sapiens
  NM_019592
ggaagttctgccttgtctccgccgcgggtcaggggtgagagctggaatctctgcacgggccttggaaaacgactgtcttcttctgccaaaatgtcaggaattggaaataaaagagcagctggagaacctggcacctccatgcctcctgagaagaaggcagctgttgaagattcagggaccacagtggaaacaattaagctaggaggtgtctcttcaacggaggaactagacattagaacactgcaaaccaaaaatcgcaagctggcagaaatgttggatcagcggcaggccattgaagatgaacttcgtgagcacattgaaaaactggaacgacgacaggccactgatgatgcctcactattgattgtcaaccgatactggagtcagtttgatgaaaacatccgtatcatccttaaacgttatgatctggagcagggcttgggagacctactcacagaacgaaaagcccttgttgtgcctgaaccagaaccagactctgatagcaatcaggagcgtaaagatgaccgagagagaggggaagggcaagagccagctttctctttccttgctactttggccagcagttccagtgaagagatggagtctcagctgcaggaacgtgtggagtcttcccgccgagccgtgtcccagattgtgactgtttatgataaattgcaagaaaaagtggagctcttatcccggaagctaaacagtggagataatctgatagtggaggaagcagtgcaggagctgaactctttcctcgcacaggagaatatgaggctacaggaattgacagatcttcttcaggaaaagcatcgcaccatgtctcaggagttctccaagttgcagagtaaagtggagacagccgaatcacgagtgtctgtcctggagtccatgattgatgacctgcagtgggatattgacaaaattcgaaagagggaacagcgactcaaccgacacttagcagaagtcctagaacgggtgaattccaaaggttataaggtgtatggagcggggagcagtctgtatggcggcacaatcactatcaatgctcggaagtttgaggaaatgaatgcagagcttgaggagaacaaagagttggctcagaaccgtctctgtgagctggagaaacttcggcaagactttgaggaggtcactacacaaaatgaaaagctgaaggtggaattgcggagtgcagtggagcaagtcgttaaggaaactccagaatatcgctgcatgcagtcacagttctccgtcttgtataatgagagcctacagttgaaagcacacttggatgaggctcggaccctgcttcatggcaccagaggaacccaccagcaccaggttgagcttattgagcgagatgaggttagtcttcataagaagctgaggactgaagtaattcagctagaagatacattggcccaggtccgcaaggagtatgaaatgctgaggatagaatttgagcagacccttgctgccaatgaacaagcaggccctataaacagggagatgcgccacctcatcagtagcctccagaatcacaatcaccagctgaaaggggaggtcctgagatataagcggaaattgagagaagcccagtctgacctgaacaagacacgcctgcgtagtggtagtgccctcctgcagtcccagtctagtactgaggacccgaaggatgagcctgcggagctaaaaccagattctgaggacttatcctcccagtcctcagcttcaaaggcatctcaggaggatgccaatgaaatcaagtctaaacgggatgaagaagaacgagaacgagaaaggagggagaaggagagggaacgagaaagagaacgggagaaggagaaggagagagaacgagagaagcagaagctaaaagagtcagaaaaagagagagattctgctaaggataaagagaaaggcaaacatgatgatggacggaaaaaggaagcagaaattatcaaacaattgaagattgaactcaagaaggcacaggagagccaaaaggagatgaaactattgctggatatgtaccgttctgccccaaaggaacagagagacaaagttcagctgatggcagctgagaagaagtctaaggcagagttggaagatctaaggcaaagactcaaggatctggaagataaagagaagaaagagaacaagaaaatggctgatgaggatgccttgaggaagatccgggcagtggaggagcagatagaatacctacagaagaagctagccatggccaagcaggaagaagaagcactcctctctgaaatggatgtcacaggccaggcctttgaagacatgcaggagcaaaatatccgtttgatgcagcaattgcgggagaaggatgatgcaaatttcaagctcatgtcagagcgtatcaagtccaatcagatccataagttgcttaaagaagagaaggaggagctggcagaccaggtgttgactctgaagactcaggttgatgcccagctacaggtagtaaggaaactggaagagaaggagcatctgttacagagcaacattggcacaggggagaaagagctgggtcttaggacccaagccttagagatgaataaacgcaaggcaatggaggcagcccagcttgcagatgacctcaaagcacaactggagttggctcagaagaagctacatgattttcaggatgagatcgtggagaacagtgttaccaaagaaaaggacatgttcaatttcaaacgagcccaggaggacatctctagacttcgcaggaagctggagaccacaaagaaaccagacaatgtacccaagtgtgatgagattctgatggaagagattaaggattacaaggcacgcttgacctgtccgtgctgtaacatgcgtaaaaaggatgctgttcttactaagtgttttcatgtcttctgctttgagtgtgtgaagacacgctatgacacccgccagcgcaaatgtcccaagtgtaatgctgcttttggtgccaatgattttcatcgcatctacattggttgatctaagtcaagagaagaagaggagctggctagtcaggaacttattcattaaccaccaaacctctacctcttctctccttgactgtcacctgtaggacagtttatcagtcaactacctttcctccagactttacttccaggctctcctcttcagtagctggatgactttagcagaaaggactggtaaatacaagccttgggtttcagaatgaattagaaacaaataactcttactgtcttccctcccagctttgtttattttgtgcttttagacttttcagtgttttctttttccagcccactgtataaacttggattgtccattcctcctgaagaaatcaagttggtatttttgatgtggaaaagggaacaaaagtggaaacatggctacttttggggagtgatattttaaaaaataagttgtctatgggcacaaagttttcttcatttgtgtagcaaacttcttgtgaatgtggattacaaaatggtataattgtgctactctcccctgggtggtttgcagccctaatgaaattatgtctaggatgattcagtctatttcccatttactagcagagtaacttgttaagatcagctggctttcttgttaaagttatttaagttttgaatgctctactacttcaagtctttaaatttcttgagactagaataattttaaataatatgaccctttgtcttctaatgaaataaagattgaagaggttgagtcaggactgagctggtgaagaaatcttgtgggtattctggaaatttgatacggagagaacttggtgagctatgaattactctcagtctcctttttacagggttgttgtgatccctcttttccagaaaattctgtggaatgtttctgtaggactttgttctccacaagcttgaattaaagcaggattcagtttgcaaaaaaaaaaaaaaaaaaaaaaaaaaaaaaa

SEQ ID NO: 3340 - DNA, 5478 bp, Homo Sapiens
  NM_019593
agtttggtctggagcagctgaaaccggtttgagcgtggctgcttcctgccgctcgacgccgcggcaggccgcctggggggagcgctggcgaggcacggacggcgggcgcccggtacctctgcccgcggtcctcgctctcgggcggggcggcggcgacgcggacctgcggactagcgaacccggagcacgacatcataaaataaatccatcagaatgacaccttctcaggttgcctttgaaataagaggaactcttttaccaggagaagtttttgcgatatgtggaagctgtgatgctttgggaaactggaatcctcaaaatgctgtggctcttcttccagagaatgacacaggtgaaagcatgctatggaaagcaaccattgtactcagtagaggagtatcagttcagtatcgctacttcaaagggtactttttagaaccaaagactatcggtggtccatgtcaagtgatagttcacaagtgggagactcatctacaaccacgatcaataacccctttagaaagcgaaattattattgacgatggacaatttggaatccacaatggtgttgaaactctggattctggatggctgacatgtcagactgaaataagattacgtttgcattattctgaaaaacctcctgtgtcaataaccaagaaaaaattaaaaaaatctagatttagggtgaagctgacactagaaggcctggaggaagatgacgatgatagggtatctcccactgtactccacaaaatgtccaatagcttggagatatccttaataagcgacaatgagttcaagtgcaggcattcacagccggagtgtggttatggcttgcagcctgatcgttggacagagtacagcatacagacgatggaaccagataacctggaactaatctttgattttttcgaagaagatctcagtgagcacgtagttcagggtgatgcccttcctggacatgtgggtacagcttgtctcttatcatccaccattgctgagagtggaaagagtgctggaattcttactcttcccatcatgagcagaaattcccggaaaacaataggcaaagtgagagttgactatataattattaagccattaccaggatacagttgtgacatgaaatcttcattttccaagtattggaagccaagaataccattggatgttggccatcgaggtgcaggaaactctacaacaactgcccagctggctaaagttcaagaaaatactattgcttctttaagaaatgctgctagtcatggtgcagcctttgtagaatttgacgtacacctttcaaaggactttgtgcccgtggtatatcatgatcttacctgttgtttgactatgaaaaagaaatttgatgctgatccagttgaattatttgaaattccagtaaaagaattaacatttgaccaactccagttgttaaagctcactcatgtgactgcactgaaatctaaggatcggaaagaatctgtggttcaggaggaaaattccttttcagaaaatcagccatttccttctcttaagatggttttagagtctttgccagaagatgtagggtttaacattgaaataaaatggatctgccagcaaagggatggaatgtgggatggtaacttatcaacatattttgacatgaatctgtttttggatataattttaaaaactgttttagaaaattctgggaagaggagaatagtgttttcttcatttgatgcagatatttgcacaatggttcggcaaaagcagaacaaatatccgatactatttttaactcaaggaaaatctgagatttatcctgaactcatggacctcagatctcggacaacccccattgcaatgagctttgcacagtttgaaaatctactggggataaatgtacatactgaagacttgctcagaaacccatcctatattcaagaggcaaaagctaagggactagtcatattctgctggggtgatgataccaatgatcctgaaaacagaaggaaattgaaggaacttggagttaatggtctaatttatgataggatatatgattggatgcctgaacaaccaaatatattccaagtggagcaattggaacgcctgaagcaggaattgccagagcttaagagctgtttgtgtcccactgttagccgctttgttccctcatctttgtgtggggagtctgatatccatgtggatgccaacggcattgataacgtggagaatgcttagtttttattgcacagaggtcattttgggggcgtgcaccgctgttctgggtattcatttttcatcactgagcattgttgatctatgccttttgggcttctcagttcaatgaagcaataatgaagtatttaactctttcactacagttcttgcaagtatgctatttaaattacttggccaggtataattgccagtcagtctctttatagtgagaaaatttattggttagtaatataaatattttaaactaaatatataaatctataatgttaaacatatgttcattaaaagcatagcactttgaaattaactatataaatagctcatatttacacttacagcttttcatttgatcaggtctgaaatctttagcacttaaggaaaatgactatgcataattatacctgaccatgaaaaaaataagtacctcaaatgcatgcatttgcactggtgattccaactgcacaaatctttgtgccatcttgtatataggtattttttacatgggttgacatgcacacaacaccattttcattcagtatgaaccttgaggctgctgccatttttccacttaaccaaaccagcctgaaggtgaacctcgaaacttgtttcataaatctttcaaaagttgttttacatcaatgttaaaatttcaaaatgctgcagggtaatttaatgtataaaatattagtaagaaaaagtatgtattgcatacttagtagaatagatcacaacatacaaattcaattcagtgcatgctttaggtgttaagcatgagattgtacatgtttactgttaggtccttgcatctgtggtgctaggtgagtatgagaagatgtcaaggactggacgtattttgttgcctaaaaaaaaaaggctgtttgtaggcgttttaaatatgcttattttgtgtgtctctcactacctattacacactgttgctttgtgggtttgttttgtatgtgcgtgtgttatacagtagttaaatttccatgcagaaaaataaatgtcctgaattttcatattagtattctttattgtatatcatgcatgtaatttatttagaaatgtaggtcttactaaatgtatatgcatgtatttcagattatactaggatttcttggattagaagcagattgtgttaactgtaacttaaagaatgaatgttaaataaaatgatacagatttattttcttcattacaaaatgaaatttcaagaaggtgttacttttgtagaatggttttataatatgacaagaaattttaatatagtgtctaccctaaagggatggcttatttgcatctaccttttactgcatgtttttcacaaggcagtttattcatatattgacatattttggtagtagctgagaacctaagacttgaaattatacattgtgtagtattttttaagctaagcaatgcaattttggtcagatcttatttgtgtgaagataggctctgaaatcctatggtattgcgtttgtaacgttgatattaatgcaaaatagtttaggaaatggagtcttctgcaagggttctgtatacttttcccacattgtatgagattttccaaaattttggtgtgaattgggcacttttggaaaactcctgaaaaagaattagtttccttcatctgcagacctttgtccaatacggttaccatttctttatagtaactcgattagccatatatgtttgtttctagtcctgctcctttgctcctctcctatgccttcccagtgctggctccattttgaagactcaaggacagaggggaagcagatcataaagagaaaaaggagacagaagaaaggatgaaggaaggaggtcatggggagtgtggcttctgagcagtttagttgctggggagagcagacagtcactgcctacaatacagacagaaccttcctgctcactttctgtcctatctcttcctgaccttatgaaccagtgttagtagatgattaaaacatgacaagcaatggctccttattttcacaggactaagtccgggccttcgtatcactagctgttgccttttacaccctgcttcagccaccctgtccctgtcattggccctggacttcctctctgtgcccgtgtgtcctctgcctgggagccctctcctcccatagtcactttctctctgccaaactcatttcttcttgtgcccaagacctctctcctgagcccttgtggaaacttcaggaaggatgaatccgtctttgtgctccacggctcgtaccttgatcaggctgtgcatcacagtaattctgttctaggtaggcagagttgatctttgtctcatctgccaggctgcaggctcttcaagggcagggaccttgtcatagtcatttttattttcacagtgcttggaacatggtggaaaatgaatgttggaattattggagtaatataatttgtatcaaatgtccttttgaattaagagatttagttatgtttactaagaatgtaaactttgaattggtttgcattttaacaattaggatggtttattgatgtgaattttgaaatgtagaggtataatgttaaattattttatactttatggaaatcaagtgaaatgtttgaaaaaatgccgccattatcctctggtattttctactctctggaattatgtgctgtaaatgatcggctgtaaatgtgaggcacaccacccacccctgtgtggaaagtgttgtggcgcttcctgccacccacccacctctctgccgttgctccttgtgacacttgtctgtcgtctcccatccaaactccaagcttacagctacctcagtactgctttgcttgtctgaaacacctcctttgccttccttcagtgtcccgctcaggtgcagcctcctccctaaagctcatctcagcttttgatctgaatgatgatggaaacatgcagacagcctctcagtcttactatttaatgttgtagctgggaaaaaacccagagaggttaactgatatactgggttgggactaggatgtgggttttgtgactctgaatcccatgttctcaaactacgctgccttccgaagtctggcatttgttagctcatgcttccttgtagtccagcttcttatgtgcctgttatattctccagtaagattgtaagccccttaagggcagggacgtctttgcatctctagcactgctatagtgttctatccttagttatgaactagataaataaatggtggtggcaacaatcctaaaaaaaaaaaaaaaaaaaa

SEQ ID NO: 3341 - DNA, 2392 bp, Homo Sapiens
  NM_019597
aggaagtgcggcaccttagtgatcccgagtttaagccgagagttgctcacgtgaccgagatctcacatgacgtaggcgctcacgtgattactcgcttacgtgagcagaagtagttctggtcgtcgtctaccgtctcgctatagccgtttgagggaagaaggaggaaaattacccggtatcgttagagctacaccaaaattgcattgagccaaacttgccaccaagagcccaacaatcaccatgatgctgagcacggaaggcagggaggggttcgtggtgaaggtcaggggcctaccctggtcctgctcagccgatgaagtgatgcgcttcttctctgattgcaagatccaaaatggcacatcaggtattcgtttcatctacaccagagaaggcagaccaagtggtgaagcatttgttgaacttgaatctgaagaggaagtgaaattggctttgaagaaggacagagaaaccatgggacacagatacgttgaagtattcaagtctaacagtgttgaaatggattgggtgttgaagcatacaggtccgaatagccctgatactgccaacgatggcttcgtccggcttagaggactcccatttggctgtagcaaggaagagattgttcagttcttttcagggttggaaattgtgccaaatgggatgacactgccagtggactttcaggggcgaagcacaggggaagcctttgtgcagtttgcttcacaggagatagctgagaaggccttaaagaaacacaaggaaagaatagggcacaggtacattgagatcttcaagagtagccgagctgaagttcgaacccactatgatccccctcgaaagctcatggctatgcagcggccaggtccctatgataggccgggggctggcagagggtataatagcattggcagaggagctgggtttgaaaggatgaggcgtggtgcctatggtggagggtatggaggctatgatgactatggtggctataatgatggatatggctttgggtctgatagatttggaagagacctcaattactgtttttcaggaatgtctgatcatagatacggagatggtgggtccagtttccagagcaccacagggcactgtgtacacatgagggggttaccttacagagccactgagaatgatatttataatttcttctcacctcttaatcccatgagagtacatattgaaattggacccgatggcagagttaccggtgaggcagatgttgaatttgctactcatgaagatgctgtggcagctatggcaaaagacaaagctaatatgcaacacagatatgtggagctcttcttaaattctactgcaggaacaagtgggggtgcttacgatcacagctatgtagaactttttttgaattctacagcaggggcaagtggtggcgcttatggtagccaaatgatgggagggatgggcttatccaaccagtctagttatggaggtcctgctagccagcagctgagtggtggttatggaggtggttatggtggtcagagcagtatgagtggatatgaccaagttctgcaggaaaactccagtgactatcagtcaaaccttgcttaggtagagaaggagcactaaatagctactccagatataaaagctgtacatttgtgggagttgaatagaatgggagggatgtttagtatatccagtatgattggtaaatgggaaatataattgattctgatcactcttggtcagcttctctttctttatctttctttctccttttttaagaaaacgagttaagtttaacagttttgcattacaggcttgtgattcatgcttactgtaaagtggaagttgagattattttaaaacttcaagctcagtaattttgaacactgaaacattcatctaggacataataacaaagttcagtattgaccataactgttaaaacaatttttagctttcctcaagttagttatgttgtaggagtgtacctaagcagtaagcgtatttaggttaatgcagtttcacttatgttaaatgttgctcttataccacaaatacattgaaaacttcggatgcatgttgagaaacatgcctttctgtaaaactcaaatataggagctgtgtctacgattcaaagtgaaaacatttggcatgtttgttaattctagctttttggtttaatatcctgtaaggcacgtgagtgtacactttttttttttttaaggatacgggacaattttaagatgtaataccaatactttagaagtttggtcgtgtcgtttgtatgaaaatctgaggctttggtttaaatctttccttgtattgtgatttccatttagatgtattgtactaagtgaaacttgttaaataaatcttccttttaaaaactggaaaaaatcttgaa

SEQ ID NO: 3342 - DNA, 4231 bp, Homo Sapiens
  NM_019600
taaacttggccgcggttgccgcaggaaggctagccagagggtaattacacagcattttgaaagcgaagcagaagccgtagaatcagcggcgagcctgttgaaagaacccacaggtgcatttcacagcactctgggcgaaaattggatgtgaaaatgaagccagaccgagatactctggatgaatattttgaatatgatgcagaggagttcttggtctctttggccttgctgataacagaaggacgaacacctgaatgttctgtaaaaggtcgaacagaaagctttcattgccctccagcacagtcttgttacccagtaactaccaaacatgaatgtagtgacaagctggcccagtgccgccaagccagacgaactaggtctgaggtcacattgttgtggaagaataaccttccaatcatggtggaaatgatgctactaccagactgctgctacagcgatgatgggcccaccacagagggaattgatctaaatgatcctgcgattaagcaagatgcattattattagaaagatggatcttggagccagttcctcgacagaatggtgaccgatttattgaagagaagacgcttctgttggctgtccgctcatttgtgtttttttctcagttaagtgcatggctgagtgtttctcatggtgctattccacgaaatattctctacagaatcagtgctgctgatgtagacctacagtggaatttttcacagactccaattgagcatgtgtttcctgttcccaatgtttctcacaatgttgccttgaaagtcagtgttcagtccttgcccagacaatctaattatccagttttgacgtgcagtattcacactaatattggcctttatgagaaaagaattcaacaacataaacttaaaactcatcagcaccataacccaaatgaagcagaacaatgtggtacaaacagttcacagcgtctgtgtagcaaacaaacttggaccatggcacctgaaagtgtgttacatgcaaaaagtggcccaagtccagaatatactgcagctgtcaaaaatatcaaactatatccaggcactggcagtaaatctgaccatgggacatctcaagccaatattctaggctttagtggtataggtgatataaaatcacaagaaacatcagtgagaactttaaaatcattttcaatggttgattccagtatctctaaccgccagagtttctggcagtcagctggtgagactaaccctttaataggctctttaattcaggagcggcaagaaatcattgcaagaattgcccaacatttgattcattgtgatccaagcacttcacatgtttctggacgtccatttaatactcaagagtctagttcactccattcaaaacttttccgggtttcacaagaaaatgagaacgtgggaaaaggtaaagaagctttctccatgacttttggtagtccagagtttagttccccagaagacaccaatgaggggaaaattcgactaaaaccagaaactcctcgaagtgaaacttgtatttctaatgacttttattctcatatgcctgttggagagactaatcctttgataggctctttactccaggagcggcaagatgttattgcaaggattgctcaacacttggagcacattgatccaacagcatcacatatcccccggcagtcattcaacatgcatgactccagttcggttgcatctaaagtgtttaggagttcatatgaagacaaaaatttgttgaagaaaaataaggatgagtcctcagtttccatttctcacacaaaatgttccttgttaggagacatcagtgatgggaaaaacttagtacctaataaatgttttacttcttttaaaaataatagtaaagaaaagtgttctttgaaacatcaaacaagaaatcagtgtcagaacaatcctagtgaaatcatccaaagtacgtatcaggagacacagaacaaaagttctagtttatcaacttcctcaattttgtctcagcacaaagaaaataacttagatttgacaagcagattcaaggagcaagaaatgagcaatggaattgataaacagtattcaaattgcaccactattgacaaacagatttgtacaaataagtataaggaaaaaataataaatgagaactataatccaaaattctttggcaatcttcagtctgatgattccaaaaaaaatgactcaaaaataaaagttactgtgttggaaatgtctgaatatttgaacaaatatgaaagcatgtcctcaaataaagactcaaaaaggcctaagacatgtgagcaaaatactcaacttaatagcatagagaattatctcaataaagataatgaaggtttcaaatgtaaaaagtcagaccaattaaaaaatgaacaagataagcaagaagatccaactaatgaaaaatcccaaaactattctcagagaagaagtataaaagactgtttgtctacatgtgagcaaccaaaaaatacagaggtattgaggactacactgaaacattcaaatgtgtggcgaaaacataattttcattccttggatggaacttcaaccagagcctttcatcctcaaactggattgcctcttctttcaagccctgttcctcaaagaaaaacacaatcaggttgctttgatctggattcttcattactacatctgaaaagcttctcatctagaagtcctcgaccatgtttaaacattgaagatgatccagatattcatgaaaaaccatttttgagttctagtgctccacctataacaagtcttagtctcctaggaaattttgaggaatctgtcttgaactatcgtttcgatcctctcggcattgttgatggttttactgccgaggtaggggcaagtggtgctttctgccccacacatttgactcttccagttgaagtgtcattctacagtgtttcagatgacaatgctccctctccttatatgggtgtgattactttagagtcccttggtaaaaggggttatcgagtacctccttcaggaacaatacaagtgaccttatttaatcctaataagactgtggtgaagatgtttgttgtgatatatgatttacgagatatgccagccaatcatcagacattcctacgacaaagaactttttctgtacctgttaaacaagaagtgaagagaagtgttaataaagagaacatccgacacacagaagaacggttattacgctacctcatacatctgaggttccagagttctaaatctggaaagatctacctccatagagacgtacggctcctgttctctagaaagtcaatggaggttgatagcggtgctgcatatgaactcaaatcttacactgaatcaccaacaaaccctcagttttcaccaagatgttgataaggagtgatgatttaaagtatttactcagtacccaagtttgcaagtaaaaattagcatagaatggagtgtaccaaattaacaatcaggagagtggattctctcctgttatcctggaccagtttttatgaaaggattcctgaaatgaaatccatatattccatgtagactggaaaaactcatgtcctaatcctttttgtactgttgaaaccacttcattggacatgttgcaatagcaaaacccccagttagattagtgtttacacattttctcagttatttaatatttaatgttttccttaatactcaagtgatgtttgtctctagtgttctaatgtagcacaaatcctatgtaaaatcatactatgtatttttgacattaatgttgaaatcaaatatatgcacaagtctttaattttgtgtaatgtgttaagtgctgttcatttaagttattgaaaatgagaataaaatgttgagcttctttaaaagtaacacactatgcaagcatgtgtactttttatatctctcatgtttagtttttataacaccatatccaggttgctatctcacatagtagtcctttaacatattgtattagcagtgcaatgtggactaagctgcttcactttccctttgcaagttcagatcatcatgcccattcatagccaggattccttatccccaaaacagttctatttttccttaatcactactatagagtctttacattaaattactgtcgtatgctagataattttctcaaattgttaaaagaatatgtactttggaaacaaattagtatttatattgtaaatatattcaaaaaaaactaaaaaaaaaaaaaaaa

SEQ ID NO: 3343 - DNA, 3047 bp, Homo Sapiens
  NM_019606
atttaaactcccagagccgttaagttggttcgtagtctgatgcgcgcgcaaccagggtggtggcggagtgcgcatgcgtggttcccgggcgaagggaacgcgcgctcaccgtgcgcgctcgcggccgggtggtagtggcggaggagaaaggggtcggcgcacgcgcggttgagtcctcgagtagttcgggtctcgcgggcctcttgttttggtctcgcgggctagtagggcgcacttggcggggaggcgcttgggcgcgagactaggcgtgaagagcagagctgcgcgcgcactcgggaaaggggggaagggagcagggtccaggcagggggggttaggccccctgatccccctcgttaccccgactggcacggaataaggggaggaaatgatcgagatggcggcggagaaggagccgtttctggtgccggccccgccgccgccgctcaaagatgagtcgggcggagggggcggccccacggtgccaccgcaccaagaggccgcctctggggagctccgcggcgggacggagcgtggtccgggtcgttgcgcgccatctgcggggtccccagccgctgcggtcggtcgggaaagccccggggccgcggccacctcctccagtggtccccaggcgcagcagcaccgagggggcggcccccaggcgcagtcgcatggggaggcccgcctgtcggatcccccggggcgagccgctcccccggacgtgggggaggagcgccggggagggggcgggacagagctgggtccccctgctcctcctcgaccccgcaatggctatcagccccaccggccacctggggggggcgggggcaagaggagaaatagctgtaatgtagggggaggcgggggaggcttcaaacatccggccttcaagaggcgcaggcgggtgaattcggactgtgactctgtgttaccctccaacttcctcctggggggcaatatctttgatcccctgaacctgaatagcctcctggatgaggaagtgagccgcactctcaacgcggagacccctaagtcatccccccttccggccaaagggcgagatccggtggagatcctcatccccaaagatattactgacccgctcagtctcaatacttgcactgatgagggccatgtagttcttgcttcgccactcaagactggtcggaagcggcatagacaccggggacagcaccaccagcagcagcaggcagccggagggagtgagagtcaccccgtgccgcccacagcccctctcacccccttactccacggggagggcgcctcacagcagccgcggcacaggggccagaaccgggatgccccccaaccctatgaactcaacacagccatcaactgcagggatgaagtggtgtctccccttccatctgctctgcagggtccctcaggctccctatcagcccctccagctgcctcagttatctctgcacccccatcttcctcctcccgacatcgcaaacgtcgcaggacttccagcaagtcggaggcaggggctaggggtggaggccagggttccaaggaaaagggccgagggagttggggaggccgccaccaccaccaccacccactgcctgcagcaggcttcaaaaagcaacagcgcaagttccagtatgggaattattgcaaatactatgggtaccgcaatccttcctgtgaggatgggcgccttcgggtgttgaagcctgagtggtttcggggccgggacgtcctagatctgggctgcaatgtgggccatctgaccctgagcattgcctgcaagtggggcccgtcccgcatggtgggcctggatatcgattcccggctcatccattctgcccgccaaaacatccgacactacctttccgaggagctgcgtctcccaccccagactttggaaggggacccgggggcagagggtgaggaagggaccaccaccgttcgaaagaggagctgcttcccagcctcgctgactgccagccggggtcccatcgctgccccccaagtgcccttggatggagcggacacatcagtcttccccaacaatgttgtcttcgtcacgggtaattatgtgctggatcgagatgacctggtggaggcccaaacacctgagtatgatgtggtgctctgcctcagcctcaccaagtgggtgcatctgaactggggagacgagggcctgaagcgcatgtttcgccggatctaccggcacctacgccctgggggcatcctggtcctagagccccaaccctggtcgtcgtatggcaagagaaagactcttacagaaacgatctacaagaactactaccgaatccaattgaagccagagcagttcagttcctacctgacatccccagacgtgggcttctccagctatgagcttgtggccacaccccacaacacctctaaaggcttccagcgtcctgtgtacctgttccacaaggcccgatcccccagccactaagtggccccctaaacagaaagtgtgaagaggctgccctcgctgctcataaggacctgggggaagaggaaagtgtcccaaggtctttcctttctgactccaaaaatagtttcctttcttggatctgcaaagaaagcttttcttccgtcgctgcctcagcctcctccctatgcctctggcacctgcgcagcaaggctggctgtgctggagtcaccatcatcttcctctcccccagcctcccaggctggatggcatggactgtttgctgacctctgttctcttagggcatgggaggtgggaggatatcaaattctctagccctttcctcctattctcccaaggagagagattcccatttctcctcggccattgtacctagctcttgtccctagctgcatttcagtggaccatggatagagggactgagggttagacggggaagactggcagggaggcacgcaggtactgtgaaaatccttccctttgccctcccccagtgggagagggggttgggttttcaatgtgagaacagcacaataaacttgatgtctagggcagtggcccccacacctgtcaaaaaaaaaaaaaaaaa

SEQ ID NO: 3344 - DNA, 2596 bp, Homo Sapiens
  NM_019613
gtggggcgcgggcgcgcgcacggacgtccagcacgcacgcacgcacgtccagcacacacgcacatccagcacgcacgcacgtacgtccggcacttccggccgcggcggcctcagcgccggcccgaagggaccaggccgccgtccccagcgagaggcatgcagcgctgaggagcggcgacccagcacggcggcgccatgaacctcctgccgtgtaaccctcacggcaacgggctgctctacgccggcttcaaccaggaccacggatgctttgcgtgtgggatggaaaatggattccgagtctataacactgatccactaaaagaaaaagagaaacaagaatttctagaaggaggagttggccatgttgaaatgttatttcgctgcaactatttagctttagttggtggtggaaaaaagccgaaataccctcccaacaaagtaatgatctgggatgacctgaagaagaagactgttattgaaatagaattttctacagaagtcaaggcagtcaagctgcggcgagatagaattgtggtggttttggactccatgattaaggtgttcacattcacacacaatccccatcagttgcacgtcttcgaaacctgctataaccccaaaggcctctgtgtcctttgtcccaatagtaacaactccctcctggcctttccgggcacgcacacgggccatgtgcagcttgtggacctggccagcacggagaagccacccgtggacattcctgcacacgagggtgtcctgagctgcattgcactcaacctgcagggaacaagaattgcaactgcatccgagaaagggacgcttataagaatatttgatacttcatcagggcatttaatccaggaactgcgaagaggatctcaagcagccaatatttactgcatcaacttcaatcaggatgcgtccctcatctgcgtatccagcgaccacggcacagtgcatatttttgcagctgaagatccaaaaaggaataaacagtccagtttggcctcagccagtttccttccaaaatacttcagttccaagtggagtttctccaagtttcaggttccctcaggctctccgtgcatttgtgcctttggaacagagccaaacgccgtcattgcaatttgtgcagacggcagctactacaaattcctgttcaaccccaagggggagtgcatccgagatgtctacgcgcagtttctagagatgaccgatgacaagctgtgactccagctgggggcgccacagcacccaccacctgccgccttcagactctcggggctggtgccagtgccccaggggcctcctgggccacgggctggaggggctgcccagggaccttggtctcgaagccatacgtggttgtctgctttcctaaggactcccatttccagtattaaagagagaatcatcatcaaggcaccgtaggtaactcagtggctgtgaccagctcgactggcggccactggctgttcccatgagttcagctgtgacgttagcttcagtggctccgccgcatcctcacactgacgggggctccatacggacctggggactgggctgagagggtggacgagttcaggtttgtttttgcagcagattccgtcgttcttactgagtctgcagcgggggagtgaacaagtgtgcagatgtaagttcttacatgataagcagattgaatacaacaccagcagcttgccttagaaaaggagaaaggaattccttttcccgcccgaacatgaagaaaaatgacctgaccctgtagagagaacacagtgtgaatgtttcccctcgtgtgagcccagcctgtggtcttctccgtacccgcaacgtggtcatctgtgcccgtgacgtcacctgtgcccgtgcgtggcgtccccgtctccgttggggccattagaatgaggcagacaccaggccactctagaagccgagccgtcacacctcaggcgtgtgcggggcggggacggggggtctcctggttacattttggattaaacctgtttcccggttatgtgtagggaacagcagagtgatgcacgaactttgaacattcgttatggggaaaacatcctttaacttcggggtcgtctgccagagcagggtctgggagggtccatgcagttcccgctggtgtggagggaaatgccctggtctggcctccgagcccccaggtccaccgtctcccctcccctcatttgtaagaatagctacacactaacattttgggaaggagaggcacataactttttttaacatttggtaactaggttatgggctctacattgtcagctacttgggatatatatttaattttcttaaattcccgttaaactctattttatggttttgatttcagattgcaaacatgtaaaacctgcatagcagcgagttctcggttttgccggtttctttagttctttactgtcactgtcatgtaatcagctaattctctgtggatgttgctgtaaagtatgcatgttcctttcatgtgtatttaatcatgatgtttaattttgcacacttatttgtaatgtttcttttaaataaaagtgactaattttgttgtagtctggacctgtaaaaaaaaaaa

SEQ ID NO: 3345 - DNA, 3704 bp, Homo Sapiens
  NM_019843
attaagggggagggggccgaagaggaggggcggagggccgggctgcagttacggcggctgaagagagacagcccaagccggtcggggtgggggcgcgagagcgaaggctgcggggagcggcgctgggaccggtgcgggcagcggggaggggagcggcggccgaggcaaagggccgccgagcggcggaggcaccgagtgcagagcattgtagaccaaggagccatggataggagaagtatgggtgaaacagaaagtggagatgctttccttgacctgaagaagcctcctgcctccaaatgcccccatcgctatacaaaagaagaactcttggatataaaagaactcccccattccaaacagaggccttcatgcctttctgaaaaatatgacagtgatggtgtctgggaccctgagaagtggcatgcctctctctacccagcttcagggcggagctcaccagtggaaagtctgaagaaagagttggatacagaccggccttccctggtgcgcaggatagtagatccacgagagcgtgtgaaagaagatgacttagatgttgttctcagccctcagagacggagctttggagggggctgccacgtgacagccgctgttagctcccggcgctcaggaagtccattagagaaagatagtgatgggcttcgtctgcttggtggacgtaggattggcagtgggaggataatctctgcccggacctttgagaaggatcaccgtcttagcgataaggacctgcgggacttgagagacagagaccgagagagggacttcaaggacaagcgtttcaggagagagtttggagatagtaagcgtgtctttggtgagcgtagaagaaatgattcttacacagaagaagaaccagagtggttctctgctggacccacaagtcagtctgaaaccatcgaactgactggctttgatgataagatactagaagaagatcacaaagggagaaaaagaacaaggcgacggacagcctctgtgaaggaaggtatagtagagtgcaatggaggagtggccgaagaggatgaagtggaggtcatccttgcacaggagcctgcggctgatcaggaagtgccaagggatgctgtcttgcctgagcagtccccaggagactttgactttaatgagttctttaaccttgataaggtgccatgcttggcttcgatgatagaagatgttttgggagaagggtcagtctctgccagtcggttcagtaggtggttctctaacccgagcagatcaggaagccgatccagcagtcttgggtcaacaccacatgaagagctagagagacttgcaggtctggagcaagccatcctctctcctggacagaactcggggaattactttgctcctataccattggaagaccatgctgaaaataaagtggatattttagaaatgctacagaaagccaaagtggatttgaaacctcttctttccagcctttctgcaaataaagaaaaacttaaagaaagctcacattcaggggttgtgctttcagtggaggaggtagaagcaggtctgaagggcttgaaggttgaccagcaagtgaagaattcaactcccttcatggcagaacacctagaagagaccttgagtgccgtaaccaacaatcgacaactgaagaaagacggagacatgactgcgttcaacaagctagtgagcacaatgaaggcaagtgggactttgccttctcagcccaaagtcagccgaaaccttgaaagccatttgatgtcccctgctgagattccaggccagcctgtccctaagaacatcctgcaggaacttctgggtcaaccagttcagagacctgcttcttccaatcttctgagtggccttatggggagcttggagcctacaacatctttactgggccaaagagcaccctctcctcccttgtcacaggtgtttcaaactcgagcagcctcagctgactaccttcgcccaagaataccatcaccaattggtttcacaccaggaccacagcagctactcggagatccattccaaggcatgcgcaaacccatgagccccatcacagcccagatgagccagctggagttgcaacaggcagctttagaagggctggccttgccacatgaccttgctgtacaggcagcaaacttctaccagcctggttttggcaaaccacaggtggacagaaccagagatggattcagaaacaggcaacagcgagtgaccaagtcaccagcacccgtgcatcgagggaattcctcttcccctgcccctgctgcctccatcacaagcatgctttctccttcctttacccctacctcagtgattcgtaagatgtacgagagcaaagagaaaagcaaggaggagccagcatctggaaaagcagctcttggtgacagtaaagaggatactcagaaggccagtgaagaaaacctcctgtcatccagctctgtacccagtgccgatcgagactcttctcccactacaaattccaaactgtcagcattacagaggtcttcgtgttccaccccactgtcccaggccaaccgttacaccaaagaacaagattatcgacctaaagcaactgggagaaaaacacccaccttggcatccccagttcctacaacaccttttctccgccctgtccaccaagttccccttgtcccccatgtccctatggttaggcctgctcaccagcttcacccagggttggtacagaggatgctggcccagggagtacatccacagcatcttccaagtttgctccaaactggtgtgcttcctcctgggatggacttgagtcatttacagggaatatctggccccatcctgggtcagcccttttaccctttacctgctgctagtcaccctctcttaaaccctcgtcctggaacacctctgcatctggcaatggtgcaacagcagctacagcgctcagttctgcatcctccaggctctggttcccatgcagcagctgtcagcgttcagacaacccctcagaacgtgcccagccggtcaggcctgccccacatgcactcccagctggagcatcgccccagccagaggagcagctcccctgtgggccttgccaaatggtttggctcagatgtgctacagcaacccctgccctccatgcccgccaaagttatcagtgtagatgaattggaataccgacagtgagcagggcaggcagactcaactaagcccggacctgtggtggcacactgggcaggaccctgcttcatctcgggttggtttatgggcttttactttggagcactctgtgtgaagctgtttggtggaacccatgcatctggtgtggtccgcattatgatggaaggatcttaaccagtcgagtggagtgtacattgtctgaatacaggatgcacaatgttgtcaatcctggaaatggtctttcttttttgtaagatatgtgaatgaagtgttggtgtcctcaccaagaggtggcacctaagggttctgaggaaataaatgtatagacccttatgtacagacctgtgtataaacaacttttgtatatacatataggatagcttttttgaactatacagctgtacataaaagtagctgatattagttaggcctgtgtcaacagtttggatttttttcacttgtacatttgggattttcttttggttgattaaaattgcatatgctaagtgtgtgaatgaagtaactgaaaa

SEQ ID NO: 3346 - DNA, 1349 bp, Homo Sapiens
  NM_019846
cctgatcgaacagcctcacttgtgttgctgtcagtgccagtagggcaggcaggaatgcagcagagaggactcgccatcgtggccttggctgtctgtgcggccctacatgcctcagaagccatacttcccattgcctccagctgttgcacggaggtttcacatcatatttccagaaggctcctggaaagagtgaatatgtgtcgcatccagagagctgatggggattgtgacttggctgctgtcatccttcatgtcaagcgcagaagaatctgtgtcagcccgcacaaccatactgttaagcagtggatgaaagtgcaagctgccaagaaaaatggtaaaggaaatgtttgccacaggaagaaacaccatggcaagaggaacagtaacagggcacatcaggggaaacacgaaacatacggccataaaactccttattagagagtctacagataaatctacagagacaattcctcaagtggacttggccatgattggttagtctcactctatcacacaggctggagggcagtggcaggatctcagttcaccccaacctttgcctcacgggttcaagggattctcgtgcctcagccttccaagtagctgggattacaggtgtgcgccagtacgcctggctagttttagtattttttgttacagacggggtttcaccatgttggctgggctggtctcaaacttctgatctcaagtgatccatctgccttggcctcccaaagtgctgggattacaggcatgagccactgcacctggcctacgtattaggctttatgtaagatgtacatagtactccatactcctttccttttcctcctattgaaactgttcctataaactttataaaattaatcagagaagaagagagggtgagaaacataaataatccaagcttgcaccacattcagcattaatcactaggtcactttgcttgctgaccccttcctcatagttgtttggctattgcttcagaattatgtggagtctgttacaagattatagttccccttaactgctctatagataacagcttgaacattatgaaatgctaagttttcccttcgagacattctttcaggtcctgcatactgatgaaactactgatgtcagctggtctgaaggaccctaccagaagctaaatcatcaaagaatgcaatttccatatcctaatgattcaatctcccttaccctgaccaatcagtggcccaaattttccagccccttgcctcccagaaccccagcccagaactcttcagagatttaagaatctcctcctacctcctgactcagcaccatgtaatcattaaactctctgctgcaaaaaaaaaaaaaaa

SEQ ID NO: 3347 - DNA, 1975 bp, Homo Sapiens
  NM_019852
ccgcgtgagaattggctatatcctggagcgagtgctgggaggtgctagtccgccgcgccttattcgagaggtgtcagggctgggagactaggatgtcggacacgtggagctctatccaggcccacaagaagcagctggactctctgcgggagaggctgcagcggaggcggaagcaggactcggggcacttggatctacggaatccagaggcagcattgtctccaaccttccgtagtgacagcccagtgcctactgcacccacctctggtggccctaagcccagcacagcttcagcagttcctgaattagctacagatcctgagttagagaagaagttgctacaccacctctctgatctggccttaacattgcccactgatgctgtgtccatctgtcttgccatctccacgccagatgctcctgccactcaagatggggtagaaagcctcctgcagaagtttgcagctcaggagttgattgaggtaaagcgaggtctcctacaagatgatgcacatcctactcttgtaacctatgctgaccattccaagctctctgccatgatgggtgctgtggcagaaaagaagggccctggggaggtagcagggactgtcacagggcagaagcggcgtgcagaacaggactcgactacagtagctgcctttgccagttcgttagtctctggtctgaactcttcagcatcggaaccagcaaaggagccagccaagaaatcaaggaaacatgctgcctcagatgttgatctggagatagagagccttctgaaccaacagtccactaaggaacaacagagcaagaaggtcagtcaggagatcctagagctattaaatactacaacagccaaggaacaatccattgttgaaaaatttcgctctcgaggtcgggcccaagtgcaagaattctgtgactatggaaccaaggaggagtgcatgaaagccagtgatgctgatcgaccctgtcgcaagctgcacttcagacgaattatcaataaacacactgatgagtctttaggtgactgctctttccttaatacatgtttccacatggatacctgcaagtatgttcactatgaaattgatgcttgcatggattctgaggcccctggcagcaaagaccacacgccaagccaggagcttgctcttacacagagtgtcggaggtgattccagtgcagaccgactcttcccacctcagtggatctgttgtgatatccgctacctggacgtcagtatcttgggcaagtttgcagttgtgatggctgacccaccctgggatattcacatggaactgccctatgggaccctgacagatgatgagatgcgcaggctcaacatacccgtactacaggatgatggctttctcttcctctgggtcacaggcagggccatggagttggggagagaatgtctaaatctctgggggtatgaacgggtagatgaaattatttgggtgaagacaaatcaactgcaacgcatcattcggacaggccgtacaggtcactggttgaaccatgggaaggaacactgcttggttggtgtcaaaggaaatccccaaggcttcaaccagggtctggattgtgatgtgatcgtagctgaggttcgttccaccagtcataaaccagatgaaatctatggcatgattgaaagactatctcctggcactcgcaagattgagttatttggacgaccacacaatgtgcaacccaactggatcacccttggaaaccaactggatgggatccacctactagacccagatgtggttgcacggttcaagcaaaggtacccagatggtatcatctctaaacctaagaatttatagaagcacttccttacagagctaagaatccatagccatggctctgtaagctaaacctgaagagtgatatttgtacaatagctttcttctttatttaaataaacatttgtattgtagttgggaaaaaaaaaaaaaaaaaaaaa

SEQ ID NO: 3348 - DNA, 2516 bp, Homo Sapiens
  NM_019858
gagggaggagggcgggcgagctggagccggcaggcagcgggagcccgagagagccgcgtcgggagtgcggtctccatggcagtgctgggcgcagccggagagagcctgtccagggggctgagccccacccccaaatccctggggcatccagaagattcctgactggtcaagaaccagaggcaaaagagacctggaagtcccagcatggggaccagaaccccccagccagcctcatagttgggaaagtagccagcttgcctgccccatcaattgcagggatgcttaaggaaggccccgcccagtatgaaagctgaggattgcctctgctgaccctcagtctcctcccctgccctctacatctgccctcagctgggtccatcatgcaatgctgagcactggggtgagcctgggggcagcctgcctgctgacagggcgaggattgtggggatcatgggagtgtttgtgagtggggctcctgggtgagacctagcccccacccccacagagctcaagggggtggggggctgaggataggatggctcggggcggggcgggggcagaggaggcctccctgcgctccaacgcattgtcctggctggcctgtgggctcctggcgctgctggccaatgcctggatcatcctcagcatctcggccaagcagcagaagcacaagccactggagctgctgctctgcttcctagcgggcacacacatactcatggcagctgtgcccctcaccacctttgccgtggtgcagctgcgtcgtcaggcttcctccgactatgactggaacgagagtatctgcaaggtcttcgtgtccacctactacaccctggcgctggccacctgcttcacggtcgcctccctctcctaccatcgcatgtggatggtgcgctggcccgtcaactaccgcctcagcaacgccaagaagcaggcactgcatgccgtcatgggcatctggatggtcagcttcatcctctccacactgccctccattggctggcacaacaacggcgagcgctactatgcccgcggctgccagttcatagtctccaagatcggcctcggctttggcgtttgcttcagcctcttgctacttgggggaattgtcatgggtctggtctgtgtggccatcaccttctaccagacactgtgggcccggccccggagggctcggcaggcccggagagtggggggtggtggggggaccaaagcgggtgggccaggggccttgggtacccggccagcttttgaggtaccagccattgtggtggaggatgcccgagggaagcggcggtcctcgctggatggctcggagtctgccaagacatccctgcaggtcaccaacttggtcagcgccatcgtctttctctatgactcactcacaggggtgcccatcttggtggtgagcttcttctccctcaagtcggactcggcgcccccctggatggtgctggctgtgctgtggtgctccatggcacagacgctgctgctgccctccttcatctggtcctgcgagcgctaccgcgccgacgtgcgcacagtgtgggagcaatgcgtggccatcatgtctgaggaggatggagatgacgatgggggctgtgacgactatgcagagggccgagtttgcaaagttcgctttgatgctaacggagccacaggaccagggagccgggaccccgcccaggtgaagctgctgcctggaaggcacatgctcttccctcctcttgagagagtccactacttacaggtccccctatcccggcgtctgtcccatgatgagacaaacatcttctctacccctcgggaaccaggctccttcctgcacaagtggtcatcctctgatgacatccgggtcctcccagcccagagccgggccctcgggggtcctcctgagtacctgggacaaagacacaggttggaggacgaggaggacgaggaagaggctgaaggtggggggctggccagccttcgccaattcttggagagtggggttctggggtcaggtgggggacccccacggggtcctggcttcttccgggaggagatcaccaccttcatcgatgagacacctctgccttctccgactgcctcaccagggcactctcctcgtcggccccggccactgggcctctcaccccgccgactctcccttgggtcccctgagagcagagccgttggacttcctttgggactaagcgcagggagacgctgctccctgacggggggtgaagaaagtgcaagggcttggggaggatcctggggcccaggcaaccccatctttccccagctgaccctgtgagcccaagcaggcctgctgaactcagaggagaaagcctgagtgagtaacacctcattctggccgagagtagggcagctgcctccagactctggggagacgggcgctagatttggggctcagaaggccctgctctctcccatccaagtgaccagatgccctactcagcttccatcacccctagcaatatgtattaaagtctgaagtgttgccatgg

SEQ ID NO: 3349 - DNA, 2617 bp, Homo Sapiens
  NM_019863
gcgtccccctcggcgggctgccgccgtgcccgcgccggctccccagcccgagcctgccccttgccctgatgaggtgcaaagagcgggatcggaggcggggcctggccgggctgtgagcggcgtatgcaaatcgagggtctcggggatgcggatccaagaccctgggaaggtcttctttggcaatgtggattcatctgggataaaacacaatatttttaaccctccaattattgctcgatacatccgtttgcacccaactcattatagcattcgcagcactcttcgcatggagttgatgggctgtgatttaaatagttgcagcatgccattgggaatggagagtaaagcaatatcagatgcacagattactgcttcatcctactttaccaatatgtttgccacctggtctccttcaaaagctcgacttcacctccaagggaggagtaatgcctggagacctcaggtgaataatccaaaagagtggctgcaagtggacttccagaagacaatgaaagtcacaggagtaactactcagggagtaaaatctctgcttaccagcatgtatgtgaaggagttcctcatctccagcagtcaagatggccatcagtggactctcttttttcagaatggcaaagtaaaggtttttcagggaaatcaagactccttcacacctgtggtgaactctctagacccaccgttactgactcgctaccttcgaattcacccccagagttgggtgcaccagattgccctgaggatggaggttctgggctgcgaggcacaggacctctactgagggtggccactgcagcacctgccactgccgtcacctctccctcctcagctccagggcagtgtccctccctggcttgccttctacctttgtgctaaatcctagcagacactgccttgaagcctcctgaattaactatcatcagtcctgcatttctttggtggggggccaggagggtgcatccaatttaacttaactcttacctattttctgcagctgctcccagattactccttccttccaatataactaggcaaaaagaagtgaggagaaacctgcatgaaagcattcttccctgaaaagttaggcctctcagagtcaccacttcctctgttgtagaaaaactatgtgatgaaactttgaaaaagatatttatgatgttaacatttcaggttaagcctcatacgtttaaaataaaactctcagttgtttattatcctgatcaagcatggaacaaagcatgtttcaggatcagatcaatacaatcttggagtcaaaaggcaaatcatttggacaatctgcaaaatggagagaatacaataactactacagtaaagtctgtttctgcttccttacacatagatataattatgttatttagtcattatgaggggcacattcttatctccaaaactagcattcttaaactgagaattatagatggggttcaagaatccctaagtcccctgaaattatataaggcattctgtataaatgcaaatgtgcatttttctgacgagtgtccatagatataaagccatttggtcttaattctgaccaataaaaaaataagtcaggaggatgcaattgttgaaagctttgaaataaaataacaatgtcttcttgaaatttgtgatggccaagaaagaaaatgatgatgacattaggcttctaaaggacatacatttaatatttctgtggaaatatgaggaaaatccatggttatctgagataggagatacaaactttgtaattctaataatgcactcagtttactctctccctctactaatttcctgctgaaaataacacaacaaaaatgtaacaggggaaattatataccgtgactgaaaactagagtcctacttacatagttgaaatatcaaggaggtcagaagaaaattggactggtgaaaacagaaaaaacactccagtctgccatatcaccacacaataggatcccccttcttgccctccacccccataagattgtgaagggtttactgctccttccatctgcctgaccccttcactatgactacacagaatctcctgatagtaaagggggctggaggcaaggataagttatagagcagttggaggaagcatccaaagattgcaacccagggcaaatggaaaacaggagatcctaatatgaaagaaaaatggatcccaatctgagaaaaggcaaaagaatggctacttttttctatgctggagtattttctaataatcctgcttgacccttatctgacctctttggaaactataacatagctgtcacagtatagtcacaatccacaaatgatgcaggtgcaaatggtttatagccctgtgaagttcttaaagtttagaggctaacttacagaaatgaataagttgttttgttttatagcccggtagaggagttaaccccaaaggtgatatggttttatttcctgttatgtttaacttgataatcttattttggcattcttttcccattgactatatacatctctatttctcaaatgttcatggaactagctcttttattttcctgctggtttcttcagtaatgagttaaataaaacattgacacatacaaacaaaaaaaaaaaaaaa

SEQ ID NO: 3350 - DNA, 2330 bp, Homo Sapiens
  NM_019886
gcgccgtcagtagcaccaccgccttccaagtttccccttgtggatgcgcggccccgcggctctgctcctcccggcgcagaggggccgggagaggccacaggagcggacctggcacgggatttctgaggaacgggagaagactggcgcccgacccgctctggagggtcggtgaacgatgaagggccggcggcggcgacgccgagagtactgcaagttcgcgctgctgttggtgctgtacacgctggtgctgttgctcgtcccctccgtattggacggcggccgcgacggggacaagggcgccgagcactgccccggcctgcagcgcagcctgggagtgtggagcctggaggcggcggcggccggcgaacgcgagcagggagcggaggcgcgggccgccgaggaagggggcgcgaaccagtctcctcggttcccaagcaacctcagcggcgctgtcggggaggcagtgtctcgcgagaagcagcacatctacgtgcatgccacctggcgcaccggctcgtccttcctgggcgaactctttaaccagcacccggacgttttctacttgtatgagcccatgtggcatctatggcaggcgctgtatccgggcgacgccgagagcttgcagggcgcgctgcgcgacatgctgcgttcgctcttccgctgcgacttctccgtgctgcggctgtacgcgccgccgggggaccccgctgcgcgcgccccggacacggccaatcttaccacggccgccctcttccgctggcggactaacaaggtcatctgctcgccgccactgtgtcctggcgcaccccgtgcccgggccgaggtgggcctcgtcgaggacaccgcctgcgagcgcagctgcccacccgtggcgatacgcgccctggaggccgagtgccgaaagtacccggtggtggtcatcaaggacgtgcgcctgctcgatctgggcgtgctggtgcccctgttgcgtgatccaggcctcaacctgaaggtggtgcagcttttccgcgacccgagggcggtgcacaactcgcgcctcaagtctaggcagggactgctgcgcgagagcatccaggtgctgcgcacccgccagaggggcgaccgcttccaccgtgtgctgctggcgcacggcgtgggtgctcgccccgggggccagtctcgcgcgctgcccgccgcgccgcgcgccgatttcttcctgaccggtgcgctcgaggtgatctgcgaagcctggctgcgcgatctgcttttcgcgcgcggcgcgcccgcctggctgcggcgccgctacctgaggctgcgctatgaggacctggtgcggcagccacgcgcccagctgcgccgcctgctgcgcttctccgggctacgcgcgctcgcagcgctcgatgccttcgcgctcaacatgactcgcggcgcggcctacggcgccgaccggcccttccacctgtcagcgcgcgacgcccgggaggcggtgcacgcctggcgcgagcgcctgagccgagagcaggtgcgccaggtggaggccgcctgcgctccagccatgcgtctgctcgcctaccctcgcagcggagaggagggcgacgcggagcagcccagggaaggggagacgccgctggagatggatgccgacggcgccacgtagcctcccatccctgtccccggcacggatccgggtcagtcaccacgaacaggggcactcggcatgctgccccagcactggagaagcagcgctgtgggggcaatctgtcacactctcagagtctgggacttgacttgctaccaacaactgctgtgcaattctgctgagcaggaatatcatgagctgttcaataatgacggacgcattggttgagatgaagtttccagtaaggaagtgacagtgcaatgtggatatttatggctgtaaaataggaagagctttagttcccaggctgaacctgccactgctggagccatttcaacaaggcatcctcacaacaaagaagagatgtgatttggtaccatttcacaccagcaggtgtctggacgaaaacatcaatgtgaataagggccaagtgcagtcctgtcttgattaaattacttaataatattattaaataataataggtctgggcagtattgtttttaacctgactcatccagctgtccttcaaatagctccgtctccctctacccagaactgatttttaaaaagaagtaatttttctccctgggctgggaaaaccctaatgaactgaaacacacttttactttaaaatttttctgtctggcgtttttgtaatcatactattaaatgactctggagtcatgttaatgaaaaaaaaaaaaaaaaaaaa

SEQ ID NO: 3351 - DNA, 2265 bp, Homo Sapiens
  NM_019887
acgcggaggttgtaattggtctctagaccacacctagttgttgagtgccgctgcttgaaaatctcagttctgccgagatcgcagaatacacacaagctacctttgggcaccagagcagacagaaccgcggagcttcagggtggaagattcgtggaaactttgccaaggccaggacctcgtgtgttcccgtccgcccctctgggacggcgccagcccggcaggccgccgaccgtcctggggctcccgcgcagcgcgatgccggcctcgtccaccgtccacgtgctgcagctgctgcgggagctgctcgccttcgtgctcctcagctacacggtgctcatcggggcgctgctgctggccggctggaccacttacttcctggtgctgaagtgacagcgccgtcgccgcgcccggccccgcctcccgcccggccccgcctcccgcccggccccgcctccctaactcaccaggaaattcccttcaagccctggcccgaactgagtccccgcccacccgccagcgtcacggcgcccgactcagctccgcgccggacccacctccgcgccctcaggccctgcatatgccccgccccgcgcggaagttccggcggttggttgccttgcgcggccgttacagcctttgccctaagcctcgccccctttccccctgcctgcccaatcccgactgcttccttgggtgggggcgtggctatggggcgaggcgctctcaggtggaggccgtgccccgctccgcgctcacgaagctgcgtcacttccggcgtgtgcgtctggcgtccgcgcgctgcacaatggcggctctgaagagttggctgtcgcgcagcgtaacttcattcttcaggtacagacagtgtttgtgtgttcctgttgtggctaactttaagaagcggtgtttctcagaattgataagaccatggcacaaaactgtgacgattggctttggagtaaccctgtgtgcggttcctattgcacagaaatcagagcctcattcccttagtagtgaagcattgatgaggagagcagtgtctttggtaacagatagcacctctacctttctctctcagaccacatatgcgttgattgaagctattactgaatatactaaggctgtttataccttaacttctctttaccgacaatatacaagtttacttgggaaaatgaattcagaggaggaagatgaagtgtggcaggtgatcataggagccagagctgagatgacttcaaaacaccaagagtacttgaagctggaaaccacttggatgactgcagttggtctttcagagatggcagcagaagctgcatatcaaactggcgcagatcaggcctctataaccgccaggaatcacattcagctggtgaaactgcaggtggaagaggtgcaccagctctcccggaaagcagaaaccaagctggcagaagcacagatagaagagctccgtcagaaaacacaggaggaaggggaggagcgggctgagtcggagcaggaggcctacctgcgtgaggattgagggcctgagcacactgccctgtctccccactcagtggggaaagcaggggcagatgccaccctgcccagggttggcatgactgtctgtgcaccgagaagaggcggcagatcctgccctggccaatcaggcgagacgcctttgtgagctgtgagtgcctcctgtggtctcaggcttgcgctggacctggttcttagcccttgggcactgcaccctgtttaacatttcaccccactctgtacagctgctcttacccattttttttacctcacacccaaagcattttgcctacctgggtcagagagaggagtcctttttgtcatgcccttaagttcagcaactgtttaacctgttttcagtcttatttacgtcgtcaaaaatgatttagtacttgttccctctgttgggatgccagttgtggcagggggaggggaacctgtccagtttgtacgatttctttgtatgtatttctgatgtgttctctgatctgcccccactgtcctgtgaggacagctgaggccaaggagtgaaaaacctattactactaagagaaggggtgcagagtgtttacctggtgctctcaacaggacttaacatcaacaggacttaacacaggcctcttgttccttcctttctttccgtttctctattgtatccaaaggagaagagtgtaagattttgtttgcatctgaaagagaaaatgcgtctctcctggggtcctaaaaaaaaaaaaaaaaaaaaaa

SEQ ID NO: 3352 - DNA, 3440 bp, Homo Sapiens
  NM_019892
ctgggcggccgggcctccgcgagtaccgggtcgacttcggagtctgcgagcccagccaggggtgcccgcttcccacccctctccccgagcggcgtccccgtcggggtcgaacctcccccgcgacaggcgcccagccgcctgttcccccaggccttgcctgcggaccgccctgggaacggcgtctgggagccccgaggggctggcgggactcggggcccgggccatgcggcagccgcccccgcccctccgcgaccatccccggcccaagcgggagccgcagcggcgtttctgctcctcgctgcgccggcgaccccggacccggcacccgtgacccctcgcgctgcctgcggcctcgcgccgaggcctgccccgggagagaccgtccatgccgtccaaggcggagaatctgcggccctccgagccggccccgcagccgccggaagggaggacgctccaaggacagcttcccggcgctccgccggcccagcgcgcggggtccccacccgatgctccgggctccgagagccccgcgcttgcctgcagcactccggccacgcccagcggcgaggacccgccagcccgagcagcacccatcgccccgcggccccccgccaggcctcgactggagcgagccctgtccctggacgacaagggctggaggaggaggcgttttcgaggcagccaggaggacctggaagcccggaatgggaccagtccctccaggggctcagtgcagagcgagggccccggggcccccgcccacagctgctccccgccctgcctgagcacctccttgcaggaaatccccaagtcccgcggggtcctgagcagtgagagagggagcccgtcctcggggggtaaccctctctctggggtggccagcagctccccgaacctcccgcacagagacgccgccgtggcggggagctcgcccaggctgcccagcctgctgcccccgcgcccaccgcctgccctgagcctggacatcgcctccgactccctgaggacagcaaacaaggtcgactcggatcttgcagactacaagctccgcgcgcagccgctcctggtgcgggcccacagcagcctgggccccggccggccgcggagccccctggcctgcgacgactgttcccttcgctcggccaaatcctccttcagcctcctggcgcccatccgcagcaaggacgtccgcagcaggagttacctggagggcagcctcctggccagcggggccctgttgggggcggatgagctggcccgctacttcccagaccggaacgtggcactcttcgtggccacctggaacatgcagggccagaaggagctcccgcccagcctggacgagttcctgctcccagccgaggccgactatgcccaggacctgtatgtcatcggggtccaggagggctgttctgacaggcgggagtgggagactcgtctgcaggagacgctgggcccgcactatgtgctgctgtcctcggcggcccacggcgtgctctacatgtcgctcttcatccgcagggacctcatctggttctgctcagaggtggagtgctccacggtgaccacacgcatcgtgtctcagatcaagaccaagggggccttgggcatcagcttcaccttttttggcacttccttcctcttcatcacgtcccacttcacctcaggtgacgggaaggtggcggagcggctgctggactacaccaggactgtacaagccctggtcctgcccagaaatgtgcccgacaccaacccctatcgctccagcgcagcggacgtcaccacccgcttcgatgaggtgttctggtttggagacttcaacttccgcctgagtggcgggcgcacagtcgtggacgccctcctgtgccagggcctggtggtggacgtgccggcgctgctgcagcacgaccagctcatccgggagatgcggaaagggtccatcttcaagggcttccaggagccggacatccacttcctcccatcatacaagtttgacatcgggaaggacacgtacgacagcacctccaagcagaggacgccctcatacacggaccgcgtcttgtacagaagccgccacaagggtgacatctgtcctgtgagctactcttcctgccccgggatcaagacgtccgaccaccgccctgtgtatggcctcttccgggtgaaagtgaggccggggcgagacaacattccgttggcagctggcaaatttgatagagaactgtacttactaggaattaaaagacggatttcgaaggagattcagaggcagcaagcactacagagtcagaactccagcaccatctgctccgtttcttgaagtttgctgaacgaggactcacagctgcaacgtggggtgattgtattgatcaaaacccactgggaaggacaaagagtttgccgcctttcggggatccgagggactgtggcgaccgtgcctctgtgccagcgtcccaggaaggaagccaaccctgagcgagcctgtcctctgtggcaggtccacacggtgtgggtgggcagggcttggacccccgtctccatggcaggtccatacagcatgggtggcagggtttggacccgcccagcagcaccacggaccccagccactctcgggggcagacgtcagaatccgttcctgagcagctcctgtgccctgggggcagtcacagagccccccaacacccccgtgctctgcaccagcctctccctccacacccgaagcaggcgtccatctgtgtcctcctggcagcccctcaaacacacaccaccccatgtcacacgggtatccagagcaaggctggatctgggctaggtgacccctggggcctcagacctctgagtgggccccagagcccagctgaggaagccacacagcctccaggacgtggcacggttcccctccacttggctgcaagtcgcctgccatggggcgaggaggcctgcaccccagtataagggcctccccagctgagtaagaagctgcttcccctcctctcataggccaagcctattgtgtgaaaccatctcatggtcttggtgacgtagaccatttttgaaaccgtctcatggtcttggtgacgtagaccgtttgcttctttaactccagccgcggaatgacattagtggaaccgggctagggaactgctggaagttcaggatgccaccaccttgaacacctaggccagggatccccaccatgtcccgggtttctttcttcgagagtatagaaccgttcattcttgctttgtgtcccattccatctcttgaaaaaatgtagtctttgaatgtgtgaaaatctagggacattcaatctagtcttttaaattatttttccatatttatatttttaaataaatgcatatattgagtcttaaaaaaaaaaaaaaaaaaaaaaaaaaaaaaaaaaaaaaaaaaaaaaaaaaaaaaaaaaaaaaaaaaaa

SEQ ID NO: 3353 - DNA, 6369 bp, Homo Sapiens
  NM_019900
ccaggcggcgttgcggccccggccccggctccctgcgccgccgccgccgccgccgccagcgctagcgccagcagccgggcccgatcacccgccgcccggtgcccgccgccgcccgcgccagcaaccgggcccgatcacccgccgcccggtgcccgccgccgcccgcgccaccggcatggcgctccggggcttctgcagcgccgatggctccgacccgctctgggactggaatgtcacgtggaataccagcaaccccgacttcaccaagtgctttcagaacacggtcctcgtgtgggtgccttgtttttacctctgggcctgtttccccttctacttcctctatctctcccgacatgaccgaggctacattcagatgacacctctcaacaaaaccaaaactgccttgggatttttgctgtggatcgtctgctgggcagacctcttctactctttctgggaaagaagtcggggcatattcctggccccagtgtttctggtcagcccaactctcttgggcatcaccatgctgcttgctacctttttaattcagctggagaggaggaagggagttcagtcttcagggatcatgctcactttctggctggtagccctagtgtgtgccctagccatcctgagatccaaaattatgacagccttaaaagaggatgcccaggtggacctgtttcgtgacatcactttctacgtctacttttccctcttactcattcagctcgtcttgtcctgtttctcagatcgctcacccctgttctcggaaaccatccacgaccctaatccctgcccagagtccagcgcttccttcctgtcgaggatcaccttctggtggatcacagggttgattgtccggggctaccgccagcccctggagggcagtgacctctggtccttaaacaaggaggacacgtcggaacaagtcgtgcctgttttggtaaagaactggaagaaggaatgcgccaagactaggaagcagccggtgaaggttgtgtactcctccaaggatcctgcccagccgaaagagagttccaaggtggatgcgaatgaggaggtggaggctttgatcgtcaagtccccacagaaggagtggaacccctctctgtttaaggtgttatacaagacctttgggccctacttcctcatgagcttcttcttcaaggccatccacgacctgatgatgttttccgggccgcagatcttaaagttgctcatcaagttcgtgaatgacacgaaggccccagactggcagggctacttctacaccgtgctgctgtttgtcactgcctgcctgcagaccctcgtgctgcaccagtacttccacatctgcttcgtcagtggcatgaggatcaagaccgctgtcattggggctgtctatcggaaggccctggtgatcaccaattcagccagaaaatcctccacggtcggggagattgtcaacctcatgtctgtggacgctcagaggttcatggacttggccacgtacattaacatgatctggtcagcccccctgcaagtcatccttgctctctacctcctgtggctgaatctgggcccttccgtcctggctggagtggcggtgatggtcctcatggtgcccgtcaatgctgtgatggcgatgaagaccaagacgtatcaggtggcccacatgaagagcaaagacaatcggatcaagctgatgaacgaaattctcaatgggatcaaagtgctaaagctttatgcctgggagctggcattcaaggacaaggtgctggccatcaggcaggaggagctgaaggtgctgaagaagtctgcctacctgtcagccgtgggcaccttcacctgggtctgcacgccctttctggtggccttgtgcacatttgccgtctacgtgaccattgacgagaacaacatcctggatgcccagacagccttcgtgtctttggccttgttcaacatcctccggtttcccctgaacattctccccatggtcatcagcagcatcgtgcaggcgagtgtctccctcaaacgcctgaggatctttctctcccatgaggagctggaacctgacagcatcgagcgacggcctgtcaaagacggcgggggcacgaacagcatcaccgtgaggaatgccacattcacctgggccaggagcgaccctcccacactgaatggcatcaccttctccatccccgaaggtgctttggtggccgtggtgggccaggtgggctgcggaaagtcgtccctgctctcagccctcttggctgagatggacaaagtggaggggcacgtggctatcaagggctccgtggcctatgtgccacagcaggcctggattcagaatgattctctccgagaaaacatcctttttggatgtcagctggaggaaccatattacaggtccgtgatacaggcctgtgccctcctcccagacctggaaatcctgcccagtggggatcggacagagattggcgagaagggcgtgaacctgtctgggggccagaagcagcgcgtgagcctggcccgggccgtgtactccaacgctgacatttacctcttcgatgatcccctctcagcagtggatgcccatgtgggaaaacacatctttgaaaatgtgattggccccaaggggatgctgaagaacaagacgcggatcttggtcacgcacagcatgagctacttgccgcaggtggacgtcatcatcgtcatgagtggcggcaagatctctgagatgggctcctaccaggagctgctggctcgagacggcgccttcgctgagttcctgcgtacctatgccagcacagagcaggagcaggatgcagaggagaacggggtcacgggcgtcagcggtccagggaaggaagcaaagcaaatggagaatggcatgctggtgacggacagtgcagggaagcaactgcagagacagctcagcagctcctcctcctatagtggggacatcagcaggcaccacaacagcaccgcagaactgcagaaagctgaggccaagaaggaggagacctggaagctgatggaggctgacaaggcgcagacagggcaggtcaagctttccgtgtactgggactacatgaaggccatcggactcttcatctccttcctcagcatcttccttttcatgtgtaaccatgtgtccgcgctggcttccaactattggctcagcctctggactgatgaccccatcgtcaacgggactcaggagcacacgaaagtccggctgagcgtctatggagccctgggcatttcacaagggatcgccgtgtttggctactccatggccgtgtccatcggggggatcttggcttcccgctgtctgcacgtggacctgctgcacagcatcctgcggtcacccatgagcttctttgagcggacccccagtgggaacctggtgaaccgcttctccaaggagctggacacagtggactccatgatcccggaggtcatcaagatgttcatgggctccctgttcaacgtcattggtgcctgcatcgttatcctgctggccacgcccatcgccgccatcatcatcccgccccttggcctcatctacttcttcgtccagaggttctacgtggcttcctcccggcagctgaagcgcctcgagtcggtcagccgctccccggtctattcccatttcaacgagaccttgctgggggtcagcgtcattcgagccttcgaggagcaggagcgcttcatccaccagagtgacctgaaggtggacgagaaccagaaggcctattaccccagcatcgtggccaacaggtggctggccgtgcggctggagtgtgtgggcaactgcatcgttctgtttgctgccctgtttgcggtgatctccaggcacagcctcagtgctggcttggtgggcctctcagtgtcttactcattgcaggtcaccacgtacttgaactggctggttcggatgtcatctgaaatggaaaccaacatcgtggccgtggagaggctcaaggagtattcagagactgagaaggaggcgccctggcaaatccaggagacagctccgcccagcagctggccccaggtgggccgagtggaattccggaactactgcctgcgctaccgagaggacctggacttcgttctcaggcacatcaatgtcacgatcaatgggggagaaaaggtcggcatcgtggggcggacgggagctgggaagtcgtccctgaccctgggcttatttcggatcaacgagtctgccgaaggagagatcatcatcgatggcatcaacatcgccaagatcggcctgcacgacctccgcttcaagatcaccatcatcccccaggaccctgttttgttttcgggttccctccgaatgaacctggacccattcagccagtactcggatgaagaagtctggacgtccctggagctggcccacctgaaggacttcgtgtcagcccttcctgacaagctagaccatgaatgtgcagaaggcggggagaacctcagggtgatcgtcttggacaaaggagaaatccaggagtacggcgccccatcggacctcctgcagcagagaggtcttttctacagcatggccaaagacgccggcttggtgtgagccccagagctggcatatctggtcagaactgcagggcctatatgccagcgcccagggaggagtcagtacccctggtaaaccaagcctcccacactgaaaccaaaacataaaaaccaaacccagacaaccaaaacatattcaaagcagcagccaccgccatccggtcccctgcctggaactggctgtgaagacccaggagagacagagatgcgaaccacccaaaacacgcacaccctgcccctggtgccctgagacagacacacagcctcacgcccccaggaatgcaagtggtttcctggtgcttcccacggaggagttttggcagccagacttctggaggaattggttgtatagaagatcctagtgaccaaattcagcctactgcctcggatctctccagccgaagtctgtggactgcaagtctttgagatgcttctggctcccatcacctctaacatccttgtctgggtctaccaggaacgcttcatttccttggggctgcagttttgtggttgaggggcctggagaaaatcattttctccccttggcagtgtcccagggccctggatggtcctcttaccaacatctggtcttccaggcactcaaaagctgggaaccagcatctcagcgccagctctaccagttctcgttttgggccagaggcagcctctgcactcccacgcctgtcctcctggaagggacctggttggactaacggctaacctggacctggaactgtagggccaggggattgtctcagggccgacgttccacctggggcttccctccccacccaccccgactccaggctttcccttttttcttttgttcaacattgtaagaacaatcaatgctgttattactgttcccaccatgattgatgtggggtaaatattaaggagatggcctcatgggaatttgaccttgactagaaatagagactgagagtgagcaaccagctggaaggtactatgccagtcctagcagaaaaatgtgttaggggcctggcccaaagcagtgttggttgcttacagtgttgattgattttgttcttttttcttaccacctcttttctttccctctcatggtacctgctcatggttatgaagctttcaaagtaaagaacacgaaatacctcccaagtattaccagtgggtaccaaaaaaatgtccccttgagtcttttccttgtttttagatgttaattctctcccttggcatccggttagccccccagggggggcagcattgtggagaacttgatatttagttactgatgctcttccaggacacgaaaagaacccatctttgaatatcaatgattttttttttttaagtactgttccggggagaaaaacagtctcaaaacttgaacttcttgggaatagaagtgttgggctgagaagtaacattcccaggaaatagtgagaagctcgccctgtgtttgaaaccgtgttggtctctgtgttcctggaagaaaacagggaagcagcatcttttaaagcctgttctttaaggtgtctcgttagagcccaaagtggaatccggaaggcagccagagctgaggctgccccaagactcagacttgctaagaattacgccgccgacttcaaacccagagagcatctttcttttaggcgaaaacgcatatatttattttttgtaagttataccattctttcacattagataaactaagttttgggggatccttttgtaatgacttacactggaaatgcgaacatttgcagtaaaaaaatatatatatatctatatattttatttctttctaaa

SEQ ID NO: 3354 - DNA, 2296 bp, Homo Sapiens
  NM_020062
cgcgtcctgagagtcagccctcgccgctgcagcctcggcgcccggccggccggccatggagcgccccccgccccgcgccgccggccgggaccccagtgcgctgcgggccgaggcgccgtggctgcgcgcggagggtccggggccgcgcgccgcgcccgtgacggtgcccacgccgccgcagggctcttccgtgggcggcggcttcgcgggcttggagttcgcgcggccgcaggagtcggagccgcgggcctcggacctgggggccccccggacgtggacgggggcggcggcggggccccggactccgtcggcgcacatccccgtcccagcgcagagagccaccccaggaaaagcccggctggacgaggtcatggctgccgctgcccttacaagcctgtccaccagccctctccttctgggggccccggttgcagccttcagcccagagcctggcctggagccctggaaggaggccctggtgcggcccccaggcagctacagcagcagcagcaacagtggagactggggatgggacctggccagtgaccagtcctctccgtccaccccgtcacccccactgccccccgaggcagcccactttctgtttggggagcccaccctgagaaaaaggaagagcccggcccaggtcatgttccagtgtctgtggaagagctgcgggaaggtgctgagcacggcgtcggcgatgcagagacacatccgcctggtgcacctggggaggcaggcagagcctgagcagagtgatggtgaggaggacttctactacacagagctggatgttggtgtggacacgctgaccgacgggctgtccagcctgactccagtgtcccccacggcctccatgccgcctgccttcccccgcctggagctgccagagctgctggagcccccagccctgcctagtcccctgcggccgcctgccccgcccctgcccccgccccctgtcctgagcaccgttgctaacccccagtcctgtcacagtgaccgtgtctaccagggctgcctgacgcccgcccgcctggagccgcagcccacggaggtcggagcctgcccacccgccttgtcctccaggatcggagtcaccctgaggaagccccgcggcgacgcgaagaagtgccggaaggtgtatggcatggagcgccgggacctctggtgcacagcctgccgctggaagaaagcctgccagcggttcctggactaagtccggctcgttcaagaacataagctaccaccttctccctccccaccccctccaggcccggggctgaaacagcccgaggacagccccaggggctggctttcaccagctgcagggtctgcttttacttggggtgggggggcggggctgaccctgaaccctcccccccgccaggtcggggaggggtcccaccactcaaagtgcctctaaagaaaccagctttttgcactaaagccaaaccacaccgctgtccccttagccccaagggccctgggggcagccaccctcccgcctgtcggcccgtagatttatcaagggtgttatgggcccagctttggggggccagtcccgatgcactttgaggggtgttggagaggggactcccccactcgcacttaactcaacggctctcgggccctggggctgtttttaccatgtttgtttttgaagctcaggtgtctcacgtctgggctgcaccaggcgaagagagaaattaaagatttgaggtttttccagaagctttgtctgcctctcgggaggaaggccgtggggctgggaccctgtggtgggcaagtgggtggagtctggcagctgcccacagagggccgagggtcacccgtcggccgccgccaccccaggcgaggccggaggaaggatcatctgagacgcaggaggcatctgctggagcagcaatttcccaatttattgaaagtgatcgctttgcaaggatgtctaagctaatcccgtcacagaaaggaaacgcacaggcgcctaggcagaaacttggagactcaccgcagaggccacgtgaacccacggccacagagaggcaggacggcagagccatgatttcccaccgagcgattacgagaacctcttcccccaatagtagacacatctccaatacaaacacaggtttataataagtaataggaagtcaatataatatagattatccccagaaaaaaatcaacaatcttcaaacactgccctttttttgtgtgttttgtttttgttgacaggttgaaagcatgttgaaaaaaataaatatttaagaaaagcaaaaaaaaaaaaaaaaaa

SEQ ID NO: 3355 - DNA, 4868 bp, Homo Sapiens
  NM_020117
agttagcgcctgctgggtgtctgctcgggtggtctgggaactacaattcccggcgggctgtgagatgccttggctgtagttagtaaggagccggatgattgcctcagcaggtgtgaagcgtgtgctttagtttcgtgggaggcctggcatccccgagagggaggggaaaggtaaccactcctttgtggaggtcgccagggtcattgtcgtggatttgcacagtcggctgggcggtgcaatggcggaaagaaaaggaacagccaaagtggactttttgaagaagattgagaaagaaatccaacagaaatgggatactgagagagtgtttgaggtcaatgcatctaatttagagaaacagaccagcaagggcaagtattttgtaaccttcccatatccatatatgaatggacgccttcatttgggacacacgttttctttatccaaatgtgagtttgctgtagggtaccagcgattgaaaggaaaatgttgtctgtttccctttggcctgcactgtactggaatgcctattaaggcatgtgctgataagttgaaaagagaaatagagctgtatggttgcccccctgattttccagatgaagaagaggaagaggaagaaaccagtgttaaaacagaagatataataattaaggataaagctaaaggaaaaaagagtaaagctgctgctaaagctggatcttctaaataccagtggggcattatgaaatcccttggcctgtctgatgaagagatagtaaaattttctgaagcagaacattggcttgattatttcccgccactggctattcaggatttaaaaagaatgggtttgaaggtagactggcgtcgttccttcatcaccactgatgttaatccttactatgattcatttgtcagatggcaatttttaacattaagagaaagaaacaaaattaaatttgggaagcggtatacaatttactctccgaaagatggacagccttgcatggatcatgatagacaaactggagagggtgttggacctcaggaatatactttactcaaattgaaggtgcttgagccatacccatctaaattaagtggcctgaaaggtaaaaatattttcttggtggctgctactctcagacctgagaccatgtttgggcagacaaattgttgggttcgtcctgatatgaagtacattggatttgagacggtgaatggtgatatattcatctgtacccaaaaagcagccaggaatatgtcataccagggctttaccaaagacaatggcgtggtgcctgttgttaaggaattaatgggggaggaaattcttggtgcatcactttctgcacctttaacatcatacaaggtgatctatgttctcccaatgctaactattaaggaggataaaggcactggtgtggttacaagtgttccttccgactcccctgatgatattgctgccctcagagacttgaagaaaaagcaagccttacgagcaaaatatggaattagagatgacatggtcttgccatttgagccggtgccagtcattgaaatcccaggttttggaaatctttctgctgtaaccatttgtgatgagttgaaaattcagagccagaatgaccgggaaaaacttgcagaagcaaaggagaagatatatctaaaaggattttatgagggtatcatgttggtggatggatttaaaggacagaaggttcaagatgtaaagaagactattcagaaaaagatgattgacgctggagatgcacttatttacatggaaccagagaaacaagtgatgtccaggtcgtcagatgaatgtgttgtggctctgtgtgaccagtggtacttggattatggagaagagaattggaagaaacagacatctcagtgcttgaagaacctggaaacattctgtgaggagaccaggaggaattttgaagccaccttaggttggctacaagaacatgcttgctcaagaacttatggtctaggcactcacctgccttgggatgagcagtggctgattgaatcactttctgactccactatttacatggcattttacacagttgcacacctattgcaggggggtaacttgcatggacaggcagagtctccgctgggcattagaccgcaacagatgaccaaggaagtttgggattatgttttcttcaaggaggctccatttcctaagactcagattgcaaaggaaaaattagatcagttaaagcaggagtttgaattctggtatcctgttgatcttcgcgtctctggcaaggatcttgttccaaatcatctttcatattacctttataatcatgtggctatgtggccggaacaaagtgacaaatggcctacagctgtgagagcaaatggacatctcctcctgaactctgagaagatgtcaaaatccacaggcaacttcctcactttgacccaagctattgacaaattttcagcagatggaatgcgtttggctctggctgatgctggtgacactgtagaagatgccaactttgtggaagccatggcagatgcaggtattctccgtctgtacacctgggtagagtgggtgaaagaaatggttgccaactgggacagcctaagaagtggtcctgccagcactttcaatgatagagtttttgccagtgaattgaatgcaggaattataaaaacagatcaaaactatgaaaagatgatgtttaaagaagctttgaaaacagggttttttgagtttcaggccgcaaaagataagtaccgtgaattggctgtggaagggatgcacagagaacttgtgttccggtttattgaagttcagacacttctcctcgctccattctgtccacatttgtgtgagcacatctggacactcctgggaaagcctgactcaattatgaatgcttcatggcctgtggcaggtcctgttaatgaagttttaatacactcctcacagtatcttatggaagtaacacatgaccttagactacgactcaagaactatatgatgccagctaaagggaagaagactgacaaacaacccctgcagaagccctcacattgcaccatctatgtggcaaagaactatccaccttggcaacataccaccctgtctgttctacgtaaacactttgaggccaataacggaaaactgcctgacaacaaagtcattgctagtgaactaggcagtatgccagaactgaagaaatacatgaagaaagtcatgccatttgttgccatgattaaggaaaatctggagaagatggggcctcgtattctggatttgcaattagaatttgatgaaaaggctgtgcttatggagaatatagtctatctgactaattcgcttgagctagaacacatagaagtcaagtttgcctccgaagcagaagataaaatcagggaagactgctgtcctgggaaaccacttaatgtttttagaatagaacctggtgtgtccgtttctctggtgaatccccagccatccaatggccacttctcaaccaaaattgaaatcaggcaaggagataactgtgattccataatcaggcgtttaatgaaaatgaatcgaggaattaaagacctttccaaagtgaaactgatgagatttgatgatccactgttggggcctcgacgagttcctgtcctgggaaaggagtacaccgagaagacccccatttctgagcatgctgttttcaatgtggacctcatgagcaagaaaattcatctgactgagaatgggataagggtggatattggcgatacaataatctatctggttcattaaactcatgcacattggagatttatcctggtttcttaggaatactactactctgattgtgtctactgattggctatcagaaccttaggctggacctaaatagattgatttcatttctaaccatccaattctgcatgtattcataattctatcaagtcatctttgattcctggacctaataaattttttttccctttctttgggtgtccaagagaaatggtttttgccaaactctttttaaaaaacaaattgttgctatttcctagaagtttctggtttttaagatgaacataaaagtgtcagtatgcttcttttatgaggtgtactttatactttgatgaaggctaaggtgtacctaacagctttttatagtatattcatttatggagttagctgtatttttttttaaaaaagaaaagtagtaaattagcagcttttttttttaaatgaagagaacttcatgatgatttaaaagaactaatgagaatattttgacttgacttcaattactaagtattttgtataaagaacaaataggtcctgcattttataagactttttaaagctttaattattcaactaagaaccaataatggcttcttcaaggctaatatcaatagtttataagcagtatatttcacctacactaaatatgggcattttaaaagaagattccccccttcccccccagaaatctgcatttactaaatttgtcttaagtccaattgtgtttaaaggtcatgctggtcgggtgtggtggctcacacctataatcccagcactttgggaggccaaggtgggcagtcacctgaggtcaggagtttgagaccagcctgaccaacatggtgaaaccccgtctctactaaaaatacaaaaattagcttggcatggtggcgggtacctgtaatcccagctgcttgggagtgtgaggcaggagaatcgcttgaacctgggagaccgaggttgcagtgagctgaaaccgtgccattgcactccagcttaggcaacaagagtgaaactctgtctcaatcaatccatcaatcaatcaataaaatagaggtcatgctgactattacagatttaaaaaaaaaaaaaaaaaaaa

SEQ ID NO: 3356 - DNA, 7555 bp, Homo Sapiens
  NM_020122
ggggaggggaggagcgggatttgcggagcgccgcgccgctgccgggagccggcaggcccgagagtgaccggagtcacggcgggcgccggcggagctgcggcgtcggacccgcctcctggaggagctcagccccgaccaggcccggccccattcccgccccgcgccgcctccccgccgccgccgccgccgccgccgcgggagcgctcccctgcccaccccgcccccgcggccgagcccgggagtcgagtgggagtcggccggccggcgcgggcagcgccgggaccccgcgggggacactgcagccggagcccgggaggggccgcgccgccaccgtctgaactaggatgtcccgacatgaaggtgtcagctgtgatgcatgtttaaaaggaaattttcgaggtcgcagatataagtgtttaatttgctacgattacgatctttgtgcatcttgttatgaaagtggtgcaacaacaacaaggcatacaactgaccacccaatgcagtgcatattaacaagggtagattttgatttatactatggtggggaagctttctctgtagagcagccacagtcttttacttgtccctattgtggaaaaatgggctatacggagacatctcttcaagaacatgttacttctgaacatgcagaaacatcaacagaagtgatttgtccaatatgtgcagcgttacctggaggcgatcctaatcatgtcacggatgactttgcagctcatcttacacttgaacacagagcccctagagatttagatgaatcgagtggtgttcgacatgtacgtagaatgtttcaccctggccggggattaggaggtcctcgtgctcgtagatcaaacatgcactttactagcagttctactggtggactttcttcttctcagagttcatattctccaagcaatagggaagccatggatcctatagctgagcttttatctcagttatcaggagtgagacgttctgcaggaggacagcttaattcctctggcccttccgcttctcagttacaacaactgcagatgcagctgcagctagaacggcagcatgcccaggcagcacggcaacaactggagaccgcacgcaacgcaacccggcgtactaacacaagcagtgtcaccactacaatcacacaatccacagcaacaaccaacatagctaatacagaaagcagtcagcagactctacagaattcccagtttcttttaacaaggttgaatgatcctaaaatgtctgaaacggagcgccagtccatggaaagcgagcgtgcagaccgcagcctgtttgtccaagagctccttctgtccactttagtgcgtgaagagagctcatcctcagatgaggatgatcggggggagatggcagattttggtgctatgggctgtgtagatattatgcctttagatgttgctttagaaaacctaaatttaaaagagagtaataaaggaaatgagcctccaccacctcctctttgatgacatcccaattcgcagacaatgtcctctgtgctgtatttgccaatgaaagtggacaacaactatcttgggtttgtttggtgattgtaatttcaggtctgtcactcttgttacattgtgtacattcaaaaggaagagagaaaatatatatgataatcatttccacttaactaatttttacttctagcaggtaaatgtaggtagcagtgcaggggtgatctctgcttcctgtaccttgacatgcaaaaggctctcctaatactccacattcaaactgaagaggaaaattgaaatctctaatgaagctgctgtgtgtatttatgaatattaatgaataaaaactgcttggatggtttaccttaactactgcatgaggttttttgcagcgtgcatgagttttagtgaccttgttatttaagaagttaaatacaaggagtaaaacttaaaaaaaaaatacaaagcccaaagctttcccaaacattattcaatggttacacgacgaagtagcttttgaataatgtctgcctgaatcacctttctttgtgtgcctcctacgcacaaagccagctctgcagtggaatctggggattatagccgggtgtggcactccgccctgtgtgactgtcctgtcgccctgttagtcatcttgcctgtgtggagctcagcctgtctctttaactcatctgtagaagacacaccagtaaagctactgttggaatctgctgcaggggcctttgtgtgccctaaaaacaaatcctgttcatgtttgtttaaagtttttactttttgtggttgtttaaaattttttcaattgttaaatatgttttattcaggtgtagatgaatttcatttattgactgttcaacagagttaacctgaattatgttgtctttgtttttaaaaatctcacattctcaatcatattttgcattatttatgtatttgctttgtagtttgctgagacagatcagtatcaggggagctttgaggatttgccttcccagatttgtcagtatattacaaccaaattcttaatgctaattttagcaccttttatttattgggttttttctggcataaaaagtaaagccttttaattgaatcatgccacctatatgcctatattattaatcctatgtgtaaaaaaaatgtacagctttttttgggtttgttttggggtttggaagggccgggttattttttatttcctgtttcagtttttgtgcatagactttcacaatagctccaaggcagggacagcgggtttgggggttgggagggcagtttttggaatgtaaatttaggacttttaaaaaggtgcgcacagcttctgataaatttataactagacttaacctaatcatgtctcgttccagttctcttttctctgagcccttttcaaagtctcctctctttctcctgtcatccttttcctttcctgtccgtgtatctccgtttcttcaacatgacaagcatacagacttgaacacccctccggtgttcttccgagaactgtgaagtccatgttcatccaaatgtaaccaaaaaagaagtcaccctacatgtctgaaaaactgttgcttctcctctgaaacttcaaactccaacgatttccaaatacaatagctttgttttctttagttctgtaatggataatgtttaaaggaaaactttacaccaggcttctggttacactagaagtcaagcccattagggattttcattttttttcatttggttgttgagaagtttcaaaaatcagttttcaagctgtggtctttcaaacacatctgcacataagtcacacatttcaataaagcattttcaagactgttgaccacttgaatttctttggtgttagtggattaacctaaccattactctgagattttatatctctaatccagtattttttttctttttatgctaaacatgggagatcctggttttgtgtgaatgcattattttggatgtgagaaataaatgccaattatatgtactttcccttttctgcacaaattctgggaaaatgtaaaagccttcattttttaacatggttttagggaacaactgtaagtccattcagagcagtttaatttagatgatcacttttaacactgcagaagacctaaggagtcataagattccatctcatgtagaatactgtatattaattattttttaccagatattttacaaatacctcacctcatcctgtatgtaatcaataatgtattattttagggtagaacgacacagaatatcaatataaaaatatattcaagcccttgaaattcttgtgtcctttttctttagtttctgaatgaaaatcttattactggatgtactattgaataaaaattaattgcaaagactttgatggagacaaaatcaaaatataccactgtttattttggcagcaccttcaaatttctaaggaccagatcctgaattttgagaattttttgtttcgttgagttttgagtgtctaggatataagtttataaatgttctacagtgcttgtctttacttcctgtttagaaatcatttaaatctttcccctcgaggtgctctggaagaagtttaatttcagctctgaacaagtagaaataactgtgcttccttgtatggctgcaatcataagacagaatttctgtggttggctaccgtgaaatctttgtatttatattgcattgttttgttaaaaaaaaaaaaatccacagaagtagaacctaggtttgctactaacaaagtagtggattcttataattaggctcaggtaaagtaagagaaaacttctctccctgtggcccccagagaaatgaagtaggatagcagattacactattagaaataatagacgtaacaaaaaaaatccagcccattatccccaccccccattttccctctcaatattagaaatttcaataatatgctgacagattttcaaaggtcaccaaggcttttgtgtttttttccggtctgtgggccacagttaaaagaacgggtaacaggttcagagttctcttgatacgtccaagccttagtttccaggaaaaaagctaggctcctcactgcaaatattaacgctttatatatttactccatggatgttggggtaagcacatatatcaatagttcatagctctagttaaggacaaagtgggttggggggtagaaggagaatactagagaggttacggtagcaggtggctgcagaaaagaatcttttgaatgggattcctgtaacagtgttcagtaccaatattaagtctactgtaagtggggtctgatatggcttactgatacaggcatgtgtaaaaaactaagtgtgatggaggaatgggtgctaaaagctcttaacagttttgtagagaagccctgcagccgtgtttactatatatgacatgcctgtttcttagtttgcatgcacagtttaaggggcacatgcaatattggtttcatgtgcagtaaaaattaaaacacggctgagcgtggtggctcacgcctgtaatcccagcactttgcgaggccgaggcgggtggatcacgaggtcgagtttgagaccattttggccagcatagtgaaaccccatctctactaaaaaatacaaaaagttagctgggcatggtggcaggcacctgtaatcccagctactcgggaggctgaggcaggagaatcgcttgaacctgggaggcagaggttgcagtgagctgagatcacgccgccattgcactccagcccgggcgacggtgcaagactctgtctcaaaaaaaaaaaaaattaaaacactaggtacgaaattatcccagaattatacgcgaaagttggtgttcatgctggaaaacagttacggttatctgtgctctttctaaagctcaactagacactaaaacagttctctccttgagaccggaagtgggatgggggtgggcaggtggaagggaagaggctggggaggagcctctcatctcatctcatttcagcctcaacagtaattgaaaccctatgcctggcctggagtgggtagaggttagggttagagtgcaggatggagcagcagtctgcagactttcaggttgtgacgatgtcatgaaattctgtgctattaaacatggctatgtctgagtcagtcattacggtattccaaagccaaattcaagtgactgtttttctgaatagtataaaaatctaattccctgtgcttatcggcttcaactgtgcttacacaacgtttgtttctaattcgtactcttgcctcttggtttctgtagtttttcaacccatttctgtcagtgttctataaatgcatacattcgttatttaaggaaccctgcagcagacctcgaataaaatgtgacttgatgtttgttgccacttcctcaacttggttagcaaattcaagttttgaaagacgattcgtctcagagaagttgatcctgaacctccacgtcacattttagtcggttgctattaggtgggtaatgcctaataacatgggttcctcaaatcacaaaggagaatgctctcaagtcctcatgttaactttagtaagtcagttaactttacagcaactaaagagatcaattaaaaagaacccttaagtctgactgtcccaggtaactttacttgctgtacagatagtgcacagatatggatgagggctgcacatggctgatttgaaaacccatgtggggccgggtgtggtggctcacgcctgtaatcccagcactttgggaggccaaggcgggtggatcacgaggttagttcaggaccagcctggccaagatggtgaaaccccatctctactaaaaatacgaaaattagctgggcttggtggcagatgcctgtaattcctgctactcgggaggctgaggcagagaattgcttgaacccgggaggcggaggttgcagtgagccgagattgcgccactgcactccagcctgggcgacacagtgagactctcctcaaaacaaaaaaaaaagaaagaaaacccatgtgggccgcatgtgcacagcctggggctgctttccacaggcctggataatgatgtttctcttcaaggaggcctttactaaccacagggaacctagcatctgactgtgtccttggcagacagtgcatgtagcctgtagaatgttggctcctctgtctatagaaaccatcagttcgctgctctctcattcatacatactttttgagttcccagtaggtacgaagctttgtctaaacattatttaccaactgcgatttttacagacttcccctgtaagaattttctaaaagagcctttctcccttacacaattgaaacgttttcaaaggtcatcaagccggttgcgtttggtcagtcacgtgaccaatcagagctggtgagtgagctgctcccttaaatctaccaaattagactgacagcatttggaatctgcctcacacataagagatccatattcatttaatagtgaagccagcccagaagcatcctcttctgtaagctggatggagtcccagctctctctccttgtatataaggagaccacaccctgtatataaggttttcttgaggtagatgcagcaatattcctggggtaagattctataatactcctgtattggcaagtggactggaccaacagacacaggcctcagccactgtcgctagggactgaaggagagttcatggattcttaccccctagtcatgaaagctattctggccagccttgaatccatttaattttgcccacgagaacctttcatgacaattaacaagacactagtttccccataaaagtccatttttaaatatatagtatgctaattagcagtgtctgttgaattgccctatcggatagcagccaccatgtgtgctgaccactcacgattcagacttaccttggaaaatatcacactgacgatacagtactttagaataaattgcatattgtatcaggctccgagactaatttgtactgaacccttgatatagattaccttttataacatcaccacctgtcatgaagcttatctgttttctgatttgaataaactttgtgttgtgcaaa

SEQ ID NO: 3357 - DNA, 3012 bp, Homo Sapiens
  NM_020126
cgactgactagccgggcgataacggcagagagcatagagcgcaggaacaagcgcaacgtccaagagggaagggccagcacgtcgggggcctctctggccctacccaggccgtgttctcgatagctttccggaagaaagggatctgggagcgagatgcgtgtagctagcacgatgcgtcgcgcggtgacgctctggcccgacgccgacggcctctcagtggctcccggaggacccggcgggcccagtgttggagagctgaaggtcaggccaggacagtgagacctgactccttgctcctaccagcctactatggcttaagacccagggccagggtcccgttgatgtaacagagcagaggaccagcagatgaatggacaccttgaagcagaggagcagcaggaccagaggccagaccaggagctgaccgggagctggggccacgggcctaggagcaccctggtcagggctaaggccatggccccgcccccaccgccactggctgccagcaccccgctcctccatggcgagtttggctcctacccagcccgaggcccacgctttgccctcacccttacatcgcaggccctgcacatacagcggctgcgccccaaacctgaagccaggccccggggtggcctggtcccgttggccgaggtctcaggctgctgcaccctgcgaagccgcagcccctcagactcagcggcctacttctgcatctacacctaccctcggggccggcgcggggcccggcgcagagccactcgcaccttccgggcagatggggccgccacctacgaagagaaccgtgccgaggcccagcgctgggccactgccctcacctgtctgctccgaggactgccactgcccggggatggggagatcacccctgacctgctacctcggccgccccggttgcttctattggtcaatccctttgggggtcggggcctggcctggcagtggtgtaagaaccacgtgcttcccatgatctctgaagctgggctgtccttcaacctcatccagacagaacgacagaaccacgcccgggagctggtccaggggctgagcctgagtgagtgggatggcatcgtcacggtctcgggagacgggctgctccatgaggtgctgaacgggctcctagatcgccctgactgggaggaagctgtgaagatgcctgtgggcatcctcccctgcggctcgggcaacgcgctggccggagcagtgaaccagcacgggggatttgagccagccctgggcctcgacctgttgctcaactgctcactgttgctgtgccggggtggtggccacccactggacctgctctccgtgacgctggcctcgggctcccgctgtttctccttcctgtctgtggcctggggcttcgtgtcagatgtggatatccagagcgagcgcttcagggccttgggcagtgcccgcttcacactgggcacggtgctgggcctcgccacactgcacacctaccgcggacgcctctcctacctccccgccactgtggaacctgcctcgcccacccctgcccatagcctgcctcgtgccaagtcggagctgaccctaaccccagacccagccccgcccatggcccactcacccctgcatcgttctgtgtctgacctgcctcttcccctgccccagcctgccctggcctctcctggctcgccagaacccctgcccatcctgtccctcaacggtgggggcccagagctggctggggactggggtggggctggggatgctccgctgtccccggacccactgctgtcttcacctcctggctctcccaaggcagctctacactcacccgtctccgaaggggcccccgtaattcccccatcctctgggctcccacttcccacccctgatgcccgggtaggggcctccacctgcggcccgcccgaccacctgctgcctccgctgggcaccccgctgcccccagactgggtgacgctggagggggactttgtgctcatgttggccatctcgcccagccacctaggcgctgacctggtggcagctccgcatgcgcgcttcgacgacggcctggtgcacctgtgctgggtgcgtagcggcatctcgcgggctgcgctgctgcgccttttcttggccatggagcgtggtagccacttcagcctgggctgtccgcagctgggctacgccgcggcccgtgccttccgcctagagccgctcacaccacgcggcgtgctcacagtggacggggagcaggtggagtatgggccgctacaggcacagatgcaccctggcatcggtacactgctcactgggcctcctggctgcccggggcgggagccctgaaactaaacaagcttggtacccgccgggggcggggcctacattccaatggggcggagcctgagctagggggtgtggcctggctgctagagttgtggtggcaggggccctggccccgtctcaggattgcgctcgctttcatgggaccagacgtgatgctggaaggtgggcgtcgtcacggttaaagagaaatgggctcgtcccgagggtagtgcctgatcaatgagggcggggcctggcgtctgatctggggccgcccttacggggcagggctcagtcctgacgcttgccacctgctcctacccggccaggatggctgagggcggagtctattttacgcgtcgcccaatgacaggacctggaatgtactggctggggtaggcctcagtgagtcggccggtcagggcccgcagcctcgccccatccactccggtgcctccatttagctggccaatcagcccaggaggggcaggttccccggggccggcgctaggatttgcactaatgttcctctccccgcgggtgggggcggggaaattcatatcccctgttcgtctcatgcgcgtcctccgtccccaatctaaaaagcaattgaaaaggtctatgcaataaaggcagtcgcttcattcctctcaaaaaaaaaaaaaaaaaaaaaaaaaaaaaaaaaaaaaaaaaaaaaaaaaa

SEQ ID NO: 3358 - DNA, 3545 bp, Homo Sapiens
  NM_020131
gggcggccgggtggcggcggcggcatggcggagccgagcggggccgagacgaggccccccattcgggtcaccgtcaagacccccaaggacaaggaggaaattgtgatctgcgatcgagcctcggtcaaggagttcaaagaggaaatctcccggaggtttaaggctcagcaggatcagctggtcctgatcttcgcaggcaagatcctcaaggatggggacacactgaaccagcacggaatcaaggacgggctcactgtccatctggtcatcaagacccctcagaaggctcaagatccagctgctgccactgcttcttccccctccacacctgaccctgcctcagcaccctccaccacgcctgcttcacccgccacccctgcccagccctccacctctggcagtgcctcttcagatgctggcagtggaagccggaggagcagtggtggggggccctctccgggggctggggagggatcccccagtgctactgcgtccatactctctggctttgggggcatcctggggctgggcagcctaggcctgggctctgccaacttcatggagctgcagcagcagatgcagcggcagctgatgtccaatcctgagatgctgtcacagatcatggagaaccccctggtccaggatatgatgtctaaccctgatctgatgcgtcacatgattatggccaacccccagatgcagcagttgatggagcggaaccctgagatcagccacatgctcaataaccctgaactcatgaggcagacaatggagcttgctcggaatccagccatgatgcaagagatgatgcggaaccaggaccgggccctgagcaaccttgagagcatccctggagggtataatgccctccgccgcatgtacacggacatccaggagcccatgttcagtgctgcccgggaacagtttggcaacaatcccttctcttccctggccgggaactccgacagctcatcctcccagcctctgcggactgagaatcgagagcccctccctaacccctggagcccctcgccccccacctcccaggcccccgggtccggtggggagggcaccggaggatcggggaccagccaggtgcacccgacagtctcgaacccctttgggatcaatgcggctagcctggggtcagggatgttcaatagcccagaaatgcaagccctcctccagcagatctctgagaacccccagctgatgcagaatgtgatctcagcaccctacatgcgcagcatgatgcagacgcttgcccagaaccccgactttgctgctcagatgatggtgaatgtgccgctcttcgcggggaacccccaactgcaggagcagctccgcctgcagctcccagtcttcctgcagcagatgcagaacccagagtcactctccatccttaccaatccccgagccatgcaggcattgctgcagatccagcagggactacagaccttgcagaccgaggcccctgggctggtacccagccttggctcctttgggatatcccggaccccagcaccctcagcaggcagcaacgcagggtctacgcccgaggcccccacttcctcaccagccacgccagccacatcttctccaacaggggcttccagcgcccagcagcaactcatgcagcagatgatccagcttttggctggaagtggaaactcacaggtgcagacgccagaagtgagatttcagcagcagctggagcagctcaactccatgggcttcatcaatcgtgaggctaacctgcaggccctgattgccacaggaggggacatcaacgcagctatcgagagactgctgggctcccagctctcctaatccctcggcccatgcctcctgcctctcccctccctcgatgtcagcattcggttcttctgtcaatccttaccctctgcagcttgtcctcccttccgtcttctccctcatcctttccaaacagcagggtgactttagaggcatgggctccaaccccttagctctgtctgagaattatggttttactgctacgtctctaacagactcttctctcctggtctccttgagcagtgctacttaaacagttttcacagtttcattgattgactctacctccttgccccacaccacttttgcaatctttaaactttcagtggctgtgcagagtcgagggaggaaccagctctctggtttactggaacatagtcttccatctataccactagggttttgtcttatgtttacttttggtaactctcttccttctttttctccctaccccccaacccctagcccaaccaatgctagaatttcttgctctgaaggaggagcaggtgaaacaggtggtaattttccttctcggcccctattctggttcattcagcactttttggtgggaactgttggaaattccagggtaaggaggaagatgcctgttctccctgtctgaagagggagatgagacagctctctggacaggaattaacaaacgctggagcagcccagaggaaattcgtgtgaaagaggagggaatgagattattcggaggaagggaatgggggagacagcctgagtaaaaggcttggaagttggaattagcagtggggagcagaagcactcatagctcttttaggcagaagaatccaggcccgagctggcagaagagacttagagatgctaatggaatttaaactgaaaaaaggagcccaatgaagctaagcgccacgccccacaaggggtcatattggctttagttcctcaagcatatgtgcttatatgcacacacacacacatttccatggacccaggtcttgcttgtgtccccaggcaccagtagtttgagcccccctcaaaagacatgaagggggttggggtctgtgtgagtagtggggaggtgcatgtgtatccacatgtgtgcatacactcttaagttgggtgggaagtggattccttgttggtttctggttcagagtgctctcccaccaccagagacaagtgggtaaaaaggtcagtccattgcaggaatatatatccgggagagctaggtcccttggggctctggatgctgggtaacccagaggtaatgtgggtaccctttctgaagctgtcagggctgtgactagcacccttatcacccctcactgccttgtgggaatagtagagggtttttttcctccagagcccctggcctttcagttcttaactatttccctccaggccagaaagttttctttgaggaaggagaggagagggtggcaatgatgcctttgatctggaattggacatttctctgtcagagcacagaggaggctcatatcacctcttccctctcctacttggcccagctgcttggaggaccgaccccatggctgagaatatgacggcaagaggaacagagtttgctccaagtgggaaagggtcccaagcagtccagagaagatgtctgtgtggctttccctccctgcctcccccagctcccacactggcctttgtaaataaatggcgtggtctttgttgtgaaaaaaaaaaaaaaaaaaaaaaaaaaaaaaaaaaaaaaa

SEQ ID NO: 3359 - DNA, 2768 bp, Homo Sapiens
  NM_020141
ccggatcgggaagtgtcaagcgggcgctcccccatctccgccgctattaccactgaacccggaccccctacccaggtccagggccagccgccatgacgaacgtgtactccttggatgggattctggtgtttggtttgctctttgtttgcacctgtgcctacttcaagaaagtacctcgtctcaaaacctggctgctatcagagaagaagggtgtttggggtgtgttttacaaagccgctgtgattggaaccaggctgcatgctgctgtggcaattgcttgtgttgtaatggccttttacgtcctgtttataaaatgaattccaaagcacccaagtcatcaactgccaaccaaggggacggggatgaagaacctgttggagacctgaacccagtgtaggagagttcagctgaaatcatcggtccccaggatgacaccacagcatctgcccctgctatatgtggggaaaactcatggtcacgaacattatttatgcttcaggggactacagaaagccagcttcctttgatctatgtgtaaatcagtccttggcagagtgcatataatgtccggataaattacacccctcggtgataagattacatacctccttcataaaaacctgtcatcctgttttgttcttcagctcctcatcaggatcttttcaaactgaggctcattagggaaggaactaggctgtgttcagacttcttttgaagagagagaattttcaagacttcttttcactctttgatttggatctggcaaattggggaggggatgctgggtgggaaacagttatgaaatgccaagaaattctttggctttagaaatttatctttcatgtacccatccgggaacataaaagagaggcatagtgctcattgcaaaaagagaacagatgaagtagctgtgttatgtgctggtatcttgagagttttgccaagaaaatctgggcctacataaaatttgagaattatctgtgtgatgagaccagaaagcagtggcttagacaagaaaaaatctttctgttcaccagtatcctcaaatggagacttcacttgatcagatggtatatgaaaaatgaatcaactattgctatttcgtaaaacctttttatattttctaaatttacttagtgctaaatactgttactcagttttaaatgccacgactaggggaaaaagaaactattgaagaaataattgtttagtatatttgcagttggggtagaagaaagaaatctagtatattgattcatatactagtaaattcatctagtataagaacttgtgatgttagattgaagttttgtcatcttataaaagacaacaaacttattttctgtttaagtctgagtgttatggcaatttttagttgattacttatttttcttagccaaattttaattttcttcatattgcattgctctttagttgtctctggaaattctatttactttaaggacatgagaaattcaaatgagagaagttgctgatattcatcagtgtgtttggacagttcatagggtccacaaatcaaatgaggttgtttcctgaagtagaagaaaacagaactttgcaattgatactgaagtactttgccatggagttagtaactcctgagcagaccattttagatggctcagcatttggcaggaagacttctccattccctgcttatatctatggaaggatcagctgttggatgtctagaacttctctatttaaaaaaaaagagtaggtctaaaattaaattattataagcaagcatagacatgggtcttccagttgaattgtccattaccgtaaaacttaatggtggacaagttagctgtggttgattcctgtgtggcagtaaattgtcttctgtctgcttactccaaataataaaagctgctaggaagtttagattttgaaataggcagtttaatgctttgagggtttctagaaatacagaaagtcatcaagtaaacactgcatgtctaatcatctcagagttgtggctgttatctcttcaggaattggtccacagggtaaatttcaacaattcatacgttttccattgtcatttctgaggacctttgagatgagagaaaggaaatctagtggaacaggaaagagagttacaccttgtgggtgtgagtttgggacctgttggcagaagggaatgtcactccctggaaacaggttcagcatgtttgcacttgttattttgtagctttaatgatttttgttttctaatagggcaaatgtctctaagcttggtgtttagagctgcttcatattttaaactagttccattccacagttctagttcaaaccagtttttacagcctcctgggtgggtcgtcttgacccaaactcttgtgttgttacattttgagaggttttcataccagaatgtaccaaaaagtgcacaaggtaaaggtaatttacagccagaaacaaatatacatttgtttcatttcttgactttccctaagcagataagcagaaacttgtttaactcattactttgtttgatgtgtcttacatatttttgactaaaagttatagaatgttattcctctgggggaatcttttacaggtggaggaatggggatagcagtattgcctcagattcaaactggcatcaccataaaccctgtaggccagggtggaatgaagtcagctcctttttatagttgaaatacaattttttattcaccattgtctgcacaaatccttgaaaataaacctttttttccctaaaaaaaaaaaaaaaaaaa

SEQ ID NO: 3360 - DNA, 1994 bp, Homo Sapiens
  NM_020143
tggcttctgcgtggtgcagctgcgcacgtgtttcagccggcagcgctttaagatttccggggatggaatccgaaatggaaacgcagagcgccagggcagaggagggctttacccaggtcacccgcaagggtggccgacgggcgaagaaacgacaggctgaacagctgtccgcagcaggagagggcggggatgcgggccgcatggacacagaggaggccaggccggcgaagaggcccgtcttcccacccctctgtggggacgggctcctgagtgggaaagaagaaacaaggaaaattccagtcccagctaacagatacacaccattgaaagaaaactggatgaagatatttactcctattgtggaacatttgggacttcagatacgctttaacttgaaatcaaggaatgtagaaatcaggacttgtaaagaaaccaaggatgttagtgctctgacaaaagcagctgattttgtgaaagcttttattctcggctttcaggtggaggatgcacttgccctcatcaggttggatgacctcttcctagagtcttttgaaattacagatgttaaacccctaaagggagaccatctatccagggcaataggaagaatcgctggcaaaggaggaaaaaccaaattcaccatagagaatgtgacacggacaaggatagttttggctgatgtgaaagttcacatccttggctccttccaaaatatcaagatggcaagaactgccatttgcaacctaatcttgggaaatcctccttccaaggtttatggcaatattcgagctgtggctagcagatcagcagatcgattctgatttcaagtcagagactttttatcttgcctttggactctggtgaaaaatactttacagtggtcggtcacaagaaaccagctgaacaatttcagtcatttgaagcctccgtcccttcttccattctcagccagaagcataaacagaaaagaaagatttaagaggattcacactcaacaggttttaggataatttaaatatcaaaaattgattgttatacttaacacattaggtataatttatcatttatctgaaatcacatgtagcagattgcatagtctgtaatcctctcagagggaaacttcttgtttaaacagctctatatggatttatacttttatatttataaatttataacttcatacaaatttataaacatttctttataaattgtaatttaatagattatctcagaaaaacctctctgaatgatgacccttccttaatactgggtgatgtgtgaatatttgtttgttggcagacagggtctcactttgtcacccaggctagagtgcagtggtgcaatctcagctcactgcagcctctgcctcctgagttcaagtgatcctcctgcttcagcctccctagtagctgggactacaggtatgcaccaccatgcctggctaattttttgtattttttgtagagatggggtttcgccatgttgaccaggctggtcttgaactcctggcctcaagggatccgtccgcctcagcctcccaaagtgctgggattacaggcataagccactgcgcctggccttgatgtgtgaatatttgagaggtcataagcagtggttttggccataccgtattataccatatacatcagtaagagctcatcttggaacctgttttgcagtttcttgcagtttcaaaaattaaagacctacatcacagggttaatgtgaagaaagctttatttttcaaatgagtatttaatgaaagtatacataaccaatgttgggtatacagatgcttctcaacttatgatgggtttaggtccagataagcccactgtgagttgaaaataccaaaagtcaaacatcatagcttagcctaccttaaaagggctccgaacactacattagcctacagttgggcaaaatcgtctaatacaaagcctattttataataaagtatgttgaatatctcatgtaaaaaaaaaaaaaaaaaa

SEQ ID NO: 3361 - DNA, 3394 bp, Homo Sapiens
  NM_020151
ccgcgcgtgtggcagtcgcggaaggcgcgggagcttgcgtgctgctgggcctgagctgtctgtctcgtttctgtccgcgcgccctgcatcccggccccgggcgcccgctggaggtcgccgaggagccacagggctgactggtctgctgcccgggcccaggagtgcctggtgtagcagtcgcggagccatcccggcgtctgctgccatgaccgactctcccctcagaggagactcttcctcagcggtggctgcagagacagatgagcggcggctcctggccgcgggaccgtgagacgggttcgtggccggccatttagggggacgctgcgaccaccgcctgcgcccctccggactggttccttgggccccggaagctcgcggcgggccctgcgggaggcggcatgctcccgcggaggctgctggccgcctggctggcggggacgcggggcgggggcctgctggcgcttctggccaatcagtgccgcttcgtcacgggcctgcgcgtgcggcgcgcgcagcagatcgcgcagctctacggccgcctctactccgagagctcacgccgcgttctcctcggccgcctctggcgccggctgcacggccgtcctggccatgcctctgccttgatggcggcgttagccggcgtcttcgtttgggacgaggagaggatccaggaggaggagttgcagagatctattaatgagatgaagcggttggaagaaatgtcaaatatgtttcagagctctggagtccagcaccaccctccagaaccaaaagcccaaacagaagggaatgaagattcagagggcaaagagcaacgttgggaaatggtgatggataagaaacactttaagctgtggcggcgcccaattacaggcacccacctttaccagtaccgagtttttggaacctacacagatgtgacacctcggcagttcttcaatgttcagctggacacagagtatagaaaaaaatgggatgccctggtaatcaagctggaggtgattgagagggatgtggttagtggttccgaggttcttcactgggtaacccattttccttatccaatgtactcacgggattatgtttatgttcggcggtatagtgtggatcaggaaaacaacatgatggtgttggtgtcgcgtgctgtggagcatccgagtgtgccagagtctccagaattcgtcagggtcagatcatatgaatcccaaatggttatccgtccccacaagtcatttgatgagaatggctttgactacttactaacatacagtgacaatccccaaacggtgtttcctcgctactgtgttagttggatggtttccagtggcatgccagatttcctggagaagctgcacatggccactctgaaagccaagaatatggagattaaagtaaaggactacatctcagctaagcctctggaaatgagtagtgaagccaaggccaccagccagtcctctgagcgaaagaacgagggcagctgtggccctgctcggattgagtatgcttgacaggctttgggataagaagggacaaggtgcttctagccctgtctcagtccgttatcactctgctgtagaagggggacatgccacatgtattagaaggcatctgctgtaacttccagtgcaagataattcaataactgatgtcccatttcattcagagcccttattgctcttatcaaaacagaagaaggctacatttgtgggagtgttgtcatattctcaggccaactgttttgaaattcggtatctcactgagctaatctggaacaaacctctcacctcaggccagaaggggatgacctccatttgcttctctgagtagtttcctctgctgacattccaaatcccaccatcgattgtgcagcgctttggatttccttcagttctccaggtccacctggaaagtatagttggccagttgagtctctcaaatgaggggctactgggagtgctcttggtaacaatcatgatgtgaatgggtgtgaacgatacttggctatgttaagtgccttgtccgcaccttgcttttatctctagagacatgaagttattattaattttttttttttttaagtagagatggagtttcactctgtttcccaggctggtcttgaactcctgggccatgcctggccagggacatgaatttgtacaaagaaatttccctccctgcctgcacaatatcacccattgactcaccttatccaaagcaagtttcctgtgaatcggccagttcttctatattcattggatcattgcctccttcctaaccttccccatttaccaagaacactgggagactaatccttttagatagtagctttttgatgctcaaaacatcacatttaaatttagtttaaaaattttttaacttttgtgtcaaataggagttgaggaattgagcaggattctaccctagtccgattgtatagaaaacaccattttgattcaggtattatttttcatatttcaggtttgacttgttcttttcagaaggctaaagtcagaggaatgggggctgggccactcccttggagctctcagatctacagacaagctgtgtgaatgcatagatgtaatcttgtctcaaatactaatacagtggagatttggtttatgttaccattaagttcctctaaaaagtttttcttcctctcttcagagccaaaataaaagtgaactacactgttcagataaggtcacaatctgatgctgtcagtttgaccgagctggttttgcttatggtcatgctgcaatttgttagaataatagggatcaagttttaaatcctcctccttcccttttttctggagtcttgagggccagagtttttgtttttgtttttgtttttgttttcctgcttgctactgttttgtggtgttgaaaagtggtttaaacctgagactaacttaaacacttccttgaccttcttgttgcctgttcatttttgtgccaaggaagtagctgccccagtgtatgtcttgccttctccgcgtcattgttggaagaggagagatgcatcgagcagtcccagctgcttttcatttattacttcttctttccaggacctgacagaagtcagggaagagtccctgggttatgtccaaacttagcacctgcaattgttgggatgtggatggatgtgtgcataagagagagagagaatatgtgtgtgtgtgtgtgcgtctgcgagcgcacacacatgcacaagtgcgaaggagttgcggttgctccatgttctgacttagggcaatttgattctgcacttggggtctgtctgtacagttactcatgtcattgtaatgatttcactcctaactgtgacatttttatcaaatgtgtgaataaatacataaagattggtacaaaaaaaaaaaaaaaaa

SEQ ID NO: 3362 - DNA, 1875 bp, Homo Sapiens
  NM_020153
tagacaaacaggcgacttggccgcccagagaggctttatccgtgactccttgatcttcttcctgcgtggagagccttcgcgggtgaggcttaacgcgcaggaggtctcacgagagtggaagcaactctcgcgaattttaaaatttatctttttgcctagcgactgacaacaggctggttgcttggcgtggaatcctaaagtggcctggctttgagactggagtgagaccccagccctaggctggggttctttccattatagaggagacggattcagaagggctacagaccaaggttgttgaaaaccagacatatgatgagcgtctagagattaacgactccgaagaggttgcaagtatttatactccaaccccaagacaccaaggacttcctcgttctgcccatcttcctaacaaggctatggctgataacagcagtgatgagtgtgaagaggaaaataacaaggtcctaagggagggcatgccacaggctccaggccacagaggcaaagacatggaccctgttccacctgcccctgcaagtctcaagtgccaccagaccccttctcatgtacttgagagggtgggatggtacagagagagccagaagcacagaaaggagaagaagaagacctcacagttgacacctcaacggggctttagtgaaaatgaggatgacgatgatgatgatgatgattcatctgaaactgattctgattctgatgatgatgatgaagagcatggagcccctctggaaggggcctatgaccctgcagactatgagcatttgccagtttctgctgaaattaaggaactcttccagtacatcagtaggtacacacctcagttgattgacctggaccacaaactgaagcctttcattcctgattttatcccagctgtcggggatattgatgcattcttaaaggtcccacgtcctgatggaaagcctgacaaccttggcctattggtattggatgaaccttctacaaagcagtcagaccctacggtgctctcactctggttaacagagaattctaagcagcacaacatcacacaacatatgaaagtaaaaagcctagaagatgcagaaaagaatcccaaagccattgacacgtggattgagagcatctctgaattacaccgttctaagccccctgcgactgtgcactacaccaggcccatgcccgacattgacacgctgatgcaggaatggtccccggagtttgaagagcttttgggcaaggtaagcctgcccacggcagagattgattgcagcctggcagagtacattgacatgatctgtgccattctagacatccctgtctacaagagtcggatccagtccctccatctgctcttttccctctactcagaattcaagaactcacagcattttaaagctctcgctgaaggcaagaaagcattcactccttcatccaattccacctcccaagctggagacatggagacattaaccttcagctgagacacttcccaagctgctgtttcaaggctgagctggcccctctgccccagctgagatggacagatcgttgtcagctacttgatgtccttgcccatgccacagcttggctcaggggcagtgcatgtcctgctgccctctctgccagagggcacagaacatgtttgtttaatgaacctgcctgcctcagattgctgtccccggggagttaatgcatctacaccactgtggggatttgagttataagaattggaatttctgagatcccatggaggttagattgggaggaaagcttaaaagatgtcctttttgtgagagggatggaattgttttctttcattcgtaaagttagtgagtaaagattttataaatcaaatgctctattatattg

SEQ ID NO: 3363 - DNA, 1075 bp, Homo Sapiens
  NM_020154
cagagctgctgtcatggcggccgctctgtggggcttctttcccgtcctgctgctgctgctgctatcgggggatgtccagagctcggaggtgcccggggctgctgctgagggatcgggagggagtggggtcggcataggagatcgcttcaagattgaggggcgtgcagttgttccaggggtgaagcctcaggactggatctcggcggcccgagtgctggtagacggagaagagcacgtcggtttccttaagacagatgggagttttgtggttcatgatataccttctggatcttatgtagtggaagttgtatctccagcttacagatttgatcccgttcgagtggatatcacttcgaaaggaaaaatgagagcaagatatgtgaattacatcaaaacatcagaggttgtcagactgccctatcctctccaaatgaaatcttcaggtccaccttcttactttattaaaagggaatcgtggggctggacagactttctaatgaacccaatggttatgatgatggttcttcctttattgatatttgtgcttctgcctaaagtggtcaacacaagtgatcctgacatgagacgggaaatggagcagtcaatgaatatgctgaattccaaccatgagttgcctgatgtttctgagttcatgacaagactcttctcttcaaaatcatctggcaaatctagcagcggcagcagtaaaacaggcaaaagtggggctggcaaaaggaggtagtcaggccgtccagagctggcatttgcacaaacacggcaacactgggtggcatccaagtcttggaaaaccgtgtgaagcaactactataaacttgagtcatcccgacgttgatctcttacaactgtgtatgttaactttttagcacatgttttgtacttggtacacgagaaaacccagctttcatcttttgtctgtatgaggtcaatattgatgtcactgaattaattacagtgtcctatagaaaatgccattaataaattatatgaactactatacattatgtatattaattaaaacatcttaatccagaaaaaaaaaaaaaaaaaaaaaaaa

SEQ ID NO: 3364 - DNA, 6234 bp, Homo Sapiens
  NM_020156
agcgggcgggagcgcgcgctgggcccgccttggccgccgccgctgtgctgccgctgccggggaataatctgggcggcagcgggcggcctcggctagcggccacgagccacttctgcggctgcccagagaagcaaaggtcaccagtcccaagtcgtccccctctccgccccccaggaggggcgagagggagccgcagctgatgtcagaaatacactttcgggaaatggcctctaaatcctggctgaattttttaaccttcctctgtggatcagcaataggatttcttttatgttctcagctatttagtattttgttgggagaaaaggttgacacccagcctaatgttcttcataatgatcctcatgcaaggcattcagatgataatggacagaatcatctagaaggacaaatgaacttcaatgcagattctagccaacataaagatgagaacacagacattgctgaaaacctctatcagaaagttagaattctttgctgggttatgaccggccctcaaaacctagagaaaaaggccaaacacgtcaaagctacttgggcccagcgttgtaacaaagtgttgtttatgagttcagaagaaaataaagacttccctgctgtgggactgaaaaccaaagaaggcagagatcaactatactggaaaacaattaaagcttttcagtatgttcatgaacattatttagaagatgctgattggtttttgaaagcagatgatgacacgtatgtcatactagacaatttgaggtggcttctttcaaaatacgaccctgaagaacccatttactttgggagaagatttaagccttatgtaaagcagggctacatgagtggaggagcaggatatgtactaagcaaagaagccttgaaaagatttgttgatgcatttaaaacagacaagtgtacacatagttcctccattgaagacttagcactggggagatgcatggaaattatgaatgtagaagcaggagattccagagataccattggaaaagaaacttttcatccctttgtgccagaacaccatttaattaaaggttatctacctagaacgttttggtactggaattacaactattatcctcctgtagagggtcctggttgctgctctgatcttgcagtttcttttcactatgttgattctacaaccatgtatgagttagaatacctcgtttatcatcttcgtccatatggttatttatacagatatcaacctaccttacctgaacgtatactaaaggaaattagtcaagcaaacaaaaatgaagatacaaaagtgaagttaggaaatccttgaaagaaaatcatgaatgaacaaaggtaatatgtctagcactgcactgaaaaaggacttctgcatttctgacatagaacactggaatcccagtgaggaattctaagtgaacattccttatagaaacctttcacatgaatgactataaactgaagctttaaatgagctgtgaagtgtgttaaaatgtgttttgatacagtaatatataaatatgtctatatatatgaggaacttgtgttttttaaatggtggccaggtagaggaactagaaaagagattttgttgcctgttttctgaccatctgtgttattgtcactgagaaactaaaatagtaaatttactaaaactacactgcaccatgttagtaataaacagatctgccttaaagaaaagaaaattttagaaagaaatattgttgctcagtgttgttaatatagctcaagaattgagtttatatttgcagtatgctataaatgatacccccctaccacacccacacacacagtttttgtctaatgaaaatgttgctgtgattatttataattggtagtatttcttccagaagaagctaaaataagactggcacttaccctgaagtgcattaataaaaccacactttaaaattatcatgggccttgactatattatatacttgattctaattagtcatcttttacgcaatctctgttgtctcttttctaaatgtgtttagccactcttgaataccattctccactattaacattaatttactcaaaccgttcatagcattctgtaaacatgtattttacatatttgttcccaaatttgcccattgttcattatgggtaactaataataaatttaatgctgtttcaggatgcttttcttataacagtgccactctcaggaattactaagtgacattttaaattgatattttaaactctttccaactacatagttatggtttatttcattctcatcctgttgggatgagaacttgtttgtgcctttcataacttgtttaaagcagagttttaaaattagtttataggatctgaggtggctattagttacagtggcaagattatttagaaagcaagattttgatgagaattaaaaacaatagaaaatgtagagtgcttaaacaaaaatgttatattttgaaagagtagatacttaatttataaataacagtctgaaggttggtgctattttgggataattgttttgctaatggataattctaacaatgcagaatacctagtcaagactgtcatcaaaaacattcacaaatgtttcattctatttttagtgactctgtttaaagagtttctgaaaggaaagaaattttttatttttattatctttagcagtactgagtgtcatagcagaatattttacagactttctatgagattatttttatggtacaaagtatttacatttccctcatgtttatcattatgccaattttacatggcagtcatgccactgactctgctatttagctaagtaatttcttttttcggagactgtctcactctgtctcccaggctggactgcagtggtgcgattctcctgcctcagcctcccgagtagcggggattacaggcacgcgctgccacgccccgccagttttcatatttttagtagagacagggttttgccgtgttggccaggctggtcttgaactcctgacctcaggtgatccacccaccttggcatcccaaagtgctgggattacgagcgtgagtcacagcacccggctaagtaatttctatttattgtgccaaaacatgtcaaaatcatgacctctttgaatggtatatttgagaggatgttcatttcattggttaaccatggactactctgtccacgtagtgaaaacatgcaccagtttttacctattatcatggtagtatcatctgccaaaatttcaaggcattcattttattctttgaacaactcttcaccatggtgtggacatgaattttcatatgtgttacttgactagaagtataaatggtttactatagatatccaaaaaccttgagatttgctcataggaaatgaatattgtgatgaatcctgggctctagagtcagacttgcttgggtttaaattcttgctctaacacttactgtttttgtaaccttgagcaattttaatctctctgtgtctcaatttcctcatcttttaattagggatgataatactacctacctcacaggatttttatgaggattaaataaatgtaaggtttttagaacattgatagggagcaataaatagaagattgtattattattctgttaccttggagtgtaagtactgcatttaagtgaatgaaaaatttgctttgaccagatactgaaggaaataagtaatagctagtatttatccaatgccaactgtatgctaggtactgtgcttagataatctgtgtataatagtgttaatcctcaaaatttgggtgttatacccctattatagataaggaaactgaggctcagagacaaagtaactttgtcactgtcacaaagctagtaagtaacagaggtaggatttatattcaaaaccctgtgtgttcattggaaccgtatcaggcttggggctattcatgtagcattatttccatttttatgtatatgatatatgacgtctgatgcattggccagtaatagtcaaattaacccagccaaattgtcacagtgattcttaaactgtggttctcacacttgcccaggatgttgttaaatgcagatctgaagaccccaatctcagaaattcaaatttaagcatggggcccaagagtatgcattcttaccagataccttgggcagtgactgtcaaaagtctggtcccaacaaacagcattaacgtcacctgggaacttgttggaaatgcagcctctctcggggcctcatctcagatcagatctactaaatcagatactctaggggcaggggcaggggcaggggctagcagttgtgtttaagcaaactctgcaggtgtctttcttatcctagtttgagaaccaatacccaacaacctacgtgattttggtgcaagtagtgtttgaaacacactgaagattactgcccaattactaagacatttttcaaaaagcatgttttaaatcagtgtagtccaggatcacactatattaaatataaagataacttaaaggatcattggatcattcattttggccaaatttttagcttctccaaagtgactaacatcagggcctacaataaaatctgtaattctccaagtttagtaattttatattgaggcaggaagggctcattaagtactaataagtacataatttattaaaaacatacataagtgtcatcaaaaaggtccacaattgttagtaaaaaaaattaaattgaagtagtaaatgctgttttataacatacatttttctgctaattcattctgttttgtgtgacctaataaagcaaaagaaaaataaaaaagcaattctccaagtacttcatagagcacataaaaccagatttcatgatgatgatgtattcactatcttttagattaagatctttgttatttggtaaatgatttcagtatggttttaaaacataaggcttttgatgtcttatgttctctaataatggtatgcttgtattttctagtgggaagttcatagataaagcagatttttgtcccagtttgctttcaaatataaatttcagagggctttttcttactgtaatgaggtatgaaaataaatcattgatcagctcttaatattttttgaatacagaattggatttgagcagtaaatttgctaactggttattttcacaattttcttgaatattaatttttcacttctttgagactgtcaaactatagttactaccaggttgatgcactgtacttgaaagaatcccttgattaaattacatctagcattttatttgccatttcaattttcagttcattagactataattctttgacagtttctgcctggtgtttattgcccttctttgtttgctttattactaacttccattttctagttactcttaaatgctgccttcacaaggttaatttggctgttaatagtgattagaatttttatcacttaattgataattttaagcctactaactagggttccctatgaaattgaaagtaaaagtctaagaataatgcctgctggctctcgagatacttgccctacttaaaaatctataatttaaaattaattctatgtctacaattattaaaggaagtaaagttatttgggttcttccactcacccttttctcaaaaacaacaacaaaaaacaaaactcattttatttttctactttatagtaggcctgacagaaacatagtgaagcaatctgggaggcaacctgtggtagattttatgctaaatgttaatgtaacctctgttgattttttaaaaatgtgtttatatataagatttgaaataaaaactttaatacaggctagaataaggaattttacaaattctctttagagcaaccaacattaaagttttagagttgaattttgctctatttcaactcccttacctctctagttttcagtttatattaagttttaataactttgcggggccctgcaaattaataatctacatgaagtatattattagagggaaactaatcttactgctaagcagtgtgttgtactacatagtgaatgttcgtgttttggaatttaaaaattatttaaggtaatggtgttacgaatggtttaaaaatgtctggtgacttgcttatttttaagtgatcaccattaagtcagaaaaatgtatttttaaatgtttcttgaagtgccttttgaacatttttaaacagcggatttaaataatgcataaaataaattgccatgttcaaagttgaaaaaaaaaaaaaaaaaaaaaaaaaa

SEQ ID NO: 3365 - DNA, 1006 bp, Homo Sapiens
  NM_020158
cagccgcacgtgggctcggcgcgatggaggaggagacgcatactgacgccaaaatccgtgctgaaaatggaacagggtccagccctcggggtcctggctgcagcctccggcactttgcctgcgaacagaacctgctgtcgcggccagatggctctgcttccttcctgcaaggtgacacctctgtcctggcgggtgtgtacgggccggccgaggtgaaggtcagcaaagagattttcaacaaggccacactcgaagtgatcctgaggccgaagattgggctgcctggtgttgcagagaagagccgggagcggctgatcaggaacacgtgcgaggcggtggtgctgggcacgttgcacccccgcacctccatcaccgtggtgctgcaggttgtcagcgatgccggctctctcctggcctgttgtctgaatgccgcctgcatggcattggtggatgcaggtgtgcccatgcgggctctcttctgtggggtcgcctgcgccctggactctgatgggaccctcgtgctggatcctacatccaagcaagaaaaggaggcccgggcagtcctgacctttgccctggacagcgtggaacggaagctgctgatgtccagcaccaaggggctctactcagacactgagctccagcagtgcctggctgcggcccaggccgcttcgcaacacgtcttccgtttctaccgggaatcgctgcagaggcgttactccaagagctgaggcaagctggggcaaggggccgctcccattgcctccacccactcaccccctacagcctgaagcaaaccagcagcccagccttgcctctctgacccatgggctccttgagcctgcagctctgtaaccacagggctcctgtggggaggccttggcctgtgacagcccccaggcctgggggcacagatccccccagcaaggataacattcaaaggagctcacatttatggaatggatgaatcaataaattaattcactttaacaaaaaaaaaaaaaaa

SEQ ID NO: 3366 - DNA, 5108 bp, Homo Sapiens
  NM_020159
gcgtcaacttccgggcggatgcccgccagcacggcctccgccgctccccttctttggcccctttgtgtccccgcagtgtcgaggcgcgggccctggcaggtcctttctcgaggcagggggcacggtagcacagggagcttctctttgtgggcgggcgcgaggcccgctagggggttatactggggaacgtgcctgcgcgtgcttggatagttcatttaaagcccccatccctgcaaggtggtgctttctaccaatatgaatcttttcaacctggaccgttttcgctttgagaaaaggaataagattgaggaagcgcccgaagcaacccctcaaccttcccagcctggcccttcttcaccaatttctcttagtgctgaagaggagaatgctgaaggggaagttagcagggcaaacactcctgattcagatataactgaaaaaacagaagattctagtgttccagaaactccagataatgaaagaaaagcaagtatatcatatttcaaaaatcaaagaggaatacagtatattgatttgtcttctgatagtgaagatgtcgtttccccaaattgctccaatacagttcaagagaaaacattcaacaaagatacagtgattatagtttctgagccatctgaagatgaagagtcccaaggccttcctaccatggcacgtagaaatgatgatatttcagaactggaagacctttcggaattggaagaccttaaagatgctaaacttcagactttgaaggaactttttccacaaagaagtgacaatgatttacttaagttgattgaatcaacaagcactatggatggagcaattgctgctgccttgctgatgtttggtgatgcaggtggtgggcccaggaaaagaaaattatcttcttcttcagagccatatgaggaagatgaatttaatgatgatcaatctataaaaaagacaagactggatcatggagaggaatcaaatgagtctgcagaatctagcagtaattgggaaaagcaggaaagtattgtactgaaattgcaaaaggaatttcccaattttgataaacaggaacttagagaagtactcaaggaacatgaatggatgtacacagaagctttagaatctctaaaagtgtttgcagaagaccaagatatgcaatatgtatcacaaagtgaggttccaaatggaaaagaagtttcttcaagaagtcaaaattaccctaaaaatgcaactaaaacaaaactaaaacagaaattttcaatgaaagcacaaaatggctttaacaagaaacgtaaaaaaaatgtttttaatccaaagagagttgttgaagactctgaatatgattcaggttctgatgtcggtagttcactagatgaggactatagtagtggtgaagaagtgatggaggatggctataaaggtaaaattcttcacttccttcaagatgcttcaattggtgaacttactttgattcctcagtgttctcagaaaaaggctcagaagataacagaactccggccctttaatagttgggaggctctgttcacaaagatgtccaaaactaatggcttatcagaagatttgatatggcactgtaaaacactgatccaagaaagagatgtagttataaggcttatgaacaaatgtgaagacatttcaaataaattgaccaaacaagttaccatgcttactggaaatggaggtggatggaacatagaacaaccttccattctaaaccaaagtttgtcactcaagccctatcagaaggttggtttgaattggctggcattggtacataaacatggacttaatggcattttggcagatgaaatgggcctaggaaaaactattcaagccattgcatttctggcatacctctatcaggagggtaataatggtcctcatttgatcgttgttccagcttcaactatagataactggttaagggaagttaatttatggtgccctactttgaaggtcctctgttactatggttctcaagaagaacgtaaacaaattagatttaacattcatagtagatatgaagattacaatgtaattgtgaccacatataactgtgcgatcagcagttctgatgaccgtagtctgtttcgacggctgaaacttaattacgcaatttttgatgagggccatatgctgaagaatatgggctccattcgctaccagcaccttatgacaattaatgcaaataaccgtttgctgctcacaggcacacctgtacagaacaatctgttagaactcatgtcgctgttgaattttgttatgccacacatgtttagtagtagcaccagtgaaatacgaagaatgttttcctctaagacaaaatcagcagatgagcaaagcatatatgaaaaggagagaatagcacatgcaaaacaaattataaagccatttattctcagaagagtaaaagaagaggttctcaagcagttaccccccaagaaagatcgaattgagttgtgtgcaatgtcggagaagcaggagcaactctatttgggtcttttcaacagattgaaaaaatctatcaataacttggaaaaaaacacagaaatgtgcaatgtcatgatgcagttgaggaaaatggccaatcatcctttattacatcgccaatattacacagctgaaaaactcaaggaaatgtctcagcttatgctaaaggaacctacacattgtgaggctaaccctgacctgatctttgaagatatggaagttatgacagacttcgaactacatgtactttgtaaacagtaccgacacattaataactttcagttagacatggacttgattttagattctggaaaatttcgagttttaggatgcatcttgtctgaattgaaacagaagggtgatagagttgtgttatttagccaatttaccatgatgctggatatcttagaggttctattaaaacatcatcagcataggtacctcagattagatggaaagactcagatttctgaaaggattcatctaattgatgagtttaataccgatatggatatctttgtgtttctgctatcaacaaaagctggtggattaggaataaatctgacttcagcaaatgttgttatacttcacgatattgactgtaatccttataatgacaaacaagcagaagatagatgccatagagtaggccagactaaagaagtactagttataaaactaataagccaagggacgattgaagaatccatgctaaaaattaaccaacagaaattgaaactagaacaggatatgactacagtagatgaaggtgatgaagggagtatgccagcagatatagccacattactaaaaacatcaatgggcctgtgaaataagaactgtgaactctcaattgatgaggaaatatcaacttggtgcactcaaggacatttacattatgatgaccatggggtttatgaacatttataactttttataatttccatattacatttctcatagtatggacaactttttgccactaactgaattctccaaatactcacacgtgaaatttcaaaaaagaagccacaaatatgtagttctgaagatgttgaataatcattttacaaagcagttttctgaatggggattagttggtgattgtttgtaacaaatatgctaatgctttagaaatgtcagtatttttgtaattatttctacctccaaatatatatatattgtctttcactggataatgtgtgtagatttttacatgtgccttatttgacaatgcttatgtcttgtttttgcttgtctcatttgaagttcttttttattatgttaaagaatgcagctgtatagattatatagctttcattttattgctatttgaagcagatgttcaccaatgtcagcaagaactcaacctgaatttaaaggtggcattccatatactaacatcccccaggtcctctcaagtacttctgctgaaacaaatttatttggctaggcactaagttgttttccagtgaatagtaactaaagaagcccctaccttgctccatggattaattccttctgttcattttccaactgcactaattgtgcatattactctgcctaatcttgtgcatgttttcattgatttccctctcccggcttttgcttctcttgaaactgttgcccagtcacttctgctccaattctcttcctctctaaatagtagtttattactgccacatctccatgcatcagcaaaatgttggtgacatttttctagcctggcagaacagattacttaaagctatttcatttcaaagcagactgaatgtgacttcatctaaaggcagcattaggtactgcatggaaataggtcattaacttgaaactcttatcaaaatatattttaccagtttccagaatttccagtacaggaccgcctgaagagagagccattgttcaattccaattcagtgtgagtgacaaagtgaaatttagaagtgaagttgtctatttgatatttaactctttattaaatctttctttaaatttctgcctgtcagtctatattgctgtttttattatacatcagtttctttgtataacttgtgagttccatgtgttttgtttttattatgtaaatatcattataaataaacttatttataaatcaaagatttgttaatttttggaaatcatgcttttcaaagcatcctaacttgctaagatgctaggtagtacgaccctctggatttggaaggcaaataaaactcttacagtgattatttagatattaaagactgagaactcacggcttaaccccagtcttgatggtatattgaacagactgaatatattttaccattacagggctaaaaggagtcttcatgtgttaatactacctccttgtacatcactatacccaaatcagttattcaaattgttaggaattttaccttttaaaatctcataatggatatctcatgttttctgtattaatgtattttcaatgataggctgtttctttttttgttgttattgttgttgttgttatatccatacttttatctctaatgaaatgtagttgggttcttcctgtaatgcgctattatgtcttgggcttaataaaaatatttgtgatcataaaaaaaaaaaaaaaa

SEQ ID NO: 3367 - DNA, 5635 bp, Homo Sapiens
  NM_020162
aaagccttcccaagcccccaaggcatgctgggagatgcagtccctttttctaaagactggggcggccgtgaggtcatcggtggtcgccgggagccgccagcacgtggcggcgaggaaggggcggtgtgctcctgttgtctgcacctgagagggggcaggagctctcggcgcttgcgcctcccgccgcggtgccctcccgacatgccggaggaggcgggcttcccgccggccaagagattccggccaggctctggacctccgagccgcgctgggtccttccctcccgggaggcaagtggtgatgctgctgactgcgggcagcggcggcagaggaggaggaggaggccggaggcagcagccgcccctggcccagccctcggccagtccctaccctgaagctgtggagctgcagcgccggagtctgcccatcttccaagcgcgggggcaactgttggcccagctccgaaacctggacaacgcggtcctcatcggggaaactggctctgggaagacaactcagatccctcagtacctgtatgaaggagggatcagccgccagggcatcattgctgtgacccagcctcgtcgagtagctgccatctctcttgctactagagtctcagatgagaagagaactgaacttgggaagctggttggctatacagtgcgctttgatgatgtcacctcagaagacaccaggatcaagtttctgacagatggcatgcttctgcgtgaagcaatttcagactctttgcttcggaaatacagctgtgtcattttggatgaagctcacgaacggactatccacacagatgtgctctttggagtggtgaaagctgcacagaagaggagaaaggaactcgggaaacttcctctgaaagtgattgtgatgtcagctacgatggatgtggacctgttctctcagtatttcaatggcgcccccgtcctctacctagagggtcggcagcatccgatccaggtgttttacaccaaacagcctcagaatgattacctgcacgccgcgcttgtctccgtcttccagatccaccaggaagccccttcttcacaggacatcctggtgttcctcactgggcaggaggagatcgaagccatgagcaagacgtgccgagacattgcaaagcacctcccagacggctgccctgcgatgctggtccttcctctgtacgcctccctgccctatgcacagcagctccgagtcttccaaggggccccaaagggctatcgcaaagtgatcatttcaaccaacatcgctgaaacctccataaccattacaggaataaaatatgtagttgacacgggcatggttaaagcaaagaagtataaccctgacagtggtcttgaggtgttagcagtgcagcgggtatcgaagacgcaggcttggcagcgcacagggagggctggcagagaggacagtggcatctgctaccggctctacacggaggacgagtttgagaagtttgataagatgaccgtgccagagatccagaggtgtaacctggccagtgtgatgcttcagcttctagcaatgaaagtcccaaatgtgctcacctttgacttcatgtcgaagccatctccagatcacattcaggcggccattgcccaactggacctgttaggtgctcttgaacataaggatgaccagcttaccctgactccaatgggaagaaagatggcagcatttcctttagaacccaaatttgccaaaaccatcctcatgtcccccaaattccactgtacagaggagatcctgaccattgtctccctgctgtctgtggacagcgtcctccacaaccctccttcccggcgagaggaagtgcaaggggtccgcaagaagttcatatccagcgagggggatcacatgaccctgctcaatatctatcggaccttcaaaaacctaggcggaaataaggattggtgcaaagagaattttgtcaacagcaagaatatgacgctggtagcagaagtcagagcacagctgagggacatctgcttaaagatgtcaatgccaatcgcatcatcccgaggagacgtggagagtgtccgccgctgcctggctcacagcctcttcatgagcaccgccgagcttcagccagatggcacctatgccaccacggacacccaccagccagtggccatccacccgtcgtctgtcctcttccactgcaagccggcctgcgtcgtgtacactgagctgctctacaccaacaagtgctacatgcgggacctctgcgtcatagatgcacagtggctgtacgaggctgcccctgagtactttaggaggaagctgagaaccgccagaaactgagccgccccaggatgccgccagaatcactggtccctgggagcttggactacagttgtccttacagcaggcttccaggttggcgcttagagaagccttggaatcagctgaaggtgcctgacttccaggagcgtgaaagcatctttgctcaactcctgggactgaaccatatagacatggacatatcatttgtacctggaaacctcaaaattatgcttttggttcttactgggtgactttgacttaatttaacacctgagcctcagttttctcatctgccaaatgggagtaataataataatccttataaaattgggttcataaagtttagagaaaaggaatggaaagtacccagaactatgcctggagcacgcacgacacacgtacagtgagttgggagccgttaggctgaatgttactgcttgccatatgatgtgaagtacagcaatatcccaagttcttgtgactgagggagattttctggaagggccacaggaggttgcggagcttggatgttgcccttagttcttgtttaatgtctctctgaatgcagttttaaaatagaaaacaaaactgacttctgtagaagtttccagagggaggtgctgttatctcgtacctcctgggatggcgatccctactgaacgcttgtgtctcagggtggaccactctgtgtctgtctccaagcagagaccagtaaaggagcctcctggtcctcagtgcgtgaccctgtcagtgctttcaggagacatgtaagcttcctgggtgaaggttgatttgtaccttctgaatcctgtcacgtgtagacatgggaaactgacctatcagtgttttgtgtgtgtaggtgactcccacatacacagttgccatttttctctctaactgggcaccagtgaacatgcgggcatgaggagtgactgtgtaccatttcagctgtttcttttcgggcagtcccctggtcagagggggtgggggtgggggaggggagaggggtacctagaacccagagaacattggcttatgccagataccacaccacatctgggcttacattcttgtatcttttttggtgtgtgggcggggggggtggggggcagttcagtgaagtctagaagacctgctggacaaattctaaaagagctagagctgtaacacttattcttgcatcttattaattttctatgatattttttccttcttcgtagggacttgggacaatctggctttgctgctttctaactgctaggcacctctctctaaccctcattgtcagagggaattggaggatatccacagtctgttcctgttctgatattctgagcagagaaaaggcactaacggttcctcttagctatttaattatcagaagcaagtaatctttccccagataatattttgccctagaagaagccgtgatttagctcttttattgtgcttacttggtccaaatacatctgtggggtgttttgtcatttcttaatgaatgaatcatagttataaccaggggccaagctgcccaagaggctcttcagagatcatggatgctctctttctggaagctgtggcctgatggagcagccccattccagggtcccatctgtccggagttgtgtatgtcaagtccggctcagtctttatttccaacactagccgtggtcctgtgcagtcaagctctcagctagtgtttagggctgtctgtcagaaatggttatacgtgggcaaaagaagatctgacagctcctatataccttatcttactgaattcttaaactttgaaccagttcttccacttactgacttgttaccactgctgactttctgaaaagttttccagtttttgttttttgttttttgttttccagtaggggattagaatgtttagtcctacttagtaagaaaaatattgtatttttaatcattcatagtgctggtaaaaaaaaaaaaaaaaaaaaaaaaattggggggtggccgggcgcagtggctcacacctgtaatcccagcactttgggaggccaaggcgggcggatcacctcatgcctgtaatcccagcattgggatgggaggctgaggtgggtggattgcttgagaagttcaagaccagcctggccaacatggcaaaaccccgtctctactaaaaatagaaaacttagctgggcatggtggcacacgcctgtaatcccagctaccggggaggctgaggcacaagaattgcttgaacttgggaggcagagtttgtagtgagccaagatcacgccactgcattccagcctggccgacagtgtgagacggtctcagaaaaaaaaagaaagaaagaaagaaaaagaaaaaacttggggtaatttatgtccagcttaagtacctgaacagtttccggaaatgtatattttttttctgagaggcaaaggatgtaaacagcttctaagtagctttaatgtttctgtacagaaataagtttatccctgtaacattgtggtagagttttaatacagtatttagttttttattgggcttttttaaaaagttaacttttaacatagctgctcagggattaaatcagattggaaaacccattctgactccacatactgctacaaagaaatacatcgttgtttatattgagctgcaggagatagtacactttaaacttaagaaagttaaatgtttcacaataacattgcaatataatcttcagctactctctttccattggtaaaatctctgatggtgtgataactctttgccaacctacgaaacccatatctggaagaatcaccagctcccgtgagcagcttcatgtaaatagatgcactccaagcagattgcatgcctcaggtgtttgtcttctagtaatcatggagtgtgcaacacccagagtaacactacaaggggcaggactgcaaacagcaggtcctggctaaaaacccttaatgctgcattgctgccagttgtaaagagatgcctgaatggaggcaagttctgccctgtgggtgaaactgatgatgtactgtactgtcatatataaatccactaaatccagctaccaggaactgcctggaactgtggccatgcatttttttttttctttaaagaccagtgtgatagtaggccatgcatctgagatacgatattccttggtaactagagggagaaaaaaaaatcaagtaggttcaggcttatgttgtattttgagagtctggttttatttgaacagaaataactctacagaaagctcttgtaaataatgctcaaatttgcacccgacgatcaaatccattaaaaatgaatcttgtatatgaaaaaaaaaaaaaaaaaa

SEQ ID NO: 3368 - DNA, 2551 bp, Homo Sapiens
  NM_020166
atcagcccaaaggtaggctcaggctccgacggtggccggcgggggtcacgaggcttcgtagtggaggaacgggtttggcgtgtgggacgcagctgcctctgtactggggagtcacggagtggccgggctccagggacatggcggcggcctctgcggtgtcggtgctgctggtggcggcggagaggaaccggtggcatcgtctcccgagcctgctcctgccgccgaggacatgggtgtggaggcaaagaaccatgaagtacacaacagccacaggaagaaacattaccaaggtcctcattgcaaacagaggagaaattgcctgcagggtgatgcgcacagccaaaaaactgggtgtacagactgtggcggtttatagtgaggctgacagaaattccatgcatgtagatatggcagatgaagcatattccatcggccccgctccctcccagcagagctacctatctatggagaaaatcattcaagtggccaagacctctgctgcacaggctatccatccaggatgcggttttctctcagaaaacatggaatttgctgaactttgtaagcaagaaggaattatttttataggccctcctccatctgcaattagagacatgggtataaagagcacatccaaatccataatggctgctgctggagtacctgttgtggagggttatcatggtgaggaccaatcagaccagtgcctgaaggaacacgccaggagaattggctatcctgtcatgattaaagccgtccggggtggaggaggaaaaggaatgaggattgttagatcagaacaagaatttcaagaacagttagagtcagcacggagagaagctaagaagtctttcaatgatgatgctatgctgatcgagaagtttgtagacacaccgaggcatgtagaagtccaggtgtttggtgatcaccatggcaatgctgtgtacttgtttgaaagagactgtagtgtgcagaggcgacatcagaagatcattgaggaggccccagcgcctggtattaaatctgaagtaagaaaaaagctgggagaagctgcagtcagagctgctaaagctgtaaattatgttggagcagggactgtggagtttattatggactcaaaacataatttctgtttcatggagatgaatacaaggctgcaagtggaacatcctgttactgagatgatcacaggaactgacttggtggagtggcagcttagaattgcagcaggagagaagattcctttgagccaggaagaaataactctgcagggccatgccttcgaagctagaatatatgcagaagatcctagcaataacttcatgcctgtggcaggcccattagtgcacctctctactcctcgagcagacccttccaccaggattgaaactggagtacggcaaggagacgaagtttccgtgcattatgaccccatgattgcgaagctggtcgtgtgggcagcagatcgccaggcggcattgacaaaactgaggtacagccttcgtcagtacaatattgttggactgcacaccaacattgacttcttactcaacctgtctggccacccagagtttgaagctgggaacgtgcacactgatttcatccctcaacaccacaaacagttgttgctcagtcggaaggctgcagccaaagagtctttatgccaggcagccctgggtctcatcctcaaggagaaagccatgaccgacactttcactcttcaggcacatgatcaattctctccattttcgtctagcagtggaagaagactgaatatctcgtataccagaaacatgactcttaaagatggtaaaaacaatgtagccatagctgtaacgtataaccatgatgggtcttatagcatgcagattgaagataaaactttccaagtccttggtaatctttacagcgagggagactgcacttacctgaaatgttctgttaatggagttgctagtaaagcgaagctgattatcctggaaaacactatttacctattttccaaggaaggaagtattgagattgacattccagtccccaaatacttatcttctgtgagctcacaagaaactcagggcggccccttagctcctatgactggaaccattgaaaaggtgtttgtcaaagctggagacaaagtgaaagcgggagattccctcatggttatgatcgccatgaagatggagcataccataaagtctccaaaggatggcacagtaaagaaagtgttctacagagaaggtgctcaggccaacagacacactcctttagtcgagtttgaggaggaagaatcagacaaaagggaatcggaataaactccagcaaggaaatggccagttaagtagtgtcttctctctccaccaaaaagaggaagtgcctccagcttttctgggggtctcataaagagcagttttactaaatgattgtatgcttatgctgaacacctttcatattggagaatcatgcatttgggtcactaattatctcaaaatatttcatactaataaagttgaattattttttattggaagccaaaaaaaaaaaaaaaaaa

SEQ ID NO: 3369 - DNA, 2127 bp, Homo Sapiens
  NM_020175
gacatgagcatgcgcacttccccagcacaatcagggaagacacgcgtgacccggaaggtcttcccgccacactccagagcggatgtgaggggcgccgatggcggagggaacggcggaggctcctctagagaatggtggtggtggcgactcgggagccggagctttggaacgaggagtggcgcccattaagcgtcaatacctcaccaccaaggagcagtttcaccaattcctggaagccaaagggcaggagaagacttgccgggaaaccgaggtaggagaccctgctggcaatgagctggctgagcctgaggctaagcggatccgactggaggatggacagacggcggacgggcagacggaggaggcagcagagcccggggagcagctacagactcagaagagggcccggggacaaaacaagggccggccccatgtgaagcccacgaactacgacaagaacaggctgtgtccctccctaatccaggagtcggctgctaagtgtttcttcggtgatcgctgccgctttctgcacgacgtggggcgctacctggagaccaagccggccgacctgggcccccgctgcgtgctcttcgagaccttcggccggtgcccctacggcgtgacctgccgcttcgctggggcccacctgaggcccgagggacagaacctggtgcaggaggagttggcggcccgcgggacccagcccccgtccatccgcaacggcctggacaaagccctgcagcagcagctgcggaagcgcgaggtccgcttcgagcgagctgagcaggccctgcgccggttcagccagggccccacacccgctgccgctgtccccgagggcacggcagccgagggcgctcccaggcaggaaaactgtggtgcccagcaggtccccgcagggccgggcactagcacccctcccagcagccccgtgcggacctgcgggcccctgacggatgaggacgtggtcaggctgcggccctgtgagaagaagcggctggacatccgtggcaaactttacctggcccccctcaccacgtgtgggaacctgcccttccgacggatctgcaagcgcttcggggcggatgtgacatgtggagagatggccgtctgcaccaacctgctgcagggccagatgtccgagtgggccctactcaaacgccaccagtgtgaggacatctttggcgtccagctggagggcgccttccccgacaccatgaccaagtgtgccgagctgctgagccgcaccgtggaggtggactttgtggacatcaacgtcggctgccccatcgacctcgtgtacaagaagggtgggggctgtgccctcatgaatcgctccaccaagttccagcagatcgtccgtggcatgaaccaggtgctggatgtgccgctgactgtgaagatccgcacaggcgtccaggagcgtgtgaacctggcgcaccgcctgctgcccgagctgcgggactggggcgtggcactcgtcacgctccacggccgctctcgggagcagcgctacaccaagctagccgactggcagtacatcgaggagtgcgtgcaggccgccagccccatgcccctgttcggaaatggggacatcttgtcatttgaggatgccaaccgcgccatgcagactggtgtcaccgggatcatgattgcccgtggcgccctgctcaagccgtggctcttcacggagatcaaggagcagcggcactgggacatctcgtcgtccgagcgcctggacatcctgcgggacttcaccaactacggcctggagcactggggctcggacacgcagggcgtggagaagacccggcgctttctgctcgagtggctgtccttcctgtgccggtacgtgcccgtggggctgctggagcggctcccacagaggatcaacgagcggccgccctactacctgggccgcgactacctggagacgctgatggccagccagaaggcagccgactggatccgcatcagcgagatgctccttgggccagtgccccccagcttcgccttcttgccgaagcacaaggccaacgcgtacaagtagcctcaggctttcccaggggcaccctggggcgaggagagtacaataaattttattcttttaaaaaaaaaaaaaaaaaa

SEQ ID NO: 3370 - DNA, 5813 bp, Homo Sapiens
  NM_020177
ccgccccgcgcctaggctgttgctggccgcggccgccgccctcccccggcccaatggcgtggcggcacagtcagtgatgtgacgctcaggcttgtccggcccccggctcgcagcccattacaccatccgtcgcagcagtcgctgcagccgctgcagtccgagccgactaagggcgggaggcagctcgggtggcggggcgtggcgaacagcgcggccggattcattcctttggggcgcggagcatggaggagctgtgcggccgcaggcggagcagggcggcccgggcggcggtggggacaacggtttccctttgaaggggacggacaaagcccgagtgaccagcggcggcggggaggactagtccccgggcagtttggtgccctggttgtcagatgttggaaagcagtaggacggaacatactcttcgtggttgtgtatccgttctggggtgcagcaattaacattggactttggttcctgtgactcttgcctgtgtcgatagagttaaactggagctctgctttgaaagataaataaagcacagcctctcaactggacataaatggatctaaagacagcagtatttaacgcagctcgggatggcaaactccggcttctcaccaaattgttggcaagcaaatccaaagaggaggtttcctccttgatctctgaaaaaacaaatggggccacgccactcttgatggccgccaggtatgggcaccttgacatggtggaattcctcctagagcaatgcagtgcctccatagaagttgggggctccgtcaattttgatggcgaaaccattgagggggctccccctttatgggccgcttctgcagcaggacatctgaaggtggtccagtccttgttaaatcatggagcatctgtcaacaacacgactttaaccaattcaactcctcttcgagctgcgtgtttcgatggccatttggaaatagtgaagtaccttgtagaacacaaagctgatttggaagtgtcaaaccgacatgggcatacgtgcttgatgatttcatgttacaaaggacataaagagattgctcagtatttacttgaaaagggggcagatgttaatagaaaaagtgtcaaaggtaatactgcattgcatgattgtgcagaatctggaagtttggacatcatgaagatgcttcttatgtattgtgccaagatggaaaaggatggttatggaatgactccccttctctcagcaagtgtgactggtcacacaaatattgtggattttctgacacaccatgcacagaccagcaagacagaacgtattaatgctctagagcttctgggagctacatttgtagacaaaaaaagagatctgcttggggctttgaaatactggaaaaaggcaatgaacatgaggtacagtgataggactaatattattagtaaaccagtgccacagacactaataatggcttatgattatgccaaggaagtgaacagtgcagaagagctagaaggtcttattgctgatcctgatgagatgagaatgcaggcactattaatcagagaacgtattcttggtccttctcatcctgatacctcttactatattagatatagaggcgctgtctatgcagactctggaaatttcaaacgatgcatcaacctatggaagtatgctttggatatgcagcagagcaatttggatcctttaagcccaatgaccgccagcagcttattatcttttgcagaactattctcctttatgctacaggatagggctaaaggcctgctgggtactactgttacatttgatgatcttatgggcatactttgcaaaagcgtccttgaaatagagcgagctatcaaacaaactcagtgtccagctgacccattacagttaaataaggccctttctattattttgcacttaatttgcttgttagagaaagttccttgtactctagaacaagaccatttcaaaaagcagactatatacaggtttcttaagctgcatccaaggggaaagaataacttcagccctcttcatctggctgtggacaagaatactacatgtgtagggcggtaccctgtttgtaaatttccatctctacaagttactgcaatactgatagaatgtggtgctgatgtgaacgtcagagactcggatgacaacagtcccctgcatatcgctgctcttaacaaccatccagacatcatgaatctccttattaaatcaggtgcacattttgatgccacaaacttgcacaaacaaactgctagtgacttgctggatgagaaggaaatagctaaaaatttaatccagcctataaatcataccacattgcagtgtcttgctgctcgtgtcatagtgaatcatagaatatattataaagggcatatcccagaaaagctagagacttttgtttcccttcatagatgataacttgactgtattttagcactgttaaagcacgaattggtaacagttgtttcataaatgagcactgttgtgataacaccagcattcatttagcttgattgatatcattgtgctctcattggctaaagcattataagcatcaaatttacaacattggtttcccaatatttaatataaatataccatataatatattgtttgtgaattattgagaaatgtaacattcaaatttctaaaattgtctgccaaaggcttattcattctggttttgtttgctgttgggtgtttggggcagagttaaccatttctccatggtgtctttatactttactggtttgtgaattttatacaattgaaagtctttttttcttgcttctttcttctcttctcaagtttcccccctgtttctactttattgtttgtcctaaccatttctactacagttttttccttatggacccatactaggttgtacaaaccttaaggactcgttaccatttgcagttaccataagtgctttatcttctctatgcacaggcttaaacttgactgttgtatgttagcatattttctatgcagcagttggtcaacttcaactcaaaacactgttttcttatgtttgttacaaacttaattttttgaaagtactctgtagcatgacaatttttagagctgcaggttagctattatagctcaagcttttttgtttgtttttttcttcactttcttcacatctgaggtttctttctctaatccactgaaattattgtgtgctaaatttgggaaacagatctattctaactcattaacccagttgaaatttaggtctgtcatcttaatatatcatgcagtaaaaggaagaatctttttaaagtgacccacctttcatgctgctccagcattgtcctgcttgtgctgatggtgtgattaggtgtagagaatttgcttaaatttaacttcaaagttcatcacacagcttaatgagtcacattgaaatactcagtaattgaactgcaaatcacttttagttacaaaaagagctaaagcatgtcagtggcatgatgcttgccaagccagatctaggcatctaggataattaaggtattttagtatgcaatttactgccataatatcaaaggtcagtaacagtgttctttctttcttcaagcttatgtatacctttaaagataacttgcatgaattactttgattactttggtctcaattatttgtcaccccagttaaacatgaaaggttgcagtgcttcctgttcccttactggaagttagctttttcttttctctttcttcctttctttctctcactctttctttctctttctctttctctctctctctctctctcactcactcactcacagatttgctaatgccacagaaagggctcttttaacttaagataagtgaaaagtactaaaaaagattcaggtaattatcattcagcactttattgtaattcagaataaaatttatgatggcatatttgccctgcaaatgtcttaatgaagttgttctcaataaaaagctccttattgatttgagaaaaactcagtttacctgtgagttcaatgagctggatcactcacttggatttttgtgttgacattttattctgagggttgatgttacactatttaaggagtcatcaatgcaaacagtcacattaggtatgtcatcatctttagtcagtaaaaaccttgtaatgaggagtagtaaataaacaagagaacattagactttttggttaaataattgagatttaatttttaaaagatattcttactcatttgctaggttgtaaatttgatttcaccattaagaaaaggtaaattggatataaatgaacgatctccaactttttgatgaagaggttttactatctctcactgtgggaaaatttgatgaaatatttgaactgtcacatatattaagaatactttatgatttagaccaatattctagaaatatcaaatgtcagtatcttgaaatcatctgcctctaactttgtggtataagaattatatatgaataagctattatttttataaaggaaaactttgccattatagtaaattacattagttgatctcgataatttgaggataacagatgacaattgaatttttaattgatttagtatttcctcctcctctttgggggctgggtgggagggcttacatgctcttatagtgaggcacatctcactgttttgcagcagaatttgaattgtgcaactcctgtgtaaagtaaggatttctttaaatagcatttttgcaccagtaaaaatagataacttagaactcagtcttgataactgaaatgacttatttcacttagaatacatttctcccttctctgccatctccacaaatgccattgggaggttttgaaaaaccagttaatttaatagctcaaaattgtccctgattttattttcttttagggaaaattgtttcataaatgtgacactgataaagcctttgtcagaaagtattctcacaattatgagatggattataataaaatacttaaatttgtgttattttttgaaccacagatgagtaaatttaataatgaaccaattacactcttgagtctaactaaactgtacactgtagcacggtgttattgactggagttaatgtgtaagttattaacatttctatgaaaatgcccttttggggcctcctgaattttagatgttccactgttttgatcatttctataaaagaaatggtcattttacttagatgccagtctactttataaagacaaatggattatagacttaaaaatagtcatttttcttattcataaatctgacaggcataaacccaaatcaaagataatttggtgcccattatgaatttgaagttaagtgatagctcacttgtaaagtgactaccttaatgtgtatagagaccccagtctactattatttgggaaaattgtttaggttatatgggaaaagtagctctttaaaaatcatattgcccaacagaaaccttaggctgaatttacaggtatgataatttttgtaattaattttcttagaattgtgcaggctggatgagataatgacatactcttttacactgtaacagcagcattattgcctagaactttaaccattttagagttagatactaaggaaacaaactaattggtcatcatcattttctttttttctttttcttttttttttttttgcccttatgtgtcactaaacaactagtttctctcccttttgtcagttcccattgtgtattttttcaaaagaagtactgtattcggatgccagctaataaattgtcacacaatggaaaatcatatgccacaacattcattgtaaggtttaataaaattaaatttgcacc

SEQ ID NO: 3371 - DNA, 4814 bp, Homo Sapiens
  NM_020184
agttggctcggcggcagcggagcggccggagctgcggtgcggaccggggccgcgcggcgtggcgcggggagcggcggcggcggcagagccagagcaacatggcgccggtgggcgggggcgggcgcccggtcggcggaccggcccgcgggcgcctcctcctggcggcgccggtgctgctggtgctgctgtgggcgctgggggcccggggccagggcagcccccagcagggcacgatcgtgggcatgaggctggcgagctgcaacaagtcgtgtgggacgaacccggatggcatcatcttcgtgtccgagggcagcaccgtgaacctgaggctgtacggctacagcctgggcaacatctccagcaacctgatctccttcaccgaggtggacgatgccgagaccctccacaagtccaccagctgcctcgagctcaccaaggacctggtcgtccagcagctggtcaacgtgagccgcgggaacacgtccggcgtgctggtggtgctcaccaagttcctccggaggagcgagagcatgaagctgtatgcactgtgcacccgggcccagcccgacgggccctggctgaagtggacggacaaggactcactgctcttcatggtggaggagcctgggaggttcctgcctctctggctgcacattctcctaattacggtgctgctggtgctgtcgggcatattttctggcctcaacctcgggcttatggccctggaccccatggagctgcgcatcgtgcagaactgtggcaccgagaaggagaggcgctatgcccgcaagattgagcccatccggcgcaagggcaactaccttctctgctcgttgctcctagggaacgtgctggtcaacacctccctcacaatccttctagacaacctcatcgggtccggcctcatggcggtggcctcctccaccattggcattgtcatctttggggagatcctacctcaggccctgtgctcccgacatgggctggctgtgggtgccaacaccatccttctcaccaaattctttatgctactcaccttccccctcagttttcccattagcaagctcctggacttttttctgggccaggagattcgcactgtttacaaccgggagaagctgatggagatgttgaaggtgacggagccctataatgacctcgtgaaagaggagctcaatatgatccagggtgccctggaactacggaccaaaactgtagaggatatcatgacccagctccaggactgcttcatgatccgcagcgatgccatcctggacttcaacaccatgtcggagataatggaaagcggctatactcgcatcccggtgttcgaagacgagcagtccaatattgtagatattctctacgtcaaagacttggcctttgtggaccccgatgactgcacccccctcaagactatcactcgcttctataaccacccggtgcactttgtcttccatgacaccaagttggatgccatgctggaggagttcaagaaggggaagtcccacctggccatcgtgcagaaggtaaacaacgagggtgagggtgaccccttctacgaggtcctgggcctggtcaccctggaggacgtgatcgaggagatcatcaagtcggagatcctggacgagtccgacatgtacactgacaaccgaagccggaagcgggtgtctgagaagaacaagcgtgacttctctgccttcaaggatgcggacaatgagctcaaagtgaaaatctccccgcagctcctcctggccgctcatcgcttcctagccacagaggtctctcagtttagcccctccctgatatcagagaagatcctgctgcggctactcaagtacccagatgtcattcaggaactcaagtttgacgagcacaataagtactacgcccgccattacctgtacacccgaaataagccggccgactacttcatcctcatcctgcaggggaaggtggaggtggaggcagggaaggagaacatgaagtttgagacgggcgccttctcctactatgggactatggccctgacctcggtcccctccgaccgttccccagcacaccccaccccactcagccgctcagcctccctcagttacccagaccgcacagacgtctcaactgcagcaaccttggcaggcagcagcaaccagtttggcagctctgtcctgggccagtacatctctgacttcagcgtccgggcactcgtggacttgcagtacatcaagatcactcggcagcagtaccagaacgggctgctggcttctcgcatggagaacagccctcagtttcccatagacgggtgcaccacccacatggagaacttggccgagaagtctgagctgcctgtggtggacgagaccacaactcttctcaacgagcgtaactccttgctgcacaaagcctcccacgagaatgccatctgacaggagggcccggggccccctgcccaccctgcgggggcctccccagtgggcccacatgaagagagggaacctgttagtccagaaaggatacggatagatagcctgtctgactgaacagccagatggcccccagcctatgggggatctggcctctgccagggacctctgagtagctctgaggtggcactgtccagccctggatagggggggcagtgggccagctaccgtaagcaaaggctgttttttactgagagaatttctaaagtaggctcatcacttttttttaaatatcattttgggaagggaagacagggttaaggaactttatttaaaaaaaaaatatttttttcctaaaaactataaaagaggaagggtttcttgtcccgggaagcaacggacataatctgttcccagccatggccttccagcttgtgtccctgattcagggagctctcccttcctcctcctcctcctcctccggaggtgggatcccagagcctgccagtggaggcttatctgttgggaggaagacagctcttcacagaagcaaagaacaaaatggcatggagatcagctgcctgagcacctgcgctgtagcttatctgacaacgctgaggccacgagctcctgggtagctgtgatcagggacatgataatctgagctatgcagaggagcacatctgttgtcaactgctgtacccagaaatctagaactctgccgacagcctctcctggtgagtcgggactcagctgaggacacatccccaccctgcctcccatctggccctttggacaactggccctttgtgacagggctgactcaagtgttaggcagggtctcaggcctttgattgctcacccctgctccccaggccctgccctcacttttaccaaaggttctccctcggcgggagggcatctgtgttggaggtgatttgtctgggttcttccttttggttccagaaggaactgtcagtcatcagcatctgcgttgttagcagtcagtaccacccccgccccacaatgacagtcaaggctgacttgttgactgaagcctttttcccagaccccttatttcgaatccccaagcttcagtccctcttgggggtggagacaagaggacatgtgggaagccacggaagcaggttctttatgtcctctcctctgtggctggcaaggctcacctggccttatccacccacttatggaacctcaggagaggagggctcctcctaaaggcatgcagcttgcagcccctctttctcacacgtgtgatcctagcgtgagaggtcatcctgcccttgctgaagttagtagtactgtactaagagctctgccctcatgtgaattcctgccctggcgcctcttccctggggctgaatcaggccctgctgcaaaactccaggcttcccagggttggggaggctgtgggaccaaggtccatgttggtccttccactgggtgcagcaggagctgggtcccgagagcctggcaggtgaaactctgcaggccttccgcctgattattatttattcactcctttcctcaccccaagtgccctgctctccaggtgcctagagtatcctaactcttaggaccagggattgtcttgcaccaagtatgcctacccctggccagtctgaggtctcctagccatagaactgactcctggaagcctggagagaaggtggtgacacccatgggttctcaactgtaaggaaaaaagacaccagacttttgttccctagtgggggaaagcccttagtcttgtacaggagcagcttgctcccaagtccttttggaagctggcagagctatattcctgacagccctgactgccaggtagagcaaaagacattggtgggggtatgtgaagcaaaaggggcaggtgcacacacctccacagtgacctctgtgcacacggttaccaccaactggctggccctcctcctcttccctggcccattgatcatcccttctcacagagggtcatcattatttccaaatattgtttgtctgatgacttcctcttcccagtgcaatttttcccttcctatttcaacctctggttcctgggatgagccataccctggaactggcccacccactgtgtcttccacgtaagggagacctttgcaaagggcatccaaatgggtaggcaggtgacagccgccgtatttattttgcataatattttaatttgtatatttttgtgatttattttggcgttatgagtttgactctcggggagttttgttgttatgactcttgtgtcttttgtcacaaaacaatgatatttgctaaacgatatatggaatttatttttgattggtaataaaaaatcaaatatgtataaatcctggtgaatctacaaaaaaaaaaaaaaaa

SEQ ID NO: 3372 - DNA, 4280 bp, Homo Sapiens
  NM_021970
ggaggggaggggcgcggccgccggacgcgccctcgcagcttccgccgggcccctccggaaatcccgtatcgtagggcgacggcggcttagaaagtgcttcctggagcgcagacgaggtcatgaatcatgtgacggtggcttgaggaggaacctgtctttaaagctgtccctgaagtgacagcggagagaaccaggcagcccagaaaccccaggcgtggagattgatcctgcgagagaagggggttcatcatggcggatgacctaaagcgattcttgtataaaaagttaccaagtgttgaagggctccatgccattgttgtgtcagatagagatggagtacctgttattaaagtggcaaatgacaatgctccagagcatgctttgcgacctggtttcttatccacttttgcccttgcaacagaccaaggaagcaaacttggactttccaaaaataaaagtatcatctgttactataacacctaccaggtggttcaatttaatcgtttacctttggtggtgagtttcatagccagcagcagtgccaatacaggactaattgtcagcctagaaaaggaacttgctccattgtttgaagaactgagacaagttgtggaagtttcttaatctgacagtggtttcagtgtgtaccttatcttcattataacaacacaatatcaatccagcaatctttagactacaataatacttttatccatgtgctcaagaaagggcccctttttccaacttatactaaagagctagcatatagatgtaatttatagatagatcagttgctatattttctggtgtagggtctttcttatttagtgagatctagggataccacagaaatggttcagtctatcacagctcccatggagttagtctggtcaccagatatggatgagagattctattcagtggatcagaatcaaactggtacattgatccacttgagccgttaagtgctgccaattgtacaatatgcccaggcttgcagaataaagccaactttttattgtgaataataataaggacatatttttcttcagattatgttttatttctttgcattgagtgaggaacataaaatggcttggtaaaagtaataaaatcagtacaatcactaactttcctttgtacatattattttgcagtatagatgaatattactaatcagtttgattattctcagagggtgctgctctttaatgaaaatgaaaattatagctaatgttttttcctcaaactctgctttctgtaaccaatcagtgttttaatgtttgtgtgttcttcataaaatttaaatacaattcgttattctgtttccaatgttagtatgtatgtaaacatgatagtacagccatttttttcatatgtgagtaaaaataaaatagtatttttaaaaatatagtttgagcactgtataggtcctttttttgttcagactttttccaaaaatctaaacataattaatatactctttcagccacatgaataaataatgagtgtttcttgtaggtattggtttggagattgttttacggtagtatgaactgttaactggaaaagaaacctgagattgcagtcagccaagattgtgccactgcaccccagcctgggcaacagagactccgtctcaaaaacaaaaaagaaaagaaaccaagaaacctcaggcatgaacctaatttaatctccatgaaagaggtactacagttctagaatataccctttatgttcaggaatgcagtctatcattcagagttaatttctttctaggctctttgacaatcagtttttccctggatcagttcagtacatatgcattgagcacctgtgtgccagtcagccgagctatcacattgcacaattctaagaagcaccattcatgtctcatcatatttctatgctctgggagttgcctttcacatagaatatgtgtgattgttatccctagaattgtgcagtgaggcaattggctaggtgctgtgctgctttttctttctttctttttttttttaagagacagagtcttgctgtgttgcccagtctggagtgcagtggtggcatgatcttgcctcactgtaacctctgcctcctgggttcaagctgttctcatgccccattctcccttgtagctgggattacaggcttacaccatcgcacttggcaaatttgtgtatttttagtagagacaggaattcaccatgttggccaggctggtcttgaactcctgacttaaagtgatccacctgctttggcctcccaaaatgctaggattataggtgtgagccactgcaccgggccatgtgctactttttcttccttccatccttcctcccttcttcagtgtaaatatgagattaatttgtgataccttactttaaagaacttagagttcagtaaaggaagcaggtatagaaagtgctatgataaagctatacataggatggtatagaaccacagactaggggcacttaaaatgggcaagaaaatagcctttgtaaataaaatagaggcaagagatataatgctttacctgcaaagagctataaatacagccatgtaccatataatgatgtttcagttagtgaaggaccacatacgagggtggtcagaacagcaggctataccatatagcctaggtgtgtagtaggctataccatatagcctaggtgtgtagtagtaggctataccatatagcctaggtgtgtagtagtaggcgataccatatagcctaggtgtgtagtagtaggctataccatatagcctaggtgtatagtagtaggctataccatatagcctaggtgtgtagtaggctataccatatagcctaggtatgtagtagtaggctataccatatagcctaggtgtgtagtagtaggctataccatctggggttcctgtcagtacagtatgatgttcacataatgatgaaatcacctaacaaagcatgtctcgaaatgtatccacattgttacgtaacacatgactgtagttaattgttacaattgaaatactagatgtactcattgaaatccagaattcccattatctggattatttaatatcgttcaggaaatttttgccagtgcaatggtgcatgaaacaatgtcttttagaaatgaggtggccagatttctatttgcagataataattgtatatctaaaaatcctagaaaaagaaatgataacaaatggagctacttaacctttacatgttgaatgctgccactgttaaaatttctgagggggtataatagataaactatcccatagttcatctggaaaaataaggtggtgaaaattgctaagaaatttttgaaagggtaatgtaaacctagattaactgtttttgaaaggtagtacagaactgaatgcacaactagatatcaatggtatgtactcacccagaaaaaagacttcagtacatacatgtgagggcttaaaacattgttataaagacgggatcacaatgggaaaaggattattcaataagtagggcaggcattctctatgcctgctagggaagtgtgacttgttatactctttatgtacagcaattggcagtctgtgaaacttttaaattcatatacataaccttttgccctgcaattccacttctagaaatttatcctaccaaacaaagcacatagatgtgcaaaagtatgtatttacaagtatattctttgcaacttggtaatgtcaaagaattggaagcaacctaaatatctgccataggtaggataaccatatgctttggctttttgaacactaccagtttatacctgctgttcttggataattattaatagtgctttcattctcaatgtctcactttagataataaattacagaggattggtgaaactaatttgcccaatggaaaaaggaatgaagaagtgctttaggtactgagatgaaaagatctctaaggcataataatgtttattgagaaaagcatggtgtcaaactgtatggcatgctacaattgatgtataagaagaaaaaatgtgtatgtattcctatttgtttgtatatggtagactgtctctgaagacatatatggaagaacctgatcacattggtagtctccaaggagcagaactagatacctgggggataaggatcccaggagtgagccttttcattgtaaacttcattgtactttgagtttttaactgttcaaaaataataaaattagaaataaaatatttcaacaaacaataaaatgggatatttggggaagaaagttgtctcagggctctccaaagaagcag

SEQ ID NO: 3373 - DNA, 2892 bp, Homo Sapiens
  NM_021976
caaagatggctgccacattggcgctgtcattttggtactgagcagagcgacgggcttaattcgacccaatccaggccagagtctttctctcaggggcttcctcgtgctcagctaatcctccgatcaatccttgggaatccctgggacctcttcggtatccctactctcagccagggatcatgtcttgggccgctcgcccgcccttcctccctcagcggcatgccgcagggcagtgtgggccggtgggggtgcgaaaagaaatgcattgtggggtcgcgtcccggtggcggcggcgacggccctggctggatcccgcagcggcggcggcggcggcggtggcaggcggagaacaacaaaccccggagccggagccaggggaggctggacgggacgggatgggcgacagcgggcgggactcccgaagcccagacagctcctccccaaatccccttccccagggagtccctcccccttctcctcctgggccacccctacccccttcaacagctccatcccttggaggctctggggccccacccccacccccgatgccaccacccccactgggctctccctttccagtcatcagttcttccatggggtcccctggtctgccccctccagctcccccaggattctccgggcctgtcagcagcccccagattaactcaacagtgtcactccctgggggtgggtctggcccccctgaagatgtgaagccaccagtcttaggggtccggggcctgcactgtccaccccctccaggtggccctggggctggcaaacggctatgtgcaatctgcggggacagaagctcaggcaaacactacggggtttacagctgtgagggttgcaagggcttcttcaaacgcaccatccgcaaagaccttacatactcttgccgggacaacaaagactgcacagtggacaagcgccagcggaaccgctgtcagtactgccgctatcagaagtgcctggccactggcatgaagagggaggcggtacaggaggagcgtcagcggggaaaggacaaggatggggatggggagggggctgggggagcccccgaggagatgcctgtggacaggatcctggaggcagagcttgctgtggaacagaagagtgaccagggcgttgagggtcctgggggaaccgggggtagcggcagcagcccaaatgaccctgtgactaacatctgtcaggcagctgacaaacagctattcacgcttgttgagtgggcgaagaggatcccacacttttcctccttgcctctggatgatcaggtcatattgctgcgggcaggctggaatgaactcctcattgcctccttctcacaccgatccattgatgttcgagatggcatcctccttgccacaggtcttcacgtgcaccgcaactcagcccattcagcaggagtaggagccatctttgatcgggtgctgacagagctagtgtccaaaatgcgtgacatgaggatggacaagacagagcttggctgcctgagggcaatcattctgtttaatccagatgccaagggcctctccaaccctagtgaggtggaggtcctgcgggagaaagtgtatgcatcactggagacctactgcaaacagaagtaccctgagcagcagggacggtttgccaagctgctgctacgtcttcctgccctccggtccattggccttaagtgtctagagcatctgtttttcttcaagctcattggtgacacccccatcgacaccttcctcatggagatgcttgaggctccccatcaactggcctgagctcagacccagacgtggtgcttctcacactggaggagcacacatccaagagggactccaagccctggggcagggtggggggccatgttcccagaaccttgatggggtgagaagtacagggcagaaccaagaacataaaccctccaagggatctgcttgatatcccaagttggaagggaccccagatacctgtgaggactggttgtctctcttcggtggccttgagtctctgaatttgtcgggttctcccatgatttggggtgatttctcaccctctgtccttcccccagcacaaagcactggccttgcctccaggaccttgcttccttctcatcttgcctcattttgcttcccatctgaagagtggaaatggggaactcccccagaggtggatactggggggcaggcctcccaagctgatggacatgagagtagggccctgacaggccttcctcctctcaaacctggcagatgggggcctctctggaagagggaggggccctgtcactgtccagagtctctttttacacttcacctccttctgcagtcagactgaaatataaaaaaggtggtggtggtggtgaaggggctggtggagatgtaggaaccgatctgctatttttaatttcctgtgaggatagagacttgcagttagactcaaagaagtactgtactttcccaggttgactaagaaatgccagtggtggaggtgggtgtttgggaaaggcagggccctgaaatggcctgtccctagggctctccaagcactagccttcccagcttcccgccgccccccctatctcttcctgtctaacttggggaaggggcctgggctgtgaggacagggcccccacaggggatggtttcacgagtgtagtcccggaggccttccctttacagctctcctccagccctgggcacatagcataggctggggacacaggatcctggcctgagaattgaggggaggtggccagcccgcagaggtggggtgctggggctgcatgatttttgccctgcgtcccttctctttggggctcctttcccctctcatacataaaatcgctttcaaattaaaatcgctgttttctggaaaaaaaaaaaaaaaaaa

SEQ ID NO: 3374 - DNA, 3319 bp, Homo Sapiens
  NM_021978
agcggagctgcagccggagaaagaggaagagggagagagagcgcgccagggcgagggcaccgccgccggtcgggcgcgctgggcctgcccggaatcccgccgcctgcgccccgcgccccgcgccctgcgggccatgggagccggccgccggcagggacgacgcctgtgagacccgcgagcggcctcggggaccatggggagcgatcgggcccgcaagggcggagggggcccgaaggacttcggcgcgggactcaagtacaactcccggcacgagaaagtgaatggcttggaggaaggcgtggagttcctgccagtcaacaacgtcaagaaggtggaaaagcatggcccggggcgctgggtggtgctggcagccgtgctgatcggcctcctcttggtcttgctggggatcggcttcctggtgtggcatttgcagtaccgggacgtgcgtgtccagaaggtcttcaatggctacatgaggatcacaaatgagaattttgtggatgcctacgagaactccaactccactgagtttgtaagcctggccagcaaggtgaaggacgcgctgaagctgctgtacagcggagtcccattcctgggcccctaccacaaggagtcggctgtgacggccttcagcgagggcagcgtcatcgcctactactggtctgagttcagcatcccgcagcacctggtggaggaggccgagcgcgtcatggccgaggagcgcgtagtcatgctgcccccgcgggcgcgctccctgaagtcctttgtggtcacctcagtggtggctttccccacggactccaaaacagtacagaggacccaggacaacagctgcagctttggcctgcacgcccgcggtgtggagctgatgcgcttcaccacgcccggcttccctgacagcccctaccccgctcatgcccgctgccagtgggccctgcggggggacgccgactcagtgctgagcctcaccttccgcagctttgaccttgcgtcctgcgacgagcgcggcagcgacctggtgacggtgtacaacaccctgagccccatggagccccacgccctggtgcagttgtgtggcacctaccctccctcctacaacctgaccttccactcctcccagaacgtcctgctcatcacactgataaccaacactgagcggcggcatcccggctttgaggccaccttcttccagctgcctaggatgagcagctgtggaggccgcttacgtaaagcccaggggacattcaacagcccctactacccaggccactacccacccaacattgactgcacatggaacattgaggtgcccaacaaccagcatgtgaaggtgcgcttcaaattcttctacctgctggagcccggcgtgcctgcgggcacctgccccaaggactacgtggagatcaacggggagaaatactgcggagagaggtcccagttcgtcgtcaccagcaacagcaacaagatcacagttcgcttccactcagatcagtcctacaccgacaccggcttcttagctgaatacctctcctacgactccagtgacccatgcccggggcagttcacgtgccgcacggggcggtgtatccggaaggagctgcgctgtgatggctgggccgactgcaccgaccacagcgatgagctcaactgcagttgcgacgccggccaccagttcacgtgcaagaacaagttctgcaagcccctcttctgggtctgcgacagtgtgaacgactgcggagacaacagcgacgagcaggggtgcagttgtccggcccagaccttcaggtgttccaatgggaagtgcctctcgaaaagccagcagtgcaatgggaaggacgactgtggggacgggtccgacgaggcctcctgccccaaggtgaacgtcgtcacttgtaccaaacacacctaccgctgcctcaatgggctctgcttgagcaagggcaaccctgagtgtgacgggaaggaggactgtagcgacggctcagatgagaaggactgcgactgtgggctgcggtcattcacgagacaggctcgtgttgttgggggcacggatgcggatgagggcgagtggccctggcaggtaagcctgcatgctctgggccagggccacatctgcggtgcttccctcatctctcccaactggctggtctctgccgcacactgctacatcgatgacagaggattcaggtactcagaccccacgcagtggacggccttcctgggcttgcacgaccagagccagcgcagcgcccctggggtgcaggagcgcaggctcaagcgcatcatctcccaccccttcttcaatgacttcaccttcgactatgacatcgcgctgctggagctggagaaaccggcagagtacagctccatggtgcggcccatctgcctgccggacgcctcccatgtcttccctgccggcaaggccatctgggtcacgggctggggacacacccagtatggaggcactggcgcgctgatcctgcaaaagggtgagatccgcgtcatcaaccagaccacctgcgagaacctcctgccgcagcagatcacgccgcgcatgatgtgcgtgggcttcctcagcggcggcgtggactcctgccagggtgattccgggggacccctgtccagcgtggaggcggatgggcggatcttccaggccggtgtggtgagctggggagacggctgcgctcagaggaacaagccaggcgtgtacacaaggctccctctgtttcgggactggatcaaagagaacactggggtataggggccggggccacccaaatgtgtacacctgcggggccacccatcgtccaccccagtgtgcacgcctgcaggctggagactggaccgctgactgcaccagcgcccccagaacatacactgtgaactcaatctccagggctccaaatctgcctagaaaacctctcgcttcctcagcctccaaagtggagctgggaggtagaaggggaggacactggtggttctactgacccaactgggggcaaaggtttgaagacacagcctcccccgccagccccaagctgggccgaggcgcgtttgtgcatatctgcctcccctgtctctaaggagcagcgggaacggagcttcggggcctcctcagtgaaggtggtggggctgccggatctgggctgtggggcccttgggccacgctcttgaggaagcccaggctcggaggaccctggaaaacagacgggtctgagactgaaattgttttaccagctcccagggtggacttcagtgtgtgtatttgtgtaaatgagtaaaacattttatttctttttaaaaaaaaaaaaaaaaaaaa

SEQ ID NO: 3375 - DNA, 6387 bp, Homo Sapiens
  NM_021982
ccggccagggcctccctccttctctctaggtttggctgccgccttctagccgggcgttcgcggccccgccggcccgactctcaagcctcagctcccaggctaggctgtggccgccggtggcctggggagagtgcggcgccatgcctcgggcttaatgcgcccccccctcttctcccagtcttcagtcttaagtcgttagcctcctccctccgctttcagcagtggtctttcagctctcttcttgtgcgctgttgtcgaccccgaccagccccttccaacccagtcatcatgtcccagccgggaataccggcctccggcggcgccccagccagcctccaggcccagaacggagccgccttggcctcggggtctccctacaccaacggtcctgtccaaaatgcattgctgtcttcacaagagtcagtgagccaaggatacaatttccagcttccaggatcctaccctcatccaataccagcaaagactttgaatccagtctctggacagtctaactatggtggttctcagggatctgggcagactcttaatagaccacctgtggcctctaatccagtgacaccttcgcttcatagtggtcctgctccccgaatgccattacctgcttctcagaacccagctactacaccaatgccttctagtagctttcttcctgaagccaacctgccaccacctttgaattggcaatataactatccatccacagcctcacaaacaaaccattgtcctcgtgcatcatcccaaccaactgtatctggaaatacaagtttaaccacaaatcatcaatatgtttcttctggatatccttcacttcaaaatagcttcataaagtcaggtccttctgtacctcccttagtgaatccacctctgcctacaacttttcaaccaggagctcctcatgggccccctccagctggaggcccacccccagtgagggccctcacgcccctgacatcatcatatagagatgtaccccagcccttatttaattcagctgtcaaccaagaaggtattacatcaaataccaataacggatctatggtggtccacagtagttacgacgagattgaaggaggtggcttattggcaacaccacagcttactaacaagaatcccaaaatgagccgaagtgttggatattcatatccctccttaccacctggttatcagaacacaacaccacctggtgcaactggagtaccaccctcttccttgaattacccaagtgggccacaagcctttactcagactcccttaggtgctaatcatttaaccacaagcatgagtggattaagtctacaaccagagggtctaagagttgtcaatcttcttcaagaaagaaacatgcttccgtcaacacctttgaagcctccagttccaaatttgcatgaagacatccagaaactcaactgtaacccagagttatttcgatgcacgctgactagcattcctcagacgcaggccttattgaataaagccaaacttcctttggggctgctgcttcatcctttcaaagacttagtgcaattgcctgtggttacctccagtacaattgtgagatgccgttcatgcaggacgtacatcaatcctttcgtcagctttcttgatcaaaggagatggaagtgtaacttatgttatcgagtcaatgatgttcctgaagaattcttgtacaaccctttgaccagagtttatggagaacctcacagaagaccagaagttcaaaatgctactattgagtttatggctccttcagaatacatgttacgaccacctcagcctccagtgtatctctttgtatttgatgtgtctcacaatgcagtcgaaactggatacttgaattcagtttgccagagtttgttagacaatctggatttgcttcctggcaacactagaacaaaaattggcttcataacatttgacagtacaatccatttctacggtcttcaggaaagtctctctcaacctcagatgctaatagtttcagatattgaagatgtttttatacctatgccagagaacttattagtaaacttaaatgaaagtaaagagctcgtgcaagatttactgaaaactttgccacaaatgtttaccaagactctggagacccagagtgccttgggtcctgcactgcaggctgcctttaagctgatgtctccaactggtggtcgaatgtctgtctttcaaacacaactcccaactcttggagtgggagccctgaaaccacgagaggaaccaaaccacaggtcatctgctaaggatatacacatgacaccatccactgacttctataagaaattagccttggactgttctggtcagcaagttgctgttgacttattccttctcagtggacagtattctgatttggcttctctgggttgtatttctcggtattcagcaggtagtgtctattactatccctcttaccatcatcagcacaacccagtccaagtacagaaattacagaaggaactacagagataccttactcggaagattggctttgaggcagtcatgaggattcggtgcaccaaaggtctttccattcatactttccatggaaacttctttgttaggtcaaccgacttactgtctttgcctaacgtcaacccagacgctgggtatgcagtacagatgtcagtggaagagagtcttactgacactcagttggtttcttttcagtcagcactcttgtatacatccagcaaaggcgaaagaagaattcgtgttcatactttgtgtttgccagtagtttcgactctgaatgatgtctttcttggagctgatgttcaagcaatttcagggttattggccaatatggctgttgacagatctatgactgccagtctgagtgacgctcgggatgctctagtgaatgcagtcattgactccctttcagcttaccgttcttcagtcttaagtaaccagcagcctggactcatggttcctttttctttgcggcttttcccactttttgtgttggctctccttaaacagaaatcattccagactgggacaaatgcacgtctagatgaacgcatttttgctatgtgtcaagtgaaaaaccagcccttggtttaccttatgctcacaactcatcccagtttgtatagagttgacaatctctcagatgagggagcactcaacatcagtgatagaaccatacctcagccccccattcttcagctttcagtggagaagctgagcagagatggagctttcctcatggatgcaggctctgtactgatgctttgggttggaaaaaattgtacacagaattttctcagccaagttctaggagttcaaaactatgcatcaattccacagcctatgacagaccttccagaacttgatacaccagaatctgccagaataatagctttcatctcttggcttagagagcagagaccatttttcccaatactttatgtaataagggatgagagtccaatgaaagcaaacttccttcaaaacatgatagaagacagaacagaatctgcattatcatattatgaattcctgttgcatatacagcaacaagtgaataaatgaatgaatgaagaaatttgacttatttttaaggaatgtcacgatagtgcagaatacctggaaatgtgtaataccttctttttctattatgtttgtggactaatgtgatgattgagatgttctcactgtgatttcaacaacctatagcaaataaaagaccacagcagagaatcaaacatgcaactctgaaatactgtatttttcaaatcagaatatagctacgtatgattggatacttttttcttgccaattatgtttgagttgttatggattaaaataagaatattgcagaggcaaagtacattttgtaaaataaagatttctgtgttctacatgtatatttctcatttttaatttttctgaatctttggctgctacatttaaaacctcacaaacctaagtgttgcagggaagttacaaattgattggtagtgatgtttttaaaataaaaacaatggaaagtaaatataatgtaggaaaactagaattcattccccacacgtgtcttttttttttctttgttaagggaaaggatcatgttgactaaaactaaactaattctagtatagcttgagaaaaatatgaagaaacacattcaagctttaaaatctgtcagtattctttatgcttgaagaacaaagtcactttgatttgaagtgagaactatcattaggtggttttctgatttcctgatgaagagttggacatactgtcttaatctatagtgaaaagaatttgagctgtcttcataaacactgggactagcaatgataatagggagataagaaactttaattatcttgatcctttaagtggattttatttggtgcatttctgctctgggtatataataaaagtgggggtttttggtgaaatgagtgaagaaatgaaaggtttctaaagtgctatccaaatacatcagtaacatttttctaaggagtttaattgttaaattggaagtcattcataagaaatatttatgcttgaatatgaaaatctatgaaagcataaatgctgctgtttgatttggtggatattaagattatacacatccaacatattaaagttatgaaagaaacttgacttctgaaaatccttaagagactgctttcttgattcagctagagaaatattatagtcaaaactattgagtgaattttgtttacaaataggtaaattatacatttgtatatttaaagtgctgtgacatagtatctttaagagtttggctcagttttcacagattcattttgtcttaagaatttcttaaatatgttcatgtataatacttgatcaaaatatttttgggttttttgttttgttttaatgggttagaaaatgtttacaatcttggtcttatatgatcaccaatggaatagtaacttccaggtttatatcaatatgagctgactttaactgagttgtttgggatagggaagaagcagtccctctacagtatacaactactgcttgccagctggatcaaaataatcatgttttatgaaaatatctcccttaagcagtgttaaggttggtttgcagtgtgtaagtggcacattgaactggaagttttcttgaaagctgcttcatctattaagaagcaattttcaaattgtagcgaattatattatcccctcttttaaagaaacagtcgttatatgctgatgtttcttaaaataactaaaatgttcctcttaatgtgattttaaatggagttatttgtaggtcctttcttagtagtaaagaatcttctagagggaaacatttgtgcttttagggataatcttccttgtgcctcactacatccctaagtgggtatgactcttgttattaccacatgcttttttagtatatttcacaaatttacttttaaatattattttagatacggtgtaacatgtgcaattcagaataattttataacaggtcatgaaaaacataactttagttaggattcacaatatttgttctccacataatgagagaatgaatgagcctttggagatactgatataaggcaattattttttgcaatgttgaatgtgttttttagtttgattctttttttttcccccaatagggcactacctgccatatcatcttgtattactttttgatgtaaagcgactaatatttacactatgccatattttttttaattatagttgtaaattatgaaagatccttgaattttctacagatctacaactactaatgtaacagacaagggcaatcttggtatttaaatctgagcatggcagttctaccataaaaagtactctatttttctaatttctaggatttttaaaataacatttctgtaagtctgacatactaatagtcactcaagcagtaccatttattttagtttgcatatattttcactgtttttaatttaatgtattgagtctaatagactgttttgcaataattagaataaagatttatttcttctaatcaaagatgcataacagctattatctaggggaccaccaaatgtgatttcaaaattttgttaactattacaaatgtaatccttatatagaaattttaattttgtaaagtagtgtataatattgtaatattaaattcttgttcttaaattcaaatatgtattgatcttcaatgtgctgtgttaaatcttgcttctctgaaaagttggagacaagatttgtcttcctttttacagtttgtaattttcactgttttattcctgttaaaaaaaaaaaaaagtcatttgtaacccatgcagaccattgtttgatctatgctaacttatcaacttggctattcaataaagttaattgaaaagagcttata

SEQ ID NO: 3376 - DNA, 1193 bp, Homo Sapiens
  NM_021983
ggggggccatagttctccctgattgagacttgcctgctgctgtgaccactggtcttgtcctcttctccagcatggtgtgtctgaagctccctggaggctcctgtatggcagcgctgacagtgacattgacggtgctgagctccccactggctttggctggggacacccaaccacgtttcttggagcaggctaagtgtgagtgtcatttcctcaatgggacggagcgagtgtggaacctgatcagatacatctataaccaagaggagtacgcgcgctacaacagtgacctgggggagtaccaggcggtgacggagctggggcggcctgacgctgagtactggaacagccagaaggacctcctggagcggaggcgggccgaggtggacacctactgcagatacaactacggggttgtggagagcttcacagtgcagcggcgagtccaacctaaggtgactgtgtatccttcaaagacccagcccctgcagcaccacaacctcctggtctgctctgtgaatggtttctatccaggcagcattgaagtcaggtggttccggaacggccaggaagagaaggctggggtggtgtccacaggcctgatccagaatggagactggaccttccagaccctggtgatgctggaaacagttcctcggagtggagaggtttacacctgccaagtggagcatccaagcatgatgagccctctcacggtgcaatggagtgcacggtctgaatctgcacagagcaagatgctgagtggagtcgggggctttgtgctgggcctgctcttccttgggacagggctgttcatctacttcaggaatcagaaaggacactctggacttcagccaacaggactcttgagctgaagtgcagatgaccacattcaaggaagaaccttctgccccagctttgcaagatgaaaagctttcccacttggctcttattcttccacaagagctttgtcaggaccaggttgttactggttcagcaactctgcagaaaatgtcctcccttgtggcttccttagctcctgttcttggcctgaagcctcacagctttgatggcagtgcctcatcttcaacttttgtgcttccctttacctaaactgtcctgcctcccgtgcatctgtactccccttgtgccacacattgcattattaaatgtttctcaaacatggagttaaaaaa

SEQ ID NO: 3377 - DNA, 666 bp, Homo Sapiens
  NM_021992
gggtggcttagcactgcagggctctgcgcgggaacgctaacctggtccggagcgagtctgggtctcagccccgcgaacagcctttcacgagtcttcaagctttcaggctatcttctagtcaagatgagtgataagccagacttgtcggaagtggagaagtttgacaggtcaaaactgaagaaaactaatactgaagaaaaaaatactcttccctcaaaggaaactatccagcaagagaaagagtgtgttcaaacatcataaaatggggatcgcctcccaacagcagatttcgacattacctgagagtcttgattttaggcttgttttttgtaaacccatgtgtttgtagagattttaggcgtcttcggatatcttctcacctatgttccctggctaagaagtcagaggtagccaatgtttccttaaattcatttttaaacttaccattggtgcatatgttccagatggcagatgctgtcaataatctcaccattgatgacctttgtgtatgtagttcttgcatcctatactggataagcctgttttaacctgctatgatgggtgcttccattgcttcataatcttcatgaagttgcatgcttttgcagcttttcacagtttatttgcatttctaatgtagtaataaagtaaccaatataatcatta

SEQ ID NO: 3378 - DNA, 1949 bp, Homo Sapiens
  NM_021996
ctcttttctgtctggcccgcggccccgctgcctgccctgctccaggctccacctgcgccgccgatcgcccgggtatcgcgggggcccaggccagctgagtccgttttccgcgccggggtggcgcccctccaaccgtcctaacgccgggccggcagcaaggagtgttcctgggacctcagagaccaggctcagagcctgacatccctgcgaggggacagcctcatccgcccaggccagtgggggtctctacaagtgcccaggctcaggtgcagcccccagcaatgcatcgccggagactggccctgggtctggggttctgcctgttggcgggcacaagcctcagtgtcctgtgggtgtatcttgagaactggctgccagtctcctatgtcccctattatctcccctgcccagagatcttcaacatgaagctgcactacaagagggagaagccactccagcccgtggtatggtcacagtaccctcagcccaagctgctggagcacaggcccacacagctgctgacactcacaccctggttggcgcccatcgtctccgagggaaccttcaacccagagcttctgcagcacatctaccagccactgaacctgaccattggggtcacggtgtttgccgtggggaagtacactcatttcatccagtccttcctggagtcagccgaggagttcttcatgcgtgggtaccgggtgcactactacatcttcactgacaaccctgcagccgttcccggggtcccgctgggtccccaccggcttctcagctccatccccatccagggtcactcccactgggaggagacatccatgcgccggatggagaccatcagccagcacattgctaagagggctcaccgggaggtggactacctcttctgccttgatgtggacatggtgtttcggaacccgtggggccctgagaccttgggagacctggtggctgccattcacccaagctactacgccgttccccgccagcagttcccctatgagcgcaggcgtgtttccactgcctttgtggcagacagcgaaggggacttctattatggtggggcagtcttcggggggcaggtggccagggtatatgagtttactaggggctgccacatggccatcctggcggacaaggccaatggcatcatggctgcctggcgggaggaaagccacctgaaccgtcacttcatctcaaacaagccgtccaaggtgctgtcccccgagtacctctgggacgacaggaagccccagccacccagcctgaagctgatccgcttttctacactggacaaggatatcagctgcctgaggagctgaccacggagctgggggttgccatggatggggacccaaagacctgcagccaccagtgcttcactagcgtgcagaccagccctgtcccgcctccctgtcagtcaggcgaattcaaccggaaaagggacgtggaaaggccactgtgaactgcagagggctgtgcacacagtagcacacaggatctcacagtaacgcggcatgggaacagtgagacagggggaggggaggcgcagttacaaaggcagggcccggcaggcttgccacgttctgcagccgtgcctttgcggggcaggctctgaagcctcagcccgactcagagtgcctgaaccctgccgcgccagtcccccgtttattgcatattgcccttaacgtagcatttctaataccctggtgtgaaggcgccctagaccccttttctctggtcacaggggtcctgggtcctttgatgtctcccaaccacatgtagccaattcctcactcaggcccccagagtgagcctttgaaatggaacaggtctaggctccctcggtttcctgcaccccaaagtgagccgcactctcaggggactagccacctccttcttaagagggtttggggcagtttataataaagggggcgtgtgctcaa

SEQ ID NO: 3379 - DNA, 2057 bp, Homo Sapiens
  NM_022003
aaccgaaaagcaacagctgatggcaaatccgctccggcgcttgcacgcctcctcggcggcagtctcctgttgcttctcggagcttgactgccctttggaaaaatctctccgcccctcgagaggagagaggagcagaggacgcgcgcgagcacagagcgggaggacggacagggagaggaggagagggggtctgcgcgcggccgctacccagaagccagcggacggcagcacggagtgggctgtccccgagcccagccccgagcgagccccccccccgcccccgcaggacgcgcctcccagccagcccgactcctaggaggaggggaggcgggaaagcagctcaagcctcacccaccgccctgcccccagccccgccactcccaggctcctcgggactcggcgggtcctcctgggagtctcggaggggaccggctgtgcagacgccatggagttggtgctggtcttcctctgcagcctgctggcccccatggtcctggccagtgcagctgaaaaggagaaggaaatggacccttttcattatgattaccagaccctgaggattgggggactggtgttcgctgtggtcctcttctcggttgggatcctccttatcctaagtcgcaggtgcaagtgcagtttcaatcagaagccccgggccccaggagatgaggaagcccaggtggagaacctcatcaccgccaatgcaacagagccccagaaagcagagaactgaagtgcagccatcaggtggaagcctctggaacctgaggcggctgcttgaacctttggatgcaaatgtcgatgcttaagaaaaccggccacttcagcaacagccctttccccaggagaagccaagaacttgtgtgtcccccaccctatcccctctaacaccattcctccacctgatgatgcaactaacacttgcctccccactgcagcctgcggtcctgcccacctcccgtgatgtgtgtgtgtgtgtgtgtgtgtgtgactgtgtgtgtttgctaactgtggtctttgtggctacttgtttgtggatggtattgtgtttgttagtgaactgtggactcgctttcccaggcaggggctgagccacatggccatctgctcctccctgcccccgtggccctccatcaccttctgctcctaggaggctgcttgttgcccgagaccagccccctcccctgatttagggatgcgtagggtaagagcacgggcagtggtcttcagtcgtcttgggacctgggaaggtttgcagcactttgtcatcattcttcatggactcctttcactcctttaacaaaaaccttgcttccttatcccacctgatcccagtctgaaggtctcttagcaactggagatacaaagcaaggagctggtgagcccagcgttgacgtcaggcaggctatgcccttccgtggttaatttcttcccaggggcttccacgaggagtccccatctgccccgccccttcacagagcgcccggggattccaggcccagggcttctactctgcccctggggaatgtgtcccctgcatatcttctcagcaataactccatgggctctgggaccctaccccttccaaccttccctgcttctgagacttcaatctacagcccagctcatccagatgcagactacagtccctgcaattgggtctctggcaggcaatagttgaaggactcctgttccgttggggccagcacaccgggatggatggagggagagcagaggcctttgcttctctgcctacgtccccttagatgggcagcagaggcaactcccgcatcctttgctctgcctgtcagtggtcagagcggtgagcgaggtgggttggagactcagcaggctccgtgcagcccttgggaacagtgagaggttgaaggtcataacgagagtgggaactcaacccagatcccgcccctcctgtcctctgtgttcccgcggaaaccaaccaaaccgtgcgctgtgacccattgctgttctctgtatcgtgatctatcctcaacaacaacagaaaaaaggaataaaatatcctttgtttcctagtgaaa

SEQ ID NO: 3380 - DNA, 713 bp, Homo Sapiens
  NM_022006
ccccacatcggtccgtcctgcttccagctgctgcagcgcgccttcgccgccaaagcatccagcagccccctgctccggcccagcatggcgaccccgacccagacccccacaaaggctcctgaggaacctgacccattttactatgactacaacacggtgcagactgtgggcatgactctggcaaccatcttgttcctgctgggtatcctcatcgtcatcagcaagaaggtgaagtgcaggaaggcggactccaggtctgagagcccaacctgcaaatcctgtaagtctgagcttccctcttcagcccctggtggcggcggcgtgtaacaccttcccgaggaaactccgctgccgaccctgcctgagcgcgggagcctgaggaccgggtggaggcggtggggacccagccgcgcgccgggagcgctccccggaatgagccgccccacccaccccaaggctggagccgctgcaccctgctgtccctctccaggccttggcaatgacgatcccccaaagagcccgtctgcaccccagacccagggcctcaggcctccagctcctgggatccgggagtccatcccggcccagcacccccagcatccccgtgtatggcccccctgcacctccttgtctcatccccgaagatccgtccccctggcccctcagtgtccatgtcttgagcttaataaatgtgcatttggttttttcctctg

SEQ ID NO: 3381 - DNA, 4620 bp, Homo Sapiens
  NM_022037
gctcctaggctcccggctcgccgccatcttgtattggggtttcattgttcccgctgggccgggcggtttagtgtaattgccgccggaggaggaggcggagtaacctctggtcagccgagaaaccccactatcctgtagccataaccgcttaaacgatttgggaggtagtgaagggcagggagctggacctggaggcgccgccgcgacagcagcagccatggaggacgagatgcccaagactctatacgtcggtaacctttccagagatgtgacagaagctctaattctgcaactctttagccagattggaccttgtaaaaactgcaaaatgattatggatacagctggaaatgatccctattgttttgtggagtttcatgagcatcgtcatgcagctgcagcattagctgctatgaatggacggaagataatgggtaaggaagtcaaagtgaattgggcaacaacccctagcagtcaaaagaaagatacaagcaatcatttccatgtctttgttggtgatctcagcccagaaattacaactgaagatataaaagctgcttttgcaccatttggaagaatatcagatgcccgagtggtaaaagacatggcaacaggaaagtctaagggatatggctttgtctcctttttcaacaaatgggatgctgaaaacgccattcaacagatgggtggccagtggcttggtggaagacaaatcagaactaactgggcaacccgaaagcctcccgctccaaagagtacatatgagtcaaataccaaacagctatcatatgatgaggttgtaaatcagtctagtccaagcaactgtactgtatactgtggaggtgttacttctgggctaacagaacaactaatgcgtcagactttttcaccatttggacaaataatggaaattcgagtctttccagataaaggatattcatttgttcggttcaattcccatgaaagtgcagcacatgcaattgtttctgttaatggtactaccattgaaggtcatgttgtgaaatgctattggggcaaagaaactcttgatatgataaatcccgtgcaacagcagaatcaaattggatatccccaaccttatggccagtggggccagtggtatggaaatgcacaacaaattggccagtatatgcctaatggttggcaagttcctgcatatggaatgtatggccaggcatggaaccagcaaggatttaatcagacacagtcttctgcaccatggatgggaccaaattatggagtgcaaccgcctcaagggcaaaatggcagcatgttgcccaatcagccttctgggtatcgagtggcagggtatgaaacccagtgaataaggactccagaatctaaagccagtggcttgaggctacagggagtgtagtaaagccgttgtttacttaaagatttatcaaatcagtcagtgcaaatgtcagatacaatgtatttatttaaaagattcatttttaatcatgaaattacttatcatccacattgttttaaaaagaaacaagatgctggatgtctgccaatttttgccttcattaccttttttgataaagtttctcagatccttgtttcaaacacaaatgcagggattgctgccactttttaactattaagaggcagaaaattgcacaatattgaacttttttccactgaagtagtgtgcagttctagtttgcattcctgatatgatttaaaacatgtaatataaagatgttaaaaaaaaaaaccaaaactgtgcagagtctagaagttgtttgtcatcttcagcttgtgcacaattctgttttaggttaaaaaaaggcattgtttgagctgtcccatctccactgttatccctttggggttttttaatataaattattagtttacatcatttttgtatctacatcttttttcacaaatttgtcttgccttattaaagttctgtaaaatatacttaaatggaaaaaatgatgttcatttagattgaaaacttttctcagatggattgataattgcattcatcttgtgttttatatgagaaggtgcctcaagaatttcctgttggatttgtttaaaaggatttttatctttcgtgataaactttgctgtgtaccaggaactataaaaacaaaaacttgttactaaagaaaatatctgaaatgtgataagttcttatgccatgttaatttcatgtgtcaacttcaacatttacatgtattatttcattatgtaaaatgttttagcaatttaatattttgcacagttagcaaactttgtatgtcatttccttcaaggcatcatgcagagttgacatgagatttataaggttttaagttgtttgcatgtgaaaatcaaatacatactttggtagtctttgaatacaaagtcatctgctcttgtttttcaagaattttgagacacaaagttgtatgtaaaggaatatattaatttgccgttttctaggtagatttgctcaaaaagagtgaatcaacttaatatgtacaaatgatagctgtgaaactgtagaatatctttgtgtcaggcttggagttcattgtgacctccaaattttgcctgaaggaccagctgggcaaagcatcttttaaatgttcagaggccaaaagataaacaaaaaaaaaaccttaaaatcctacctctttaaacagccttcagataagagaatcctcagtgcaatcattattttgattcgtttggtacctgttttcctggagttcccgattttattattttggggtggctccaagcattaagaggtttaatctttgatggcattgttctagttttgaaatttctagtatatttcagagtctcttagaagacttgtgtgggaagtttcactttgttttcagtgaagatcacaaacctccttcttcctttactcaagaggaaaggtcccagtatacatatttgaatggttgatggttttcaagaccttcagggagctccctgcattttacctagaaacagaaaaggcccgcaaaatcttaagtttcctggcctgcatttcccgggtaggggcaaatgactccaagctggtctctaagccaatacccttataaaccagagcccaggaaagacagctcgagtgtataattctctggagctcaattctatgcagttgtgctgatatttcattaagtcactgtgtatttttaagtgttgatacattaaaagtcgctttatggaagatgagtaaattttttaaatacttggaaattttatttccttgttaacttctacagatcagggcatgcaaccaaaagcagcttaaatgaaatattttaaaataaaatatcaggaagctatttttagatttcttctggcttatgtttctactttaggaccctcattgttctcttattaaaaaaaattatttcctgtgcatctcatggactgcagggtaaattatttgggcataaataatttaaatagttttctttcattttgactatctccagtaataacagtttttattatccagcatattggcttattgcacaaatcttaaaatgtacattgactactttctgagaagaaagtggtatcagtactcatgatgaaaaggttactactgaacaaattcacatttcaggaacacctctatctttggtttaaatcttactcttagtttttccgtctaaaaatcatactggtattagtatcaggtaaggaaattaaagtttttaaaatggtttcattctctgcaatatgcaaaatttagattttactttctggtactgtaaagaacctgaagtgatttacacttaatgggtgattaatccagtattctttaccctgaatgtttggatattaaagttcctttatgttttctataacctgtgggatcttcttgcagtgattattgtgtgtgagattttttttctttttggtctatccatattgttatattcactcaggtattttttttttaatcttattccagaatcagtggtttatattgggttactgtttaacaccaaatggaattggcattctgcagatttaattaattatgaaaccagggtctcattttccttgctgatacttgttgaaaatgagattcacattctagtctttattttcctcctgttttgtccctgtgcttgtacatcttccttttatttgtgtgttatagttctattccatttgagaaggcagttggtaagaactagattgcatgtacaaagacaggtttactaagtgctgtacagtggtcctgaggttacagttgaattagaaaaacgaaatgtacttacaggaaataagaaagcaaacctttcaaatgagagtgatgatttctttaaaaaaaatcagtttttttctctcaaataatgttctttatttcacgaaatcgtcaatcttaagcatgagcagggataaacaactcctagaaggaactcaattcattcttcctggattttctctgttgttaaatcacaaaaatgatagtccccaatcgtttctttataggaggttattacatttcattacagtcactgcattttgactgttgtgtttagaatttgaatgtacatccaaaatgatgagtttcaatttaagagccttaataaaatgtgtgagtgtgtctcaattgaa

SEQ ID NO: 3382 - DNA, 2303 bp, Homo Sapiens
  NM_022039
ggggaagggaaaagcgagagcggggcaaggcggaagaggaagcggggcggaagggaagcccgggccgcagacggcgaaggaggcagccgggccgggggctgacgcgggagcgagggcatgcccaagggaggaagcagagggaggcagaagcgtggaggaaggggcgagaggcatcgtcaagggagtcgaggggagcgcaggggccgggaaggaggcacaaggaagagagtatgggaagaaggaggaatggagggtcagggctaggcggcgggagggcgccaggccgggaagagcacagggacgagggggtcaggcttgggccgacatcgcggggacaggggtggccatggcggcggcggccggggaggaggaggaggaggaggaggcggctcgggagtcggctgcccgcccggccgcggggcctgcgctctggcgcctgccggaggagctgctgctgctcatctgctcctacctggacatgcgggccctcggccgcctggcccaggtgtgccgctggctgcggcgcttcaccagctgcgatctgctctggcgccggatagcccgggcctcgctcaactccggcttcacgcggctcggcaccgacctgatgaccagtgtcccagtgaaggaacgagtgaaggtgtctcagaactggagactggggcgctgccgagaggggattctgctgaagtggagatgcagtcagatgccctggatgcagctagaggatgattctctgtacatatcccaggctaatttcatcctggcctaccagttccgtccagatggtgccagcttgaatcgtcggcctctgggagtctttgctgggcatgatgaggacgtttgccactttgtgctggccaactcgcatattgttagtgcaggaggggatgggaagattggcattcataagattcacagcaccttcactgtcaagtactcggctcatgaacaggaggtgaactgtgtggattgcaaagggggcatcattgtgagtggctccagggacaggacggccaaggtgtggcctttggcctcaggccggctggggcagtgcttacacaccatccagactgaagaccgagtctggtccattgctatcagcccattactcagctcttttgtgacagggacggcttgttgcgggcacttctcacccctgagaatctgggacctcaacagtgggcagctgatgacacacttgggcagtgactttcccccaggggctggggtgctggatgtcatgtatgagtcccctttcacactgctgtcctgtggctatgacacctatgttcgctactgggacctccgcaccagcgtccggaaatgtgtcatggagtgggaggagccccacgacagcaccctgtactgcctgcagacagatggcaaccacctgctggccacaggttcctcctactacggtgttgtacggctgtgggaccggcgtcaaagggcctgcctgcacgccttcccgctgacgtcgactcccctcagcagccctgtgtactgcctgcgtctcaccaccaagcatctctatgctgccctgtcttacaacctccacgtcctggattttcaaaacccatgaccgtcagggccacccctgcctctgggccagggaaaccagctactcagggacttctcttgcctggagggtgcagtgatagctcctcctcactgccccactgtgctcctgggcctgtgaccccagtgctcaggcaccttgcactagaggcttctgactcctgggactttggagcttaccagagatgcagtccctcccaggaacctgttggagaggcaggacctgctgctttagagtgcggctgaacccgggccttgcgtccctgtttggccagagcaaggatctggcctggagaggcccatcctataccccttattagagccatgacagcctacagagtgaggtgaggtgctcccaccttcccagatggttcctttctgccccttcctggaaggaaaggtgaggctgccaatagcctcctggcaccagccagacctcacccttgaccaacctctcggggctgggggttcattcctggggcactgtggcctggttttgctttgaaaccaagaaagagcaaagggaacccagcagttctgagtgagttctgagccagccctacctcaggctggctgttgagacatgctacaattttcatttttgtaaaaataaagcttgattgttcacagaaaaaaaaaaaaaaaaaaaaaaaaaaaaaaaaaaaaaaaaaaaaaaaaaaaaaaaaaaaaaaaaaaaaaaaaaaaaaaaaaaaaaaaaaaaa

SEQ ID NO: 3383 - DNA, 876 bp, Homo Sapiens
  NM_022044
agcgggcgctgtcagaaccggattgggccgcggcggggacggaagcggcccctgggcccgaggggctggagccgggccggggcgatgtggagcgcgggccgcggcggggctgcctggccggtgctgttggggctgctgctggcgctgttagtgccgggcggtggtgccgccaagaccggtgcggagctcgtgacctgcgggtcggtgctgaagctgctcaatacgcaccaccgcgtgcggctgcactcgcacgacatcaaatacggatccggcagcggccagcaatcggtgaccggcgtagaggcgtcggacgacgccaatagctactggcggatccgcggcggctcggagggcgggtgcccgcgcgggtccccggtgcgctgcgggcaggcggtgaggctcacgcatgtgcttacgggcaagaacctgcacacgcaccacttcccgtcgccgctgtccaacaaccaggaggtgagtgcctttggggaagacggcgagggcgacgacctggacctatggacagtgcgctgctctggacagcactgggagcgtgaggctgctgtgcgcttccagcatgtgggcacctctgtgttcctgtcagtcacgggtgagcagtatggaagccccatccgtgggcagcatgaggtccacggcatgcccagtgccaacacgcacaatacgtggaaggccatggaaggcatcttcatcaagcctagtgtggagccctctgcaggtcacgatgaactctgagtgtgtggatggatgggtggatggagggtggcaggtggggcgtctgcagggccactcttggcagagactttgggtttgtaggggtcctcaagtgcctttgtgattaaagaatgttggtctatgaaa

SEQ ID NO: 3384 - DNA, 2344 bp, Homo Sapiens
  NM_022059
ggtgcgtccgcgggtggctgccccgcaggtgcgcgcggccggggctggcggcgactctctccaccgggccgcccgggaggctcatgcagcgcggctgggtcccgcggcgcccggatcggggaagtgaaagtgcctcggaggaggagggccggtccggcagtgcagccgcctcacaggtcggcggacgggccaggcgggcggcctcctgaaccgaaccgaatcggctcctcgggccgtcgtcctcccgcccctcctcgcccgccgccggagttttctttcggtttcttccaagattcctggccttccctcgacggagccgggcccagtgcgggggcgcagggcgcgggagctccacctcctcggctttccctgcgtccagaggctggcatggcgcgggccgagtactgagcgcacggtcggggcacagcagggccggggggtgcagctggctcgcgcctcctctccggccgccgtctcctccggtccccggcgaaagccattgagacaccagctggacgtcacgcgccggagcatgtctgggagtcagagcgaggtggctccatccccgcagagtccgcggagccccgagatgggacgggacttgcggcccgggtcccgcgtgctcctgctcctgcttctgctcctgctggtgtacctgactcagccaggcaatggcaacgagggcagcgtcactggaagttgttattgtggtaaaagaatttcttccgactccccgccatcggttcagttcatgaatcgtctccggaaacacctgagagcttaccatcggtgtctatactacacgaggttccagctcctttcctggagcgtgtgtgggggcaacaaggacccatgggttcaggaattgatgagctgtcttgatctcaaagaatgtggacatgcttactcggggattgtggcccaccagaagcatttacttcctaccagccccccaatttctcaggcctcagagggggcatcttcagatatccacacccctgcccagatgctcctgtccaccttgcagtccactcagcgccccaccctcccagtaggatcactgtcctcggacaaagagctcactcgtcccaatgaaaccaccattcacactgcgggccacagtctggcagctgggcctgaggctggggagaaccagaagcagccggaaaaaaatgctggtcccacagccaggacatcagccacagtgccagtcctgtgcctcctggccatcatcttcatcctcaccgcagccctttcctatgtgctgtgcaagaggaggagggggcagtcaccgcagtcctctccagatctgccggttcattatatacctgtggcacctgactctaatacctgagccaagaatggaagcttgtgaggagacggactctatgttgcccaggctgttatggaactcctgagtcaagtgatcctcccaccttggcctctgaaggtgcgaggattataggcgtcacctaccacatccagcctacacgtatttgttaatatctaacataggactaaccagccactgccctctcttaggcccctcatttaaaaacggttatactataaaatctgcttttcacactgggtgataataacttggacaaattctatgtgtattttgttttgttttgctttgctttgttttgagacggagtctcgctctgtcatccaggctggagtgcagtggcatgatctcggctcactgcaacccccatctcccaggttcaagcgattctcctgcctcctcctgagtagctgggactacaggtgctcaccaccacacccggctaattttttgtatttttagtagagacggggtttcaccatgttgaccaggctggtctcgaactcctgacctggtgatctgcccacccaggcctcccaaagtgctgggattaaaggtgtgagccaccatgcctggccctatgtgtgttttttaactactaaaaattatttttgtaatgattgagtcttctttatggaaacaactggcctcagcccttgcgcccttactgtgattcctggcttcattttttgctgatggttccccctcgtcccaaatctctctcccagtacaccagttgttcctcccccacctcagccctctcctgcatcctcctgtacccgcaacgaaggcctgggctttcccaccctccctccttagcaggtgccgtgctgggacaccatacgggttggtttcacctcctcagtcccttgcctaccccagtgagagtctgatcttgtttttattgttattgcttttattattattgcttttattatcattaaaactctagttcttgttttgtctctccgaaaaaaaaaaaaaaaaaaaaaa

SEQ ID NO: 3385 - DNA, 2366 bp, Homo Sapiens
  NM_022061
accacgctccgagctaaggcgcatgcgttccctgaaattgccgccaccggctctaccttccagtttccagttccggcctccaaggggcgggcagaagttggaaacatgcggctgtcggtcgctgcagcgatctcccatggccgcgtatttcgccgtatgggcctcggtcccgagtcccgcatccatctgttgcggaacttgctcacagggctggtgcggcacgaacgcatcgaggcaccatgggcgcgtgtggacgaaatgaggggctacgcggagaagctcatcgactatgggaagctgggagacactaacgaacgagccatgcgcatggctgacttctggctcacagagaaggatttgatcccaaagctgtttcaagtactggcccctcggtacaaagatcaaactgggggctacacaagaatgctgcagatcccaaatcggagtttggatcgggccaagatggcagtgatcgagtataaagggaattgcctcccacccctgcctctgcctcgcagagacagccaccttacactcctaaaccagctgctgcagggtttgcggcaggacctcaggcaaagccaggaagcaagcaaccacagctcccacacagctcaaacaccagggatttaactggatctgaagagtctgcagcccttaatcagtacccatgatcacaggcctttggagcacttttactctctgagaagaactggagctagagatgtaaaatggacagtcttgatggggttgagaaccttctggggagccagatgaccctctctttgcacaatagataaaagtctttatatgaatatatataaatttatttattttttccttcctgtgggatttctggagaatgagaattatccaaatgctcagtctacctgagatagtaaattcatggcttatgcttctggtccttaaatttgggttatttttggttagtgcaattttgtttttcttaatgccagtttacatgggaatgcatcctataattccaaatgttgccagaggtggttgtgttttgacatctggtctcctagagatgagtgcttgggatttcttagagaaagattacttcctgacaggggtaggggagtgacaatctgcaagtgaaacttccttaaacaatctagtaccctgcgaaccttcaggggatactgcaatcagtcctctgttttgaggcaggatcacacattaccttaatgtgttcccttcaaccccctgaatgggcctgggaggagaggacccaagaactcagatgttccaccagtttggccaaaggggtggagacattcagcagaggatgttgggctccaggataagctccttcctcttggtgaggggaaggggtaagaaagagggtctatgcgagagaaggattaggaaattaaacctcctaggaatttcctggaagtttttattgttgtcaaatctggcctctctgggaacccagaaaagggaaatccggcttcagaatgtgagaagctgggagcccctttcttggcacagccaggctgccgttcccttgggttcagaggctttagtagggtagtagttatggaaggacttagaaaggagccatcagtcttggtccaaacacttgatagcagtgcctgataattgccatatccccagtaaagtgggtagaagagattttatcttaggctctatcttctgagtgtatttggcccactgaacccatccactgtctgagataataagtaagagtaagggtaaagggatcactggtgtagcagacatggcttcagtgacagaacgaactattctggtgctaatttagctgtagctgccttagtctgatactcatctactcccaacagagctctttatctctttttctctactatggtttgttcttcacactatagccagaaagctcttatattttaaatgaaatatagtagacactcaaaacatttatgaaataaagctacaactctgcttctgctaaaaaatatacccctcttctgtcttagcatgaatatccaccctagctaggtatctaggagtcatacctaacttctagagaaaccactttccttaaaaccacatctttattttaaatagatggattgtggctgggctcctgtagcttttcctcttagaccccagaaatatatctccctttgggacttccaacagttccctacatgctttttgagcatctgctagttcccagcatcaatttaggcagaagggatacaatatccactgttcatctaatagagactagagataagaaacaacctgtaccatcaatgagctcacaataacaggccactgccactaccacagtggcctcaagggacactgcttcccctttaatgttttggtcc

SEQ ID NO: 3386 - DNA, 6134 bp, Homo Sapiens
  NM_022065
gacccggtagtcgaccgtggaccgcgctgcgagcctcggagacgccgtagaaggagacctgcttccgggactggaccaggcgcctgcgactcttctcagacgccgacgtgcacgagtgactactattaattctatttaaaatgggtgtaaagaagaagaaagaaatgcaagttgctgcgctgaccatttgccatcaggaccttgaaactttgaaatcttttgctgatgtggaagggaaaaatctagcttctttgctgttacattgtgtgcaactcacggatggagtgtcacaaatccattatattaaacagattgtgcctctgctggagaaagcagataaaaatggcatgtgtgatcccactattcaaagttgtttggatatcttagcaggcatttatctttctttgagtctaaagaatcccttgaagaaagtattggcaagctcactaaatagcctgcctgatttttttctacctgaggctatgcaccgttttacttctcgtcttcaggaagaattgaatactactgacttatactcttacaggaaagttactgacaatatttcttcctgtatggagaactttaacttgggtagagcaagtgttaataatctgcttaaaaatgtgcttcattttctgcagaagagtttaattgaaatcctggaagaaaatagaaaatgtgctggaaatcatattattcaaacacagttgatgaatgacttactggtaggcattagagtttcaatgatgttagtacagaaagtacaagatttccagggaaatctttggaagacttccgattctcccatatggcaaaatatgtgtggattgctgagtatttttaccaaggttttaagcgatgatgatctgttacagactgtacagagcacatctggattagctattattctttttattaagactatgtttcacccgtctgaaaagattcctcatttgattagcagtgtgctgcttcgttcagtggactgcaccagtgtccccgagtggtttatgagcagctgcaggagcctctgttgtggtgacatctctcagtcagctgtcttattcctctgtcaggggacacttgccatgttggactggcagaacggaagcatgggtcggagtggggaggccctgctcttggatactgcacatgttttgttcaccttgagttcacagattaaagagccaacgctggaaatgtttctgtctagaatcttagcatcctggactaattcagccatacaagtccttgaatcaagttccccgagcctaacggacagcctgaatgggaattcaagtatagttgggagacttttggaatatgtctatacccattgggaacatccattggatgctctgagacaccaaaccaaaatcatgttcaaaaaccttctccaaatgcaccggctcactgtggaaggtgcagatttcgtccctgatcctttctttgtggaattgactgagagtcttttacgattggaatggcatattaaaggaaagtacacgtgccttggttgtttggtagagtgcataggagttgaacatattttggctatagataaaactattccatctcaaatcttagaggtgatgggagaccagtcattggtaccttatgcaagtgacctcttggaaaccatgtttagaaatcataagagtcatttgaaatcccagactgctgagagttcttggattgaccagtggcatgagacttgggtttctcctctcctttttatattgtgtgaaggaaacttggatcaaaaatcttacgtgattgattattacttgccaaaattattaagttacagccctgaaagcttacagtacatggtaaagattcttcagacttctattgatgctaaaactggacaagagcaatctttcccatccttagggtcttgtaatagcaggggggctctgggagctttgatggcatgtctgcgaatagctagagctcatggacatcttcagtctgcaactgatacctgggagaacctcgtgtctgatgcaagaataaagcaaggcttaattcatcagcattgccaagtaaggatagatacattaggcttgctttgtgaaagtaatcggagcacagaaattgtttccatggaagaaatgcagtggattcagttctttattacatacaatcttaacagccagtctccaggagtgcggcaacagatctgttctcttcttaaaaagttgttttgtaggatacaggaaagttctcaggtactttataaattggagcagagtaaatccaaacgtgaaccagagaatgagttaaccaaacagcacccttctgtttctttacagcagtataagaatttcatgtcatccatttgtaacagtctttttgaagcattgtttcctggatcttcctactcgactagattttcagctttaaccattttaggttcaatagctgaagtttttcatgtcccagaaggcagaatttatacagtatatcagctgagtcatgatattgatgttggtcgtttccaaacactaatggaatgttttaccagcacttttgaagacgtgaaaattttagcatttgatcttctgatgaagttatcaaaaacagctgtacattttcaggattcggggaaactgcaaggcttatttcaggcagcattggagctcagcacaagcaccaaaccatacgactgtgtgacagcttcctacctgctgaacttcttaatctggcaggatgctctaccgtcatccttgtctgcctacttaactcagcaagttgcatgtgataatggagataggcctgctgctgtggtggaaaggaacacattaatggttatcaaatgcttgatggaaaatcttgaggaagaagtatctcaggctgaaaattctctgcttcaggcagcagcagcatttccaatgtatgggcgagtccactgtataacaggagctttgcagaagttatctctaaacagcctgcagttggtgagcgagtggagacctgtggtagagaagctccttttgatgtcctacaggctttccactgtggtgtctccagtcattcagagctcatcccctgaaggcctcatcccaatggacactgattcagagtcagcaagccgcttacagatgattctgaatgagattcagcctcgagatactaatgattattttaaccaagccaaaatattgaaagaacatgatagctttgatatgaaggacttgaatgctagtgtggtgaatattgatacttctacagaaatcaaaggtaaagaagtaaaaacatgtgatgtaactgcgcagatggtgctggtatgttgttggagaagtatgaaggaagttgctttacttttaggcatgttgtgccagcttctgcccatgcagcctgtgccagaatcttctgatggattattgacggtggagcaggtaaaagaaataggagattactttaaacaacaccttttgcagtccaggcacagaggagcatttgaattggcttatactggttttgtgaaactcactgaagtactaaacaggtgcccaaatgtgagtctgcaaaagctgccagaacagtggctatggagtgttttagaggaaattaaatgcagtgatccttcatctaaactctgtgctacaaggcgcagtgctggaattcctttctacatacaggcactgttggcatctgaaccaaagaaaggcagaatggatttgttgaaaataacaatgaaagagttaatctctttggctgggcctacagatgacatacagagtacagtcccccaggttcatgctttaaatatccttagagcattgttcagagatacgcgcctgggagaaaatattattccttatgttgctgatggagctaaggctgcaattctgggttttacatcaccggtctgggcagtgcgaaattcatccacacttctctttagtgccttgatcacaagaatttttggagttaaaagggcaaaggatgaacattccaaaacaaatagaatgacagggagagagtttttctctcgtttcccagaactctatccttttcttctcaaacagttggaaactgtagccaatacagtagacagtgatatgggagaaccaaatcgtcatccaagcatgtttctcttacttttggtgttggagagactctacgcttccccgatggatggtacttcttctgctctcagcatgggaccttttgttcccttcattatgaggtgtggtcactcacctgtctaccactcccgtgaaatggcagctcgtgccttggtcccatttgttatgatagatcacattcctaataccattcgaactctgttgtccacactccccagctgcactgaccagtgtttccggcaaaaccacattcatgggacacttctccaggtttttcatttgttgcaagcctactcagactccaaacacggaacgaattcagacttccagcacgagctgactgacatcactgtttgtaccaaagccaaactctggctggccaagaggcaaaatccatgtttggtgaccagagctgtatatattgatattctcttcctattgacttgctgcctcaacagatctgcaaaggacaaccagccagttctggagagtcttggcttctgggaggaagtcagagggattatctcaggatcagagctgataacgggattcccttgggccttcaaggtgccaggcctgccccagtacctccagagcctcaccagactagccattgctgcagtgtgggccgcggcagccaagagtggagagcgggagacgaatgtccccatctctttctctcagctgttagaatctgccttccctgaagtgcgctcactaacactggaagccctcttggaaaagttcttagcagcagcctctggacttggagagaagggcgtgccacccttgctgtgcaacatgggagagaagttcttattgttggccatgaaggaaaatcacccagaatgcttctgcaagatactgaaaattctccactgcatggaccctggtgagtggcttccccagacggagcactgtgtccatctgaccccaaaggagttcttgatctggacgatggatattgcttccaatgaaagatctgaaattcagagtgtagctctgagacttgcttccaaagtcatttcccaccacatgcagacatgtgtggagaacagggaattgatagctgctgagctgaagcagtgggttcagctggtcatcttgtcatgtgaagaccatcttcctacagagtctaggctggccgtcgttgaagtcctcaccagtactacaccacttttcctcaccaacccccatcctattcttgagttgcaggatacacttgctctctggaagtgtgtccttacccttctgcagagtgaggagcaagctgttagagatgcagccacggaaaccgtgacaactgccatgtcacaagaaaatacctgccagtcaacagagtttgccttctgccaggtggatgcctccatcgctctggccctggccctggccgtcctgtgtgatctgctccagcagtgggaccagttggcccctggactgcccatcctgctgggatggctgttgggagagagtgatgacctcgtggcctgtgtggagagcatgcatcaggtggaagaagactacctgtttgaaaaagcagaagtcaacttttgggccgagaccctgatctttgtgaaatacctctgcaagcacctcttctgtctcctctcaaagtccggctggcgtcccccaagccctgagatgctctgtcaccttcaaaggatggtgtcagagcagtgccacctcctgtctcagttcttcagagagcttccaccagctgctgagtttgtgaagacagtggagttcacaagactacgcattcaagaggaaaggactttggcttgcttgaggctgctggcctttttggaaggaaaggaaggggaagacaccctagttctcagtgtttgggactcttatgcagaatcgaggcagttaactcttccaagaacagaagcggcatgttgaagaaaatctgggggattgggatgggggtatgtgtggatttttcctccactaaatctgcaggaaacatgttgaacataaattcaaaaattttatcccattcatgcctcccctaaaaaaaaaaaaaaaaaaaaa

SEQ ID NO: 3387 - DNA, 3935 bp, Homo Sapiens
  NM_022070
ccccgcccgtagaaaagatggctgctgtgcaagttgtcggttcgtggccttccgtgcagccgcgggaggcaccgcgggaagcaatccctgagcgaggcaatgggtttcgcctcttgtctgccaggctctgcgccctgcgcccggatgacagcagctccgcccgcaccgagatccacctgctcttcgatcagctcatctccgagaactacagcgagggcagtggcgtggccccggaggacgttagtgctcttcttgtccaggcttgccgactggtacctcttaatcagaatcatcttgtcagcaaagtgagccagcttatccaccatttacttaacagattacaggtaattgttgatgaacagcacttggatttcctgttggcatatactatttcggctattcatcagtgtagttcctggacacacagggaaattcttcaagccctggcagctctggtgtactgcaatggctccaaatgtcaaaagtacctcccagagctgctaggcaacaccggactcttaatgaagttgagtgacttggctcagtctgatcctgaagtcaggagagctgcagtacattgtatggcaaacttatgtctcagtgtgccaggacagccgtatttggaggagccctaccaaaatgtctgtttccaagcttttctgactattttacagtctccaaaatcatctgatatggatgatatcacattttgcatgttattgcaaaatgcattaaaaggtatacagtcacttctaaatggtgggagaatgaaactaacacagactgatgaacttggagcacttttagctgtgctaaagaaattcatgtttcacggactccctggactaaacatagagatgcccacggtgttatacccaactccgcttcctcagtatgatgggcgaacacctatcaaaccacagcaatcagaatccagtgcttctcgaccaactttgaataaaaagaaaaaatccaaagtaaaaccaaagaaaatccagcaaggagaggaggaggaaaaggaatccagtggtgaaatagaggcagccccagtcactggcacaggcagagtgaacctgcatgaagggaacacttggtgtccctcctccctgggtgtccagagtttgcctttagatggaagtggagctgcagaaaaagatggagtctcctcatccttcagttcttccagttggaaaagggtcagcagtagtgagtcagacttttctgatgctgaaggaggcatgcagagtaaaatgaggtcttaccaagctaaagttcgccaaggagccttagtttgttttctttctactataaaatcgatagaaaaaaaagttctttatggctactggtcagcttttattcctgatacgcctgaacttggcagcccacagtcagtgtccttgatgactcttacattgaaagacccttctccaaagacacgtgcctgtgctctgcaagttttatctgccatcttggaaggctcaaagcagtttctttctgttgctgaagataccagtgaccacagaagggcttttacccccttctccgtaatgatcgcttgcagcattagagagttgcacagatgtcttttgttagctttggtggcggagtcatcctcacagaccgttactcagataattaagtgccttgcaaatttagtatcaaatgcaccttatgatcgtctaaaactcagcctgctgaccaaagtctggaaccagataaagccttatattcgccacaaagatgttaatgttcgtgtgtcaagtctcacactcttgggagctatagtgtccacccacgcacctttacctgaagtccaactacttctgcaacagccatgttcttctggactcggtaatagcaattcagcaacccctcacctcagccctcctgattggtggaagaaagcccctgcaggaccctctctggaagaaacgtcagttagctcacctaaggggtcttcagagccctgctggctcattcgactctgcatttccattgtcgtactgcccaaggaggattcctgttcaggtagcgatgctggctctgcagcaggaagcacctacgaaccatcccccatgcgactggaggccttacaggtattgactcttctggcaaggggctacttttcaatgactcaagcctacttgatggagcttggagaggtgatttgcaagtgcatgggggaagcagatccatccattcagcttcatggagcaaagcttctggaagaactgggcacaggcttaatacagcagtataaaccagactccactgcagcacctgatcagagagcaccagtcttcttggtggtgatgttctggactatgatgctgaacggtcctttacccagagccctgcagaattcagaacacccaactctccaggcgagcgcctgtgatgccctgtcttccatcttgccagaggccttcagcaatctgccgaatgacaggcagatgctgtgcatcacagtgctgctcgggctgaatgacagcaagaatcgcttagtgaaagctgcaacttcacgggccctgggagtctatgtgctttttccctgtctcagacaggatgtcatatttgttgcagacgcagcaaatgcaatattgatgtcacttgaagacaagtctctgaatgttcgagccaaagcagcctggtccctgggcaacctgacagacactctgattgtcaacatggaaacaccagacccaagtttccaggaagagttctctggtctcctgctcttgaaaatgttacgatcagctatagaagcatccaaggataaagacaaggtaaaaagcaatgcagtccgggcccttggaaatttgcttcattttctgcaaccctctcatatagaaaaacccacatttgcagaaatcattgaggagtctatccaggccctaatttctactgttctaacagaagctgccatgaaagtccgatggaatgcttgttatgcaatgggaaatgtatttaaaaatcctgcccttcctttagggacagccccatggacctcccaggcctacaatgccctgacatcggtcgtgacatcatgcaagaacttcaaagtgcgcatcagatctgcagctgccctttccgtcccggggaagagagagcagtacgggtctgttgaccagtatgctcggatctggaatgcattggtcaccgctttacagaagagtgaagacaccatagactttttggaattcaagtactgtgtcagcctacggacccaaatctgccaggcactgattcacctcttgagcttggccagtgcctcggacctcccttgtatgaaagaaacccttgaactgagtgggaatatggtccagtcctatattctacagtttttaaaatcaggagcagagggagatgacactggagcaccccacagcccacaggaaagagaccagatggtcagaatggcccttaaacacatgggcagcatccaggcaccaactggagacacagccagaagggccatcatgggctttttagaagagatcctggccgtttgttttgactcatctggatcacaaggggcactcccagggttaacaaatcagtgaagatcccaccatactttctagatgtcgaaggcggcagtaggaagacctgagcttgagcataagatctgtgggatttcatcttaggggcagaaacaatccgttcactatttatttagaatgacttagcagccatttaaattttcacagagggctcaaccacctttggagtgactccatagcactggccatggtcagggttgttggaacatctgacctgtgcatccaggagccgaggagtcaggttgtaatacaggccaagcagacgggctttgagggcatttagtctcagaaaaaaaaaatgtagaaggatttcggaattagaattttgtgtattgtatctgtagttttgtaataaactaacgaaaaatagtg

SEQ ID NO: 3388 - DNA, 1465 bp, Homo Sapiens
  NM_022072
gagaatgaaagtggatgcccgcgaatcccggaagtcagactgtttttttcagttccctggaggctttttgatactgattcgcgtacacctgttgtttgaaagctctcagcgggacaatgctgacccagctgaaagcaaaatcagaggggaagcttgcaaaacagatttgcaaagttgtgttggatcattttgaaaaacagtattccaaagaactcggagatgcctggaatacagtaagggagatactaacatctccatcatgctggcaatatgctgtcctgcttaaccgattcaattatccttttgaactggaaaaggatttacatttgaagggctatcacacactctctcagggatctttacccaactatcctaaatcagtgaagtgttaccttagcagaactccgggccgaatcccttcagaaagacaccaaattggaaacctgaaaaaatattatctcctaaatgctgcttctcttctcccagtgttggctctggaattaagggatggggagaaggttctggatctctgtgctgctcctggagggaaatcaatagctctgctgcagtgtgcttgtccaggttatcttcattgtaatgaatatgatagtctgagattgaggtggctaaggcagacgttggaatctttcatcccacagcctttgataaatgtaattaaagtgtctgaattggatggcagaaaaatgggagatgcccagcctgaaatgtttgacaaggtgttagtggatgctccgtgttcaaatgatcgaagctggttgttttcttctgactctcagaaggcatcctgtaggataagtcaaaggaggaatttgcctcttctacagatagagctgttaaggtctgcaattaaggccttacgtcctggagggatacttgtatactctacatgcacgctttccaaggcagaaaatcaagatgtgatcagtgaaattttaaactcccacggtaacatcatgcctatggacattaaaggaatagcaaggacttgctcccacgacttcacatttgctcccactggccaggaatgtgggctcttagtgattccagataagggcaaagcctggggcccaatgtatgtagccaaattgaagaaatcatggagcacaggaaaatggtgacatgaatttgtaaactgtgtttatgtgttattatatttatatttctgaactcagtacatgttaatatttaaataattatgcagtaactttctctgggtctgtttggaatcctatttagttaatactttagcatcttagaatctaggcttgagaattgttcaggtgtatttttttcctagaaatatatctgtaacaatgatttaaggtggtgcagatggtgtttgttctatattataaatctgctgtctttgcttggcattttatagttaaattaattagaatatgtggttttatgctaaaaaaaaaaaaaaaaaaaaaaaaaaaaa

SEQ ID NO: 3389 - DNA, 3609 bp, Homo Sapiens
  NM_022074
ctagccccacctgctccgtttcccgcccagctggagctctggagcctttgcttcctcaaatacgagcgggaactgcgttgagcgctggattccaggccgagtgctggcgaggcgcgcagttctctgctgtttaaaaagtatccctgtgctttgaagatactgctataatttgaaaatttgaaattagtgtttcagctgaaccatccgttcatcttcaagccatcatgagctgtaagaagcagaggtcacggaagcactcagtcaatgaaaaatgtaatatgaaaatcgagcactatttttctccggtctctaaagagcaacagaataattgcagtacttctctaatgaggatggagtctagaggagacccaagagccacaactaatacccaggctcaaagattccattcacctaagaaaaatccagaagaccagaccatgccccaaaataggacaatatatgttaccttgaaggtaaaccacaggagaaaccaagatatgaaacttaagctcacacatagtgagaatagtagcttatatatggctctcaacactctccaggctgtcagaaaagagatagaaactcaccaaggccaagaaatgcttgtgcgtggcacagaaggaatcaaagagtacataaaccttggaatgcccctcagttgtttccctgaaggtggccaggtggtcattacattttcccaaagtaaaagtaagcagaaggaagataaccacatatttggcaggcaggacaaagcatcgactgaatgtgtcaaattttacattcatgcaattggaattgggaagtgtaaaagaaggattgttaaatgtgggaagcttcacaaaaaggggcgcaaactctgtgtttatgctttcaaaggagaaaccatcaaggatgcactgtgcaaggatggcagatttctttcctttctggagaatgatgattggaaactcattgaaaacaatgacaccattttagaaagcacccagccagttgatgaattagaaggcagatactttcaggttgaggttgagaaaagaatggtccccagtgcagcagcttctcagaatcctgagtcagagaaaagaaacacctgtgtgttgagagaacaaatcgtggctcagtaccccagtttgaaaagagaaagtgaaaaaatcattgaaaacttcaagaaaaaaatgaaagtaaaaaatggggaaacattatttgaattgcatagaacaacgtttgggaaagtaacaaaaaattcttcttcgattaaagtagtgaaacttcttgtacgtctcagtgactcagttgggtacttattctgggacagtgcaactacgggttacgccacctgctttgtttttaaaggattgttcattttaacttgtcggcatgtaatagatagcattgtgggagacggaatagagccaagtaagtgggcaaccataattggtcaatgtgtaagggtgacatttggttatgaagagctaaaagacaaggaaacaaactacttttttgttgaaccttggtttgagatacataatgaagagcttgactatgctgtcctgaaactgaaggaaaatggacaacaagtacctatggaactatataatggaattactcctgtgccacttagtgggttgatacatattattggccatccatatggagaaaaaaagcagattgatgcttgtgctgtgatccctcagggtcagcgagcaaagaaatgtcaggaacgtgttcagtctaaaaaagcagaaagtccagagtatgtccatatgtatactcaaagaagtttccagaaaatagttcacaaccctgatgtgattacctatgacactgaatttttctttggggcttccggctcccctgtgtttgattcaaaaggttcattggtggccatgcatgctgctggctttgcttatacttaccaaaatgagactcgtagtatcattgagtttggctctaccatggaatccatcctccttgatattaagcaaagacataaaccatggtatgaagaagtatttgtaaatcagcaggatgtagaaatgatgagtgatgaggacttgtgagaattcagtctactggatttaagggaatggcttatggagttgttatttcataggcattgaaaatggttttctaaactccaaaatggtcatcttatcaataataataatattgaccatttcctatctgccaggcatttttctaagcacatgaagaaattagtcctaacaacactatgagatggactataacttgcccaaattttttttttttttttgagactgagtctcactctgtcgcctgggctggagtacagtggtgcgatctcagctcactgcaacttccacctcccaggttcaagcgattcttatgcctcagtctcctgagcagctgggattacaggcaaacgccaccacacccagctaaatttttttttttttttttgtatttttagtagagacagggtttcaccatgttggtcaggcgggtctcgaactcctgacctcgtgatccacctgcctcggccttccaaagtgctgggattacaagtttgagccactgcacctggctaacttgccctattttaaagtcaagcaatgggaagaataacaagattatatagtaatcagtttcatgacactaaaagtcatatagtcatagggttttttcatctttcatatctttgcctaaattcatttgctacagtgcaggaaccaaaacttgttcatctcatgattccctacatctgacataaggaaagtaagtgctcagaaaaatgtgcaggtcaataagttgcaaaagttggggctgcaattaatgctaacataagagctaaatgcttgattagaaatgatctcaaaaccttttagaatttccaaaatcttcatattactgaaactgtcggaatatatgggtcttgaaattcagaagatgatagtcactcttcccatatttataggctattaaggcaagggatatcttaaacatcatattactttatttagatttctactactccaattattaatgttatgtatttctcattgttttacttcttcatggtattatgaagactatatagatgattcaaccaagcctgcaaatctccctcttgtggaattccactggacccaatctgttttccatttccattgcaatactactaaagccatacaatatcaagcaccctccctctaggtccagggactatcacagaagaagcaggcatgtaagattttaaggactggtttcgaggggtcgagtgtaggaaaacagcctgttgcattgtaagagtgatgtcatcttgaagagcagctggcatgatgactgctgtttgactcctgcataccaagatattctgcagcaatgtctttaaacagtgccggtagtacagataacccctcataaagatgcttatctaacctccccagtgttcaggtgtttcacaagaaagtctgagatatgactagctacacgttttgccaaaaatgcttgttatataaagggtacttttgggagggtgagtgccgccatttagtggctgctagaaacattgcttctgtttgtaagttcctattaaatgtttctttctgagaaaaaaaaaaaaaaaaa

SEQ ID NO: 3390 - DNA, 2732 bp, Homo Sapiens
  NM_022087
gactgggcgagggccctgggcctgaggaggcgcggccgccactgcgcccagcgcctgcgcgacgcctggctgctgggccccggggcagttcagcccgcgccgctcctgcgggtcggactggggctgtggcgggagagaagatgccgcagcccgagtcccagaaggcggcgatcctgggctgcgggcaaggcggaaattgacaatggcccttcagctatgctaggtctataatgggaagtgtcacagttcggtatttctgttatgggtgcctttttacatctgcgacctggacagttttgctttttgtttatttcaacttcagtgaagtgactcagccacttaagaatgtgcccgtcaaggggtctgggccccacggaccatctccaaaaaaattctatccccgtttcactcgaggcccaagtcgagtgctcgagccacagttcaaagcaaacaaaattgacgatgtgatagacagtcgtgttgaagatccagaagaaggccacttgaaattctcttctgaattaggtatgatttttaatgaacgcgatcaagagttgagagacttgggctatcagaaacatgcttttaatatgcttatcagtgaccgcttgggctaccacagagatgtgccagacacaaggaatgcagcatgtaaagaaaagttctacccacctgacctgccagctgctagtgttgttatctgtttctataatgaagcgttttctgccttgcttcggacagtgcacagtgtcatagaccgcacgccagcacacctgcttcatgagatcatccttgtggatgatgatagtgactttgatgatttgaaaggagaactagatgaatatgtccaaaaatacctccctggaaaaattaaagtcataagaaatacaaagcgtgaggggttgattcgagggagaatgattggcgcggcccacgcgacaggagaagtccttgtgttcctggacagccactgtgaagtgaatgtgatgtggctgcagcccttgctggccgccatccgtgaggaccggcacaccgtggtgtgcccagtgattgacatcatcagcgccgacacgctggcctacagctcgtcccctgtcgtccgcggagggttcaactggggactgcacttcaaatgggatcttgtccccctttctgagctaggacgagcggagggagccactgcaccaataaagtcaccaacaatggctggaggtttgtttgccatgaacagacagtatttccatgaacttggacagtatgatagtggcatggatatctggggaggagaaaatttggaaatatcatttcggatctggatgtgtggcggtaagctcttcatcatcccttgctctagagtaggacacattttccgaaaaaggcgaccatatggatctcccgaaggccaggacaccatgacacacaactctttgcggctggcacatgtctggttggatgaatacaaggagcagtatttttccttaagacctgacctgaagacgaaaagctatggcaatatcagtgagcgtgtggaactgagaaagaagttgggctgtaaatcatttaaatggtatttggataatgtatacccagagatgcagatatctgggtcccacgccaaaccccaacaacccatttttgtcaatagagggccaaaacgacccaaagtccttcaacgtggaaggctctatcacctccagaccaacaaatgcctggtggcccagggccgcccaagtcagaagggaggtctcgtggtgcttaaggcctgtgactacagtgacccaaatcagatctggatctataatgaagagcatgaattggttttaaatagtctcctttgtctagatatgtcagagactcgctcatcagacccgccacggctcatgaaatgccacgggtcaggaggatcccagcagtggacctttgggaaaaacaatcggctataccaggtgtcggttggacagtgcctgagagcagtggatcccctgggtcagaagggctctgtcgccatggcgatctgcgatggctcctcttcacagcagtggcatttggaaggttaaggtggatgctgtggcgggaacgttgcttcatcaggcgttgcctccggtgtggagtttggggctttaggaaagcctgggttgggtggagcagaaccatcttggagaagatgacagttccctgtcctcccggagatgcctgggtgtgttagcagaggtgacacgtgtctgacagagacgggagctctgagtgtccacgggtgaagaagtgagtgtccacgggtgaagaagtgagtatgtttcacctggacattaaggtgatgtttgagctgctgttaaggaatttcttgcttatagaggcaaaccacagtatcattttaactctagaattgggcttgtacagaaggataaaacccaggaaaatggatatttctattcagatttatttatgcctctttttaatcccctttaatgatgcagtggtttttatctgatcaggaacttgtcatgatttcctttcttagacttcataggagatagtgctttaaaaaaaaaaaaaacttctattatttgtttagtatgttgtaagtagatcattttaaaaaactgaatctatattatgtttaacttcagaaggcatcatttataagacagtatggcagttaattataaaattattttgatgaattatgatacaatctacataataaagaatccttttgattattaaaaaaaaaa

SEQ ID NO: 3391 - DNA, 3996 bp, Homo Sapiens
  NM_022089
agtgtcggagccgcgccgagcctggtggcccaggtgccccgcccgcgtcagccctgctccagccccgcgctagcccagcgcccctcgccccgggccgtccggaccgcgcccccgcccagggccttgcgcacgccggggcccaggccgagggccgcagcgccggggccggcgatgagcgcgaggagccggcatgagcgcagacagcagccctctcgtgggcagcacgcccaccggttatgggaccctgacgatagggacatcaatagatcccctcagctcctcagtttcatccgtgaggctcagcggctactgtggcagtccatggagggtcatcggctatcacgtcgtggtctggatgatggctgggatccctttgctgctcttccgttggaagcccctgtggggggtgcggctgcggctccggccctgcaacctggcccacgccgaaacactcgttatcgaaataagagacaaagaggatagttcctggcagctcttcactgtccaggtgcagactgaggccatcggcgagggcagcctggagccgtccccacagtcccaggcagaggatggccggagccaggcggcagttggggcggtaccagagggtgcctggaaggatacggcccagctccacaagagcgaggaggcggtgagtgtcggacagaagcgggtgctgcggtattacctcttccagggccagcgctatatctggatcgagacccagcaagccttctaccaggtcagcctcctggaccatggccgctcttgtgacgacgtccaccgctcccgccatggcctcagcctccaggaccaaatggtgaggaaggccatttacggccccaacgtgatcagcataccggtcaagtcctacccccagctgctggtggacgaggcactgaacccctactatgggttccaggccttcagcatcgcgctgtggctggctgaccactactactggtacgccctgtgcatcttcctcatttcctccatctccatctgcctgtcgctgtacaagaccagaaagcaaagccagactctaagggacatggtcaagttgtccatgcgggtgtgcgtgtgccggccagggggagaggaagagtgggtggactccagtgagctagtgcccggagactgcctggtgctgccccaggagggtgggctgatgccctgtgatgccgccctggtggccggcgagtgcatggtgaatgagagctctctgacaggagagagcattccagtgctgaagacggcactgccggaggggctggggccctactgtgcagagacacaccggcggcacacactcttctgcgggaccctcatcttgcaggcccgggcctatgtgggaccgcacgtcctggcagtggtgacccgcacagggttctgcacggcaaaagggggcctggtgagctccatcttgcacccccggcccatcaacttcaagttctataaacacagcatgaagtttgtggctgccctctctgtcctggctctcctcggcaccatctacagcatcttcatcctctaccgaaaccgggtgcctctgaatgagattgtaatccgggctctcgacctggtgaccgtggtggtgccacctgccctgcctgctgccatgactgtgtgcacgctctacgcccagagccgactgcggagacagggcattttctgcatccacccactgcgcatcaacctggggggcaagctgcagctggtgtgtttcgacaagacgggcaccctcactgaggacggcttagacgtgatgggggtggtgcccctgaaggggcaggcattcctgcccctggtcccagagcctcgccgcctgcctgtggggcccctgctccgagcactggccacctgccatgccctcagccggctccaggacacccccgtgggcgaccccatggacttgaagatggtggagtctactggctgggtcctggaggaagagccggctgcagactcagcatttgggacccaggtcttggcagtgatgagacccccactttgggagccccagctgcaggcaatggaggagcccccggtgccagtcagcgtcctccaccgcttccccttctcttcggctctgcagcgcatgagtgtggtggtggcgtggccaggggccactcagcccgaggcctacgtcaaaggctccccggagctggtggcagggctctgcaaccccgagacagtgcccaccgacttcgcccagatgctgcagagctatacagctgctggctaccgtgtcgtggccctggccagcaagccactgcccactgtgcccagcctggaggcagcccagcaactgacgagggacactgtggaaggagacctgagcctcctggggctgctggtcatgaggaacctactgaagccgcagacaacgccagttatccaggctctgcgaaggacccgcatccgcgccgtcatggtgacaggggacaacctgcagacagcggtgactgtggcccggggctgtggcatggtggccccccaggagcatctgatcatcgtccacgccacccaccctgagcggggtcagcctgcctctctcgagttcctgccgatggagtcccccacagccgtgaatggcgttaaggatcctgaccaggctgcaagctacaccgtggagccagacccccgatccaggcacctggccctcagcgggcccacctttggtatcattgtgaagcacttccccaagctgctgcccaaggtcctggtccagggcactgtctttgcccgcatggcccctgagcagaagacagagctggtgtgcgagctacagaagcttcagtactgcgtgggcatgtgcggagacggcgccaatgactgtggggccctgaaggcggctgatgtcggcatctcgctgtcccaggcagaagcctcagtggtctcacccttcacctcgagcatggccagtattgagtgcgtgcccatggtcatcagggaggggcgctgttcccttgacacttcgttcagcgtcttcaagtacatggctctgtacagcctgacccagttcatctccgtcctgatcctctacacgatcaacaccaacctgggtgacctgcagttcctggccatcgacctggtcatcaccaccacagtggcagtgctcatgagccgcacggggccagcgctggtcctgggacgggtgcggccaccgggggcgctgctcagcgtgcccgtgctcagcagcctgctgctgcagatggtcctggtgaccggcgtgcagctagggggctacttcctgaccctggcccagccatggttcgtgcctctgaacaggacagtggccgcaccagacaacctgcccaactacgagaacaccgtggtcttctctctgtccagcttccagtacctcatcctggctgcagccgtgtccaagggggcgcccttccgccggccgctctacaccaatgtgcccttcctggtggccctggcgctcctgagctccgtcctggtgggccttgtcctggtccccggcctcctgcaggggccgctggcgctgaggaacatcactgacaccggcttcaagctgctgctgctgggtctggtcaccctcaacttcgtgggggccttcatgctggagagcgtgctagaccagtgcctccccgcctgcctgcgccgcctccggcccaagcgggcctccaagaagcgcttcaagcagctggaacgagagctggccgagcagccctggccgccgctgcccgccggccccctgaggtagtgcaggcccacgggcaccccagacactggaactccctgcctctgagccaccaactggacccctctccagcaacaccaccgccaccacctcccacatccctgaggttggcgactgtctacactcctcccccgagaccacccccaccctggggaagcgttgactactgtcccctaccttggaccatcccgcgtaggggtggcagcccccagctcccctcagtgctgctgtcagtgtagcaaataaagtcatgatattttcctggc

SEQ ID NO: 3392 - DNA, 3096 bp, Homo Sapiens
  NM_022092
gcagtgcgcgacggcggcggcggcgcgggaggttcggagcgggagctcgggctcgcggacggtatggaggactacgagcaggagctgtgcggcgtcgaggatgatttccacaaccagttcgcggccgagctggaggtgctggcagagctggaaggggcgtcgactccgtcgccctccggggtccccctgttcaccgcgggccgacccccgcggacgttcgaggaggcccttgccagaggggacgcggcctccagtcccgccccagccgcatctgtgggcagcagccagggcggcgccaggaagaggcaggtggacgccgacctgcagccggccgggtccctgccccacgcccccaggatcaaacggcctaggctgcaggtggtcaagaggctgaacttcaggtcggaggagatggaggagccgccccctcccgactcctcgccgacggacatcaccccgccgccgagccctgaggacctcgcagagctttggggccacggagtctcagaagctgctgccgacgtgggtctcacacgggcctcaccagctgcccgcaatcccgtcctgaggcggccccccatcttggaggactacgtccacgtgacatccacggagggcgtccgggcttatctggtgctgcgtgctgaccccatggccccgggggtgcagggctctctcctccacgtcccatggcgaggcggtggccagctggacctgctgggtgtgtccttagcctccctgaagaagcaggtcgacggcgagcggcgggagcggctgcttcaggaggcccagaagctttcagacaccctgcacagtctcaggtcgggggaggaggaggcagcccagcccttgggggcccctgaggaggagccgactgacggtcaagacgcctccagtcactgcctctgggtggatgagtttgcaccccgccactacacggagctgctcagtgatgacttcaccaaccgctgcctgctcaagtggctgaagttgtgggacctggtggtgtttggccacgagaggccttcccggaagcccaggcccagtgttgagccggcccgggtcagcaaggaggccacagccccaggcaagtggaagagccacgaacaggtgctggaggagatgctggaggctgggctggacccgagccagcgaccgaagcagaaggtggcactgctctgtgggcccccggggctggggaagaccaccctggcacacgtgattgcgcgtcacgcggggtactctgtggtggagatgaacgccagtgacgaccgtagcccggaggtcttccgcacacgcatcgaggcggccacccagatggagtcggtgctgggtgctggcgggaagcccaactgcctggtcatcgatgagatcgacggggcccccgtggccgccatcaacgtcctcctgagcatcctgaaccgcaaggggccacaggaggtggggccacagggcccggctgtgccttcgggaggcggccgacggcgccgggcagagggggggctcctcatgaggcccattatctgcatttgcaatgaccagttcgcaccgtccctgcggcagctgaagcagcaggccttcctgctccacttcccgccgactctgccctcgaggctggtgcagcggctccaggaggtctccctgcggcagggcatgagggccgacccaggggtgctggccgccctctgtgagaaaactgacaatgacatccgggcctgcatcaacaccctgcagttcctgtacagccggggccagcgggagctgagcgtgcgggacgtgcaggccacacgcgtgggcctcaaggaccagcgcagagggctcttctcggtgtggcaggaggtcttccagctgcctcgagcccagaggcgccgtgtgggccaggaccccgccctgcctgctgacacactcctgctgggtgacggggacgcgggctccctcacctccgcctcacagcgattctaccgtgtcctgcatgccgctgcctctgcgggcgagcacgagaaggtggtccagggcttgtttgacaacttcctgcgtctgcggctgcgagactccagcctgggtgctgtgtgtgtggccctcgactggctggccttcgatgacctgctggcgggggctgctcatcacagccagagcttccagctgctgcgctacccacccttcctgcccgtggccttccatgtgctgtttgcttccagccacacacccaggatcaccttccccagcagccagcaggaggcccagaaccggatgagccagatgaggaacctgatccagacgctggtgtccggcatcgcgccagccacgcgcagccgggccacgccccaggccctgctcctcgatgccctctgcctgctcctggacattcttgcacccaagctccgccccgtgagcacacagctgtacagcacccgtgaaaagcaacagctggccagcctggtgggcacgatgctcgcttacagcctgacctaccgccaggagcgcacgcccgatggccagtacatctacaggctggagccgaacgtggaggaactctgccgcttccctgagctgcctgcccgcaagcccctcacctaccagacgaagcagctcatcgcccgcgagatcgaggtggagaagatgcggcgggcggaggcttctgcccgggtagagaacagcccccaggtggatgggagccccccagggctcgagggtctgctggggggcattggggagaaaggggtgcaccgacctgccccacgcaaccatgagcagcggctggagcacatcatgaggcgagcggcccgggaggaacagcctgagaaggacttctttggacgtgtggtcgtcaggagcacagcagtcccgagtgcaggggacacggccccggagcaggactcagtggagcggcgcatgggcacagcggtgggcaggagcgaggtctggttccgcttcaacgagggtgtctccaacgccgtgcggcgcagcctgtacatcagggacttgctctagttctctgagccgcggacatgccctcgcattgcttcccgcagagtgcagagacaggaagctggagatgtctttataaagtcacacctttacagactgtaaaaaaaa

SEQ ID NO: 3393 - DNA, 2160 bp, Homo Sapiens
  NM_022100
ggcagtgtcaataaagtttcagcggtttgtagtttgtagcggacaacatggcggccttcatgctgggctcgctgctgcggacgttcaagcagatggttccttcatcagcttcaggccaagttcgaagtcactatgtagactggagaatgtggcgcgatgtgaagagacgaaaaatggcctatgaatacgcagatgagaggctacgtattaattcactcaggaagaataccattttgccaaaaattcttcaggatgtggctgatgaagaaattgctgccctcccccgggatagctgtcctgttagaatcagaaatcggtgtgttatgacgtcccgtccgcgtggtgtgaagcggcgctggaggcttagtcgtatagtcttccgtcacttagctgaccatgggcaactttctgggatccagcgagcgacatggtaaatgagctccagaacctattgagcttgcagggaagccaagcttgcagttccagcaagcaaagattttttttaatagaccaaaccctaatctctacaggggcccagtacagttgtttggcctacctgatgctatctctaaactacttttaaaatgaagacatttgggtgtttcatgtcagtgaattatcttttctcttggacttaacaaacatactgttcccatacatagtacaaagagtagcataataaatattttctgtgaatgttttttataccctccttttaagtttaatcttttagtaacatataggggtttttgtattaagagcattatttcataaaatgctatcttatacataatccaactaattgacatgtagctcatgtatggcagtttgtaatcctggactagctttgctgacctgcagagctccccttaactattattgttagataaacagattggatagcaaggctgctgttctggattatctaatgctccacttcttcttgtgatggctgaacaaaagaaccactaagtgttttcttgtccatccttaagggactttaaaacaaattatgcctctttaagtccttgaaagtctccatctaaagaggaaaagtttgttggaacagtatatattccctatttttatgtttatttaatccataacagaaatgagtaagggtagcacaaagttctcattcagtaactcaacagtgtgatcatcagcccagtgataaaaatatacatactgaatggaagtacctacttaacatcaggaaaatattcctggagaacttaataaatcaggaggtgaggggtgagatttttttctgcacacagagggaacaaaagcacaaagaagcaaaggcactctgtagcatcagagaaccacagtcacttcagtagatcagaaatatgaagcacaagacaaggcccgtattgtggaggatctcacaaatcatgtgaaggaattaagactgacataccaggtattacagagttttaagcacaggaatgacatcatcagtttgtaatacaggtaagtgacagctgtgtggcagatggccatgagaggaaaaagctacaggcaagacaaccagttaggaggatgtcttagttgttgaggaagatgaaggcctgaactaacattgtggtattagtagaggagagaggacagatttttaaagttttaggaaagaaaattgggcaagacttacaagactgattatatctaagaggtaaagatggttctctgggttcctgataaaagtgtctagatagatggtagagggcaattccaagagggcaactccaagatagaaaatttggaaaaagaacaaatttaggggaaacagaagataagcgagttcaggttccagtcatgcggtgttggagatgcctgtgtcatctgatgaagactagtacgcagctggatagcagagtccgaaactcaggtggaggtgaagttatgagggaattatcacaatctagtttggattcatatttcttaaatatgtatgacaacttaccaactggaatgttctagctaatatctcaacttagaatccatctcactaccaatgggcaaacacttgtgttctaaagttacttgcaagtagtttatactgccaacttgatatatatacatgctatagtttgaacattttgtgtacttccaaaattcacattaaaatctaatccacaaaaaaaaaaaaaaaaa

SEQ ID NO: 3394 - DNA, 2326 bp, Homo Sapiens
  NM_022101
aggtgcaaggcgcactcgtgacgtcatttcggggcgaccctcttcttggcgtagagttttcagattgctcttgggaatcatgccgaaagtagtgtctcggtcagtagtctgctctgacactcgggaccgggaggaatatgacgacggcgagaagcccctccatgtttactactgtttgtgcggccagatggtcctagtgctggactgccagttagagaaattgcccatgaggccccgggaccggtcccgtgtgattgatgctgccaaacatgcccataagttttgtaacacagaagatgaggagactatgtatctgcggagacctgaaggcattgaacgacagtacaggaagaaatgtgcaaagtgtggactgccgctcttctaccaatcccagccaaagaatgctcctgttaccttcattgtggatggagcagtagtcaagtttggccagggctttgggaaaacgaacatatatactcagaaacaagagcctcctaagaaggtgatgatgaccaaacggaccaaagacatgggcaagttcagttctgtcaccgtgtctaccattgatgaagaggaagaggagattgaggctagggaagttgctgactcatatgcacagaatgccaaagtgattgaaaaacagctggagcgcaaaggcatgagcaagaggcgactgcaagagctggctgaattggaagccaagaaagcgaaaatgaaggggaccttgattgacaaccagttcaaataaccaggcctttttctaagccctagactagaggcaagcatttagatcaggaggcaaagtaatttcttgattacatagacggattcctatttatgccctagcagaaggctttacgttgtttcccattgattctcctacattcagtgaggtctttaactgagtccatttaacttgctttcttttttttttttttttttttgagataaagtcttgctctttcgcccaggatggagtgcagtggtgcgatctcggctcactgcaacctccgcctcccgggttcaagcagttctcctgcctcagcctcctgagtagctgggattacaggcatgtgccaccacgcctggctaatttttgtatttttagtagagacgggttccaccatgttggccaggctggtctccaactcctgacctcaaatgatccacccacctaggcctcccaaagtgctgggattacaggagtgagccaccgtgcccagccttgccctgctttctaggagatggagttttctgaatttttctgtatttaggttttctgtactattttttgtccacttgatgcaaacttcttcagctgtgtagaaactttatgaatagatgagtgcttgagtgtctccagtctctaaagtggctgcttttattctttcttcaaagttaataacatgttgcaagatttttggacaaaatattatggtgtgtcataggaaaagcaccatgaattatatttaggtatagcaagtcagatcctttgaagtgactctgtctctgttcttagaagggttcttggaattggctgtggtttgaatctttctactgtcagaggagacccattaaaagccagaatctgcataaagctttctttacttcaaacactgaagctgtaggcgagccatcccgtatcgactttatactcaaagaaggaaaagccagattgcagtgagtgggtaggacagctcagatccaaatgaaagtagggtctcaagtaacccaagggtggccgggtacggtggctcacgcctgtaatcctagcagtttgggaggcagaggcgggcagattgcctgagctcaggagtttgagaccagcctgggcaacatggtgaaaccctgtctctactaaaatacaaaagaaattagccaggtgtggcggcatacccctgtagtcacggctacttgggaggcagaggcaggagaattgcttgaactcgggaggtggaggttgcagtgagctgagattgcaccactgtactccagcactccagcctgggcgacagagtgagactctgtctctacaaaaaaaaaaaaaaaaaaaagtaacccaagggagggagctaccctctagtcgggcagctgatactgcttccttgcatggatacatgggagggagacgttatagattaagaaatgatagcaagataaacaaaatgatttgttgggtatcttttactttacatttgttatttgcagaggagtgttgtatatatagatgttattttatgtcacactgcttcaatgatacctatatccatgtgtttgtatccatgtttttatccattcaactgtattaaaaggtgttgggacagga

SEQ ID NO: 3395 - DNA, 2837 bp, Homo Sapiens
  NM_022105
gtacttgcgcagaactcccctcgcggcgaccacgcactacgggttggcgccagagtcaaaaggcgtcggccctctggcaagatggctgctgcggaggcgttggagcgcggaaatctggaaccgggatggcgacgtctacactgagtcggaggcgaaggagcttactccacgggaacagcctctagataatctgagttgttgaaaatacgaagcctgttactcgtgaacagtggctgacaacagtgttgttgtgagcctggctgtctgcttggacccagaggtttcgtctgccagggtttttggttgtatttaggatttcagggaaaagtgtccaagctttcagtgttggagcaggtatggacgacaaaggcgacccgagcaatgaggaggcacctaaggccatcaaacccaccagcaaagagttcaggaaaacatggggttttcgaaggaccactatcgccaagcgagagggcgcaggggacgcggaggctgacccactggagccgccacccccacagcagcagctgggcctgtccctgcggcgcagtgggaggcagcccaagcgcactgagcgcgtggagcagttcctgaccattgcgcggcgccgcggcaggaggagcatgcctgtctccctggaggattctggtgagcccacgtcctgccccgccacagacgccgagacagcctccgagggcagcgtggaaagcgcttctgagaccagaagcggcccccagtctgcttccacagctgtgaaggaacgaccagcctcttctgaaaaggtgaaaggaggggatgaccacgatgacacctccgatagtgacagcgatggcctgaccttgaaagagcttcagaatcgccttcgcaggaagcgggaacaggagcccactgagaggcccctgaaagggatccagagtcgcctgcggaagaagcgccgggaggagggtcccgccgagactgtgggctccgaggccagtgacactgtggagggcgtcctgcccagtaagcaggagcccgagaacgatcagggggttgtgtcccaggctgggaaagatgacagagagagtaagttggagggaaaggcggctcaggacatcaaagatgaggagcctggagacttgggccgaccgaagcctgaatgtgagggttacgaccccaacgccctgtattgcatttgccgccagcctcacaacaacaggtttatgatttgctgtgaccgctgtgaagaatggtttcatggcgattgtgtgggcatttctgaggctcgagggaggcttttggaaaggaatggggaagactatatctgcccaaactgcaccattctgcaagtgcaggatgagactcattcagaaacggcagatcagcaggaagctaaatggagacctggagatgctgatggcaccgattgtacaagtataggaacaatagagcagaagtctagcgaagaccaagggataaagggtagaattgagaaagctgcaaatccaagtggcaagaagaaactcaagatcttccagcctgtgatagaggcgcctggtgcctcaaaatgtattggccccgggtgctgtcacgtggcgcagcccgactcggtgtactgcagtaatgactgtatcctcaaacacgccgcagcgacaatgaagtttctaagctcaggtaaagaacagaagccaaagcctaaagaaaagatgaagatgaagccagagaagcccagtcttccgaaatgcggtgctcaggcaggtattaaaatctcttctgtgcacaagagaccagctccagaaaaaaaagagaccacagtgaagaaggcagtggtggtccctgcgcggagtgaagcactcgggaaggaagcagcttgtgagagcagcacgccgtcgtgggcgagcgatcacaattacaatgcagtaaagccagaaaagactgctgctccctcgccgtcactgttgtataaatgtatgtatcacctaggggttggcctcctggacccctcccgttctttctggatagccatcccctgggcctgtccaggactgggagttgcagctttgtgttaagctgatcacagacaccggctgcaccatcagcgggaagcagagcccatgtccaggatgcctcctgctgccctgtgtccatccctagtctgtcaggacttcctgtcactgttttccaaagctgtaaacctcactggtgaacgttcaccttaatgattgattctttaatctctgttttcactctcaggctctggtaagtattcgtattctcttcatcccagtctgattgcatagccacactgcccggcacgccacatccacccctgtctgcacatgagttgttctgacaacagcgctgtatacgcttcagtttttccacattgtccacggccagcacatgaaagcatcacttcttttttatgttgtgggaatctttgcaagttagtgttgcatctgattttcaggtgtacatttatttttgactgggcagataggggatttttttttttccatgtccgattcacacgctacacacccacatgaacacattcgaacttcgaaggccacacactcctgcttcataggccccacggtaagtgagttcacacctagaacactgtcctgaccgcaggacgcgtgccttggacttggtattctacatgtgactggctttcttgccctcgtctcttgaatgtttagactcttaagatcatatcctgccccaaatttcaaattaatgaaatgaagatatttcaaacagatctttgaaacctcagattctgtggtgcaattttaatgttttcttgtttctcagttttctgctataaaactattttcaattcagtctttaaaaaa

SEQ ID NO: 3396 - DNA, 5053 bp, Homo Sapiens
  NM_022106
agctcagccagggagctcagcggagctgcgcgcctccgcctccagctcccctgccgcagcgcgccgcagccgggcgtccccgcgcgggcgccggagaggaaggaaggctggcagcctcgtcacgtgtccgctgcagtcgcgaaacagttccggtggtgaggagacctttccaaatataagaggaataaagaagtcacctccccagctgtcatcatcttccagcagattgagcaagaatattttgagcactacaggaaagacagtccatcaaacccgagatgatgatcagccacgtgattttttcaagaagaggaatagggtgaatgaatctcatcagaaaagcagcaatatgaatgctggcccatcttggaataaagtgcaacattcaaagaattcttcaggaaaaaggcagagtaaatcccaagtaccccacgcttcttcccagccgagaagcagcctcacagctgtcacccagcctactgaagaaaaacttaaagaaagcatttccccggaagcaagacgcaaaaggaatccactcggttccaggtgtcagggggcctcagggaataaactgtttcttgattttcagtcaatgaaaattattaaagagaatgctgatgaggacagtgcaagtgatctctctgattcggaaagaattcccattcctccttctcccctcacacctccagatctcaatcttcgagctgaagaaattgatccagtttactttgatcttcaccctggtcagggccatacaaaacctgaatactattatcctaatttccttccatcccctttcagctcctgggacctacgagatatggccctgcttctgaacgcagagaacaaaacggaagccgtgccccgagtgggaggacttcttgggaagtatatcgatagacttattcagcttgagtggctgcaagtccagactgtacagtgtgaaaaagcaaaggggggcaaagcaaggccccccactgcccctgggacctcaggggcactgaaaagccctgggagaagtaagctaattgctagtgctctgtccaagccactacctcaccaggaaggggcttcaaagtcaggcccttcccgaaagaaagcttttcaccatgaagaaatccacccatcacattatgcatttgagacttcccctagacccattgatgtgcttggtggtaccaggttttgttctcagaggcaaacccttgaaatgaggacagaagaaaagaaaaagaaatcaagtaagagtacgaagctgcagcgctgggatctgtccggcagtggaagcagctctaaggtggaaaccagcggtcacattcgagttcccaaacaggcagctgtgattctggactcagcagattcctgtaaggcctccaaaacacaagcacatgcacatcctaggaaaaagggaaaggcagagagctgtggtcatgccactgtatcgagtgagaaaaaactgaaaacaaacggagtaaagcaaaacacatataaactaaaataaatatctaaaatgctgaattgccaagacctgcaggtacctcaatgttagagcgcttccaaaagtcaaaatactgtgaattttaaggaattttacaaatactgacatttaagtagttgactggcatttttgtccacctttatttctaccctgagtggggttattttcaaagggaagtgtctttcaataagcctttctttgtattgtcagtcttaggcaaatgagagccctttagataaaaattatgtaaaatatgtgccatataaaggaataaaatggcacctctccagggaaagtgtcagtgaaacctcagctacagtagccggtctgtgtagagcagctagtggtgttacctccccattttcacatgcacgtaagtatatgaaatagtgcagactgtttcaaatggtgtggaatcctaaatgtttaaaataaggtccttcttgcccactccctcgcttacttttttataaactcctcaagcaaaatttctgttcattttacccttaggagaagctttagttcttcctcaagtcagggagtagtgagtttgtattttgagtagtcatttctcactaagctggttgctttctagagagacagtggaatctagtactttaatacattttctctgacatggttttttttttcttttttgaggggcattttaaacttagaggtggtggtaaaacctacttttgagttctccgaactgaggttaaaataacttgcagaattttccaaagtcaatgggcttagcatgattactgctgtttggtggggctgagaatgaaatatttgacattctggaattgctggcatgtaaagcttctccagagaggcaccccagggaaatcactctttacaatttgtaaaggaagggcctgtaaaaggatcaaaacacatggacctacattcagtgtaatagttacaaagttactgatttgggttccacaccctgtggtccttagtcaaaaataatgatctgtttcagtttgcaagagcaggattttattattttgcttggggtgaggggcgggagagtggaatatgagtaaggttgctgaatgaattctaaactcgcttatctggtcttcaggcttcccaactctctccaagccttcttatttcactgcagttaaataacatcttcttgttcctatagttgtgctgtgagttttctgttcatatttgcgcagtgtattttaatacggcccatgtcattatagttgattttatccctttaaacaattactgtatttgtttttgacgtagaggtttcaattttttcaccttgggggcaaatgaaaaacttggcatttttcatttgggaacatataatagcttgtaaacttttcagacagcagtaaatgtctgaaaaaatatcaaaaacagcataaagacaagattatgtagctctaattatacgtatataattataaaaaacaatgtgcaagggttatattttaaggtcttttaaaatctgattttgatcataccaaatgacataatattttttatggtagccttttactttcaagacttaattttcagacttgtacaagttccttcttacattctttccctctcacaccatcctactggagaaagcatacttttatgctaagatcttactttaagctttttatgtgaacaaaagatgtacatatagtaagtattacttccgtagtcctcaaatttactataacttttgtacttagtatatgttttatatttggaaaacagcactacgcttagttttcctgtagttcctgagtgatgtctgtgtgttccttgcctgcccttttttgtgagcacagattagtctgttatccatggctggcacttcacttatgatcctttctctgctagatttttatgcagctctctatgaagtttcatggcccatagatattcaaaagcaagatattctatacatatgtgtatatgtatatatactccttatgttaatactaaagtgtttatgctgagttgctgcctttccccgtcatgtatccatgtgcatgctcttagagaccttgaatggttgagggtaaagtgatttattagtaattctacttgccttgtgtatgtctgagctgaaaacaatcgtgattaagaaatttagaggtggctgggcgtggtggctcacgcctgtaatcccagcactttgggaggccgaggcaggcggatcacctgaggtcgggagttcaagaccagcctgaccaacatggagaaaccctgtctccactaaaaatacaaaattagccgggtgtggtggtgcatgcctgtaatcccagctactcggaagtttgagacgagaatctcttgaacccgggaggcggaggttgtggtgagccaagatcgtgccattgcactccagcctgggcaacaagagggaaactccgtttcaaaaaaaaaagaaaaagaaagaaattgagaagtaacgcctcataatatttgttcccagctttttaaattgaagctggttgcataatctggggaatagtcataatttcatgtgttatacagtttaaaaagcctgcaaaagtgactttgcttgtttactttctgcctcagattgactattttaaccaatattgtcacgactagatcatagctcctagtgaataacatgaggtgttttaaagttaggtctattacagaattaacataagcacaattttaattttatgatatctgatatgcctatctaatacatcttaatgcattaaatgctgcagataagaatcttgctatttttcaagtagacaacattagaaagttgaatcatgaactcattcaattcatcaagtcaaaagcactgagtgttttgctagtctagtgacatgggttattgtatttccgagaagtgcctctcatttctggggagttgtttacatataccctgcatttaaaccaattaaaacaatccaagtttctttaaaaaaaaaaagaaaaagaaaaagaaaaagaaaaatattttaggcttagaattatctaatggaaaaaatgtaaaaaagtacaaaaatgaactaaaagtatatcagtatttgcagtatttgctgtgattacttaggtttagactttctcaacttcttagatgactaaatgggctgaagacttgtaactaacttgaataggatagacttcataccctgtgacaaaaaggatggggaagagaatatcattggtcttgccatatacctcctagctaaaaggaaaatggtttgtagttgttcttgggcctactgtgttgcttttcagaaggacataagactttctactttatctgatatggatatcgtctacttcctcattcctttatgctcacttatggagtagttacatagaaatataactcttggtggtactgtattttaaggtaattcagaagcagtatgtattatttatgtacatgtacaggacaccattcaaaatggcttgaaaatattcagcatgtttgttatttgctgttatattgtatgtttagttttgtatgtgataaacagaattgatgtaagtttttgtggacttgaatttctccttccttga

SEQ ID NO: 3397 - DNA, 1472 bp, Homo Sapiens
  NM_022107
ccggagcggggatcaccttaacttgactgtggtcccccagccctccaagaaatgcccataaaccaaggaggagagggtaaaaaatagaagaatacatggaattggggagaagaatgggaaaaaagatgggagtgactgcataatgtcagcattttgtgcttttggctcagcatttggattggatggaggattttcatcctgaaaccagccctccgtcgccaccgaccatggaataattgtcttccacgaaactcttccctggtgccaaaaagggttttatgtatatatttgagagctccacatccctggatctgaatcctccacttcccactggaaccatgcccctcccagtcccgtttctcccctctaggggatggaggctgagagaccccaggaagaagaggatggtgagcagggcccccctcaggatgaggaaggctggccccctccaaactccaccactcggccttggcgatctgctcctccatcccctcctcctccagggacccgccacacagccctgggaccccgctcggcctccctgctctccctgcagactgaactccttctggacctggtggctgaagcccagtcccgccgcctggaggagcagagggccaccttctacaccccccaaaacccctcaagcctagcccctgccccactccgtcctctcgaggacagagaacagctttacagcactatcctcagtcaccagtgccagcggatggaagcccagcggtcagagcctcccctccctccaggggggcaagagctcctggagttgctgctgagagttcagggtgggggtcgaatggaggagcaaaggtcccggccccccacacacacctgctgagacttgagccccaaccagcccttccttgccactggtctcaaagctgggcagcccattgcatgccctcaactcttgcttggcaggggtaccagagactgaaagacacggcacaaatctcaatattcatctcccacatcaccttccctgggaactggacagggtgaaagtcctcaaactctgggaacaggcgagatggaacagggatttaactccccgcccacaggtccatgggagcttgaggcagtaagggggatcccaggcacccatctcaaggagtggctgggagtcttttccctaacttgtggggacaccaccagttgtcaagctactaggcagtagggtctgagggctcaggcctccacctgagaggttataacctgagagacagctctacccttcctcccagtaagaagggaaggtgggtgggcacctgagagattaagactattctcccagtcccactaccagcacccccgatccctgagactgaggggtttacgggctgtgaatggaccttcagccctgcccaccctccctccccactgctgctgagtctgtctgatgttttggttgtgtgaataaatataattcccctctggaaaaaaaaaaaaaaaaa

SEQ ID NO: 3398 - DNA, 2833 bp, Homo Sapiens
  NM_022117
gaacgccagagcgaggtggtgaggagagctggttgcgtgagtctcctcagctctgcttaccggtgcgactagcggcagcgacgcggctaaaagcgaaggggcgagtgcgagtcccctgagctgtacgaacgcggtcgccatggaccgcccagatgaggggcctccggccaagacccgccgcctgagcagctccgagtctccacagcgcgacccgcccccgccgccgccgccgccgccgctcctccgactgccgctgcctccaccccagcagcgcccgaggctccaggaggaaacggaggcggcacaggtgctggccgatatgaggggggtgggactgggccccgcgctgcccccgccgcctccctatgtcattctcgaggagggggggatccgcgcatacttcacgctcggtgctgagtgtcccggctgggattctaccatcgagtcggggtatggggaggcgcccccgcccacggagagcctggaagcactccccactcctgaggcctcgggggggagcctggaaatcgattttcaggttgtacagtcgagcagttttggtggagagggggccctagaaacctgtagcgcagtggggtgggcgccccagaggttagttgacccgaagagcaaggaagaggcgatcatcatagtggaggatgaggatgaggatgagcgggagagtatgaggagcagcaggaggcggcggcggcggcggaggaggaagcagaggaaggtgaagagggaaagcagagagagaaatgccgagaggatggagagcatcctgcaggcactggaggatattcagctggatctggaggcagtgaacatcaaggcaggcaaagccttcctgcgtctcaagcgcaagttcatccagatgcgaagacccttcctggagcgcagagacctcatcatccagcatatcccaggcttctgggtcaaagcattcctcaaccaccccagaatttcaattttgatcaaccgacgtgatgaagacattttccgctacttgaccaatctgcaggtacaggatctcagacatatctccatgggctacaaaatgaagctgtacttccagactaacccctacttcacaaacatggtgattgtcaaggagttccagcgcaaccgctcaggccggctggtgtctcactcaaccccaatccgctggcaccggggccaggaaccccaggcccgtcgtcacgggaaccaggatgcgagccacagctttttcagctggttctcaaaccatagcctcccagaggctgacaggattgctgagattatcaagaatgatctgtgggttaaccctctacgctactacctgagagaaaggggctccaggataaagagaaagaagcaagaaatgaagaaacgtaaaaccaggggcagatgtgaggtggtgatcatggaagacgcccctgactattatgcagtggaagacattttcagcgagatctcagacattgatgagacaattcatgacatcaagatctctgacttcatggagaccaccgactacttcgagaccactgacaatgagataactgacatcaatgagaacatctgcgacagcgagaatcctgaccacaatgaggtccccaacaacgagaccactgataacaacgagagtgctgatgaccacgaaaccactgacaacaatgagagtgcagatgacaacaacgagaatcctgaagacaataacaagaacactgatgacaacgaagagaaccctaacaacaacgagaacacttacggcaacaacttcttcaaaggtggcttctggggcagccatggcaacaaccaggacagcagcgacagtgacaatgaagcagatgaggccagtgatgatgaagataatgatggcaacgaaggtgacaatgagggcagtgatgatgatggcaatgaaggtgacaatgaaggcagcgatgatgacgacagagacattgagtactatgagaaagttattgaagactttgacaaggatcaggctgactacgaggacgtgatagagatcatctcagacgaatcagtggaagaagagggcattgaggaaggcatccagcaagatgaggacatctatgaggaaggaaactatgaggaggaaggaagtgaagatgtctgggaagaaggggaagattcggacgactctgacctagaggatgtgcttcaggtcccaaacggttgggccaatccggggaagagggggaaaaccggataagggttttccccttttggggatcacctctctgtatcccccacccactatcccatttgccctcctcctcagctagggccacgcggccccacattgcacttctggggggtgaccgacttcgtacacgggtttaaagtttatttttatggtttagtcattgcagagttcttattttggggggagggaaagggggctagtccccttcttttggccctccgcccccgcaggcttctgtgtgctgctaactgtatttattgtgatgccttggtcagggcccctctacccacttctcccagtcagttgtggccccagcccctctccctgtgctgtgtggagtggacaccctgacccccgaagcggggagggccgctgtggccttcgtcacagccgcgcagtgcccatggaggcgctgctgccaccttcctctcccaagttctttctccatccctctcctcttcccgccgcgccgctagcccgcctcggtgtctatgcaaggccgcttcgccattgcggtattctttgcggtattcttgtccccgtcccccagaaggctcgcctctccccgtggaccctgttaatcccaataaaattctgagcaagttcagagtgcaaaaa

SEQ ID NO: 3399 - DNA, 3624 bp, Homo Sapiens
  NM_022118
tagggccgctgtggatggtttctaaaatgatcattgaaaacttcgaggcactcaagtcctggctcagcaagactctcgagcccatctgtgatgcagatccatccgccctagcaaaatatgttctggctttggtaaagaaagacaaaagtgaaaaagagttaaaggcattatgtattgatcagctggatgtatttcttcagaaagagacacagatatttgtggaaaaactttttgatgctgtgaatacaaagagttacctacctcctccagagcagccatcatcaggaagcctgaaggtagaattttttccacaccaagaaaaagatataaagaaggaagagatcactaaggaggaagagcgagagaagaagttttctagaaggctaaatcacagtcctccccagtcaagctcccgatacagggaaaatagaagccgtgatgagaggaaaaaagatgatcgttctcgcaaaagagattatgatcgaaaccctcctcgaagagattcatacagagaccggtacaatagaagacgagggcggagtcgcagttatagcaggagtcgaagtcgaagttggagtaaagagaggcttcgtgagagggacagagatagaagcaggactagaagcagaagcagaacacgaagcagggaaagggatctggtaaaacctaaatatgacctggatagaacagatccattagaaaataattatactccagtctcttcggtacctagtatttcatctggccactaccctgtacctactttgagcagcactattacagtaattgctcctactcatcatggaaacaacactaccgaaagttggtctgaatttcatgaagaccaagtggaccataactcttacgtaagaccacccatgccaaagaaacggtgtagagactatgatgaaaagggtttttgtatgagaggagacatgtgtccttttgatcatggaagtgatccagtagttgtagaagatgtgaatcttcctggtatgctgcctttcccagcacagcctcctgttgttgaaggaccacctcctcctggactccccccacctccaccaattcttacacccccacctgtgaatctcaggcccccagtaccaccgccaggtccattgccacccagtctcccacctgttacaggaccaccacctccacttcctcctttgcagccatctggcatggatgctcctccaaactctgcaaccagttctgttcctactgtagtaacaactggcattcatcaccagcctcctcctgctccaccctctctttttactgcagatacatatgacacagatggctacaatcctgaagccccaagcataacaaacacttccagacctatgtatagacacagagtgcatgcacaaaggcccaacttgataggactaacatcaggggatatggatttgccacccagagaaaagcctcccaataaaagcagtatgaggatagtagtggactcagaatcaaggaaaagaaccattggttctggagagcctggagttcctacaaagaagacttggtttgataaaccaaattttaatagaacaaacagcccaggctttcagaagaaggttcaatttggaaatgaaaataccaagcttgaacttagaaaagttcctccagaattaaataatatcagcaaacttaatgaacattttagtcgatttggaaccttggttaacttacaggttgcttataatggtgatcctgaaggtgccctaatccaatttgcaacatacgaagaagcaaagaaagcaatatcaagtacggaagcagtattaaacaatcgctttattaaggtttattggcacagagaaggaagcacccaacagttacaaactacttctccaaagcctttagtccagcagcccattttgcctgttgtgaagcagtcagtcaaagagcggctgggtccagtaccttcaagtactattgaacctgcagaagcccagagtgcctcttcagaccttcctcaggtgttgtctacatctactggcctaacaaaaacagtgtataatccagctgctttgaaggctgcacagaaaaccttacttgtttccacctctgcagttgataataatgaagcacagaaaaaaaaacaggaggcattgaaacttcagcaggatgtaaggaaaaggaaacaagaaattttagaaaagcacattgaaacacagaagatgttaatttcaaaactggagaaaaacaaaacaatgaagtctgaagataaagcagaaataatgaaaactttagaggttttgacaaaaaatattaccaagttgaaagatgaggtcaaagctgcttctcctggacgctgtcttccaaaaagtataaaaaccaagactcagatgcagaaggaattacttgacacagaactggatttatataagaagatgcaggctggagaagaagtcactgaacttaggagaaagtatacagaattacagctggaagctgccaaacgagggattctttcatctggtcggggcagaggaattcattcaagaggtcgaggtgcagttcatggccgaggcagggggcgagggcgagggcgaggtgtgcctggtcatgctgtggtggatcaccgtcccagggcattggagatttctgcatttacggagagcgatagagaagatcttcttcctcattttgcgcaatatggtgaaattgaagattgtcagattgatgattcctcacttcatgcagtaattacattcaagacaagagcagaagctgaagcagctgcagttcatggagctcgtttcaaagggcaagatctaaaactggcatggaataaaccagtaactaatatttcagctgttgaaacagaagaagttgagcctgatgaagaagaatttcaggaagagtctttggtggatgactcattacttcaagatgatgatgaagaagaagaggacaatgaatctcgttcttggagaagatgatttgactgatcattgatctgcatatgctagaactctacctgtgtttcattagtattatctaatgtacttttacatatttgtaaaaacaatttttggtaaaatgtgatgaagatggatttcacaaatagacaaaaaagaagaaaactaccttctgatcttgtattttgaaagattgatgtttgcattttacttcagtaaacaattgctaaagacatcacactagaaacatatgcaatgtttttattacatacttctactggacatcacagaattctttgggttctttgtaatttaatgaataggtctgaaaacttatgaccaatacttgttataacttagaggactttgttttattccaaataaggaatgaatttgcatttaaaatcttaatgaatgttttcaaaactgaatagataacatagtactctaactaaagtctccaagttatgtattataatattacatagtagtatgcttaggctttactatgtattagccttttgttggactgtgtatgtattttaccatatgggttttaatgataatggtgtatgactgctttacatgagtccttatgcatccagatgttataataaagtggaatggtctctttaaaaaaaaaaaaggaaagaaaagagaaaagcaatgacaaaaaaaaaaaaaaaaa

SEQ ID NO: 3400 - DNA, 1647 bp, Homo Sapiens
  NM_022122
gcttcagctgaagaaagagaggaatgaagcgccttctgcttctgtttttgttctttataacattttcttctgcatttcccttagtccggatgacggaaaatgaagaaaatatgcaactggctcaggcatatctcaaccagttctactctcttgaaatagaagggaatcatcttgttcaaagcaagaataggagtctcatagatgacaaaattcgggaaatgcaagcattttttggattgacagtgactggaaaactggactcaaacacccttgagatcatgaagacacccaggtgtggggtgcctgatgtgggccagtatggctacaccctccctgggtggagaaaatacaacctcacctacagaataataaactatactccggatatggcacgagctgctgtggatgaggctatccaagaaggtttagaagtgtggagcaaagtcactccactaaaattcaccaagatttcaaaggggattgcagacatcatgattgcctttaggactcgagtccatggtcggtgtcctcgctattttgatggtcccttgggagtgcttggccatgcctttcctcctggtccgggtctgggtggtgacactcattttgatgaggatgaaaactggaccaaggatggagcaggattcaacttgtttcttgtggctgctcatgaatttggtcatgcactggggctctctcactccaatgatcaaacagccttgatgttcccaaattatgtctccctggatcccagaaaatacccactttctcaggatgatatcaatggaatccagtccatctatggaggtctgcctaaggaacctgctaagccaaaggaacccactataccccatgcctgtgaccctgacttgacttttgacgctatcacaactttccgcagagaagtaatgttctttaaaggcaggcacctatggaggatctattatgatatcacggatgttgagtttgaattaattgcttcattctggccatctctgccagctgatctgcaagctgcatacgagaaccccagagataagattctggtttttaaagatgaaaacttctggatgatcagaggatatgctgtcttgccagattatcccaaatccatccatacattaggttttccaggacgtgtgaagaaaatagatgcagccgtctgtgataagaccacaagaaaaacctacttctttgtgggcatttggtgctggaggtttgatgaaatgacccaaaccatggacaaagggttcccgcagagagtggtaaaacactttcctggaatcagtatccgtgttgatgctgctttccagtacaaaggattcttctttttcagccgtggatcaaagcaatttgaatacgacattaagacaaagaatattacccgaatcatgagaactaatacttggtttcaatgcaaagaaccaaagaactcctcatttggttttgatatcaacaaggaaaaagcacattcaggaggcataaagatattgtatcataagagtttaagcttgtttatttttggtattgttcatttgctgaaaaacacttctatttatcaataaattcatagacctaaaataaacctcaacaggtcttttaatataaattctgcttcaaaatagaataaaaccattctttaacaac

SEQ ID NO: 3401 - DNA, 11134 bp, Homo Sapiens
  NM_022124
gcggcggcggcggctcgggagagagggacgcgggctgcaggcgcgatgcttggctagaggacgcgtccgacggcggccggacgctgaggtggtcggggctagtcagcccggcctgggcatggagcgcggggtggcagagcctctggacgtttggggcgcgcccagtccgagcccccggcgcgcctgaagttgcgagcggcgagcggcgagcggcgagcggcccgcggagacccaggagctgccggcacgccgcggatgagccttcgcgccggcgggaagacgcggcggtggccagggccagagcaggcggcccgcgggggccgatccggcggagagcagagcccgaggcgaggcgaggcgcggcgccgctgcacacacgcacacggagccatggggcgccatgttgccaccagctgccacgtggcctggcttttggtgctgatctctggatgctggggccaggtgaaccggctgcccttcttcaccaaccacttctttgatacatacctgctgatcagcgaggacacgcctgtgggttcttctgtgacccagttgctggcccaagacatggacaatgaccccctggtgtttggcgtgtctggggaggaggcctctcgcttctttgcagtggagcctgacactggcgtggtgtggctccggcagccactggacagagagaccaagtcagagttcaccgtggagttctctgtcagcgaccaccagggggtgatcacacggaaggtgaacatccaggttggggatgtgaatgacaacgcgcccacatttcacaatcagccctacagcgtccgcatccctgagaatacaccagtggggacgcccatcttcatcgtgaatgccacagaccccgacttgggggcagggggcagcgtcctctactccttccagcccccctcccaattcttcgccattgacagcgcccgcggtatcgtcacagtgatccgggagctggactacgagaccacacaggcctaccagctcacggtcaacgccacagatcaagacaagaccaggcctctgtccaccctggccaacttggccatcatcatcacagatgtccaggacatggaccccatcttcatcaacctgccttacagcaccaacatctacgagcattctcctccgggcacgacggtgcgcatcatcaccgccatagaccaggataaaggacgtccccggggcattggctacaccatcgtttcagggaataccaacagcatctttgccctggactacatcagcggagtgctgaccttgaatggcctgctggaccgggagaaccccctgtacagccatggcttcatcctgactgtgaagggcacggagctgaacgatgaccgcaccccatctgacgctacagtcaccacgaccttcaatatcctggttattgacatcaatgacaatgccccggagttcaacagctccgagtacagcgtggccatcactgagctggcacaggtcggctttgcccttccactcttcatccaggtggtggacaaggatgagaatttgggcctgaacagcatgtttgaggtgtacttggtggggaacaactcccaccacttcatcatctccccgacctccgtccaggggaaggcggacattcgtattcgggtggccatcccactggactacgagaccgtggaccgctacgactttgatctctttgccaatgagagtgtgcctgaccatgtgggctatgccaaggtgaagatcactctcatcaatgaaaatgacaaccggcccatcttcagccagccactgtacaacatcagcctgtacgagaacgtcaccgtggggacctctgtgctgacagtcctggcaactgacaatgatgcaggcacctttggggaagtcagctacttcttcagtgatgaccctgacaggttctcgctggacaaggacacgggactcatcatgctgattgccaggctggactatgagctcatccagcgcttcaccctgacgatcattgcccgggacgggggcggcgaggagaccacaggccgggtcaggatcaatgtgttggatgtcaacgacaacgtgcccaccttccagaaggatgcctacgtgggtgctctgcgggagaacgagccttctgtcacacagctggtgcggctccgggcaacagatgaagactcccctcccaacaaccagatcacctacagcattgtcagtgcatctgcctttggcagctacttcgacatcagcctgtacgagggctatggagtgatcagcgtcagtcgccccctggattatgaacagatatccaatgggctgatttatctgacggtcatggccatggatgctggcaacccccctctcaacagcaccgtccctgtcaccatcgaggtgtttgatgagaatgacaaccctcccaccttcagcaagcccgcctacttcgtctccgtggtggagaacatcatggcaggagccacggtgctgttcctgaatgccacagacctggaccgctcccgggagtacggccaggagtccatcatctactccttggaaggctccacccagtttcggatcaatgcccgctcaggggaaatcaccaccacgtctctgcttgaccgagagaccaagtctgaatacatcctcatcgttcgcgcagtggacgggggtgtgggccacaaccagaaaactggcatcgccaccgtaaacatcaccctcctggacatcaatgacaaccaccccacgtggaaggacgcaccctactacatcaacctggtggagatgacccctccagactctgatgtgaccacggtggtggctgttgacccagacctgggggagaatggcaccctggtgtacagcatccagccacccaacaagttctacagcctcaacagcaccacgggcaagatccgcaccacccacgccatgctggaccgggagaaccccgacccccatgaggccgagctgatgcgcaaaatcgtcgtctctgttactgactgtggcaggccccctctgaaagccaccagcagtgccacagtgtttgtgaacctcttggatctcaatgacaatgaccccacctttcagaacctgccttttgtggccgaggtgcttgaaggcatcccggcgggggtctccatctaccaagtggtggccatcgacctcgatgagggcctgaacggcctggtgtcctaccgcatgccggtgggcatgccccgcatggacttcctcatcaacagcagcagcggcgtggtggtcaccaccaccgagctggaccgcgagcgcatcgcggagtaccagctgcgggtggtggccagtgatgcaggcacgcccaccaagagctccaccagcacgctcaccatccatgtgctggatgtgaacgacgagacgcccaccttcttcccggccgtgtacaatgtgtctgtgtccgaggacgtgccacgcgagttccgggtggtctggctgaactgcacggacaacgacgtgggcctcaatgcagagctcagctacttcatcacaggtggcaacgtggatgggaagttcagcgtgggttaccgcgatgccgttgtgagaaccgtggtgggcctggaccgggagaccacagccgcctacatgctcatcctggaggccatcgacaacggccctgtagggaagcgacacacgggcacagccaccgtgttcgtcactgtcctggatgtgaatgacaaccggcccatctttctgcagagcagctatgaggccagcgtccctgaggacatccctgaaggccacagcatcttgcagctgaaagccacggacgcagatgagggcgagtttgggcgtgtgtggtaccgcatcctccatggtaaccatggcaacaacttccggatccatgtcagcaatgggctcctgatgcgagggccccggcccctggaccgggagcggaactcatcccacgtgctgatagtggaggcctacaaccacgacctgggccccatgcggagctccgtcagggtgattgtgtacgtggaggacatcaacgatgaggcccccgtgttcacacagcagcagtacagccgtctggggcttcgagagaccgcaggcattggaacgtcagtcatcgtggtccaagccacagaccgagactctggggatggtggcctggtgaactaccgcatcctgtcgggcgcagaggggaagtttgagattgacgagagcacagggcttatcatcaccgtgaattacctggactacgagaccaagaccagctacatgatgaatgtgtcggccactgaccaggccccgcccttcaaccagggcttctgcagcgtctacatcactctgctcaacgagctggacgaggccgtgcagttctccaatgcctcatacgaggctgccatcctggagaatctggcactgggtactgagattgtgcgggtccaggcctactccatcgacaacctcaaccaaatcacgtaccgcttcaacgcctacaccagcacccaggccaaagccctcttcaagatagacgccatcacgggtgtgatcacagtccagggcctggtggaccgtgagaagggcgacttctataccttgacagtggtggcagatgacggcggccccaaggtggactccaccgtgaaggtctacatcactgtgctggacgagaatgacaacagcccccggtttgacttcacctccgactcggcggtcagcatacccgaggactgccctgtgggccagcgagtggctactgtcaaggcctgggaccctgatgctggcagcaatgggcaggtggtcttctccctggcctctggcaacatcgcgggggcctttgagatcgtcaccaccaatgactccattggcgaagtgtttgtggccaggcccctggacagagaagagctggatcactacatcctccaggttgtggcttctgaccgaggcacccctccacggaagaaggaccacatcctgcaggtgaccatcctggacatcaatgacaaccctccagtcatcgagagcccctttggatacaatgtcagtgtgaatgagaacgtgggtggaggtactgctgtggtccaggtgagagccactgaccgtgacatcgggatcaacagtgttctgtcctactacatcaccgagggcaacaaggacatggccttccgcatggaccgcatcagcggtgagatcgccacacggcctgccccgcctgaccgcgagcgccagagcttctaccacctggtggccactgtggaggacgagggcaccccaaccctgtcggccaccacgcacgtgtacgtgaccattgtggatgagaatgataacgcgcccatgttccagcagccccactatgaggtgctgctggatgagggcccagacacgctcaacaccagcctcatcaccatccaggcactggacctggatgagggtcccaacggcacagtcacctatgccatcgtcgcaggcaacatcgtcaacaccttccgcatcgacagacacatgggtgtcatcactgctgccaaagagctggactacgagatcagccacggccgctacaccctgatcgtcactgccacagaccagtgccccatcttatcccaccgcctcacctctaccaccacggtgcttgtgaatgtgaatgacatcaacgacaatgtgcctaccttcccccgggactatgagggaccatttgaagtcactgagggccagccggggcccagagtgtggaccttcctggcccatgaccgagactcaggacccaacgggcaggtggagtacagcatcatggatggagaccctctgggggagtttgtgatctctcctgtggagggggtgctaagggtccggaaggacgtggagctggaccgggagaccatcgccttctacaacctgaccatctgtgcccgtgaccgggggatgcccccactcagctccacaatgctggtggggatccgggtgctggacatcaacgacaacgaccctgtgctgctgaacctgcccatgaacatcaccatcagcgagaacagccctgtctccagctttgtcgcccatgtcctggccagtgacgctgacagtggctgcaatgcacgcctcaccttcaacatcactgcgggcaaccgcgagcgggccttcttcatcaatgccacgacagggatcgtcactgtgaaccggcccctggaccgcgagcggatcccagagtacaagctgaccatttctgtgaaggacaacccggagaatccacgcatagccaggagggattatgacttgcttctgatcttcctttctgatgagaatgacaaccaccccctcttcactaaaagcacctaccaggcagaggtgatggaaaactctcccgctggcacccctctcacggtgctcaatgggcccatcctggccctggatgcagaccaagacatctacgccgtggtgacctaccagctgctgggtgcccagagtggcctctttgacatcaacagcagcaccggtgtggtgaccgtgaggtcaggtgtcatcattgaccgggaggcattctcgccacccatcctggagctgctgctgctggctgaggacatcgggctgctcaacagcacggcccacctgctcatcaccatcctggatgacaatgacaaccggcccacctttagccctgccaccctcactgtccatctgctagagaactgcccgcctggattctcagtccttcaagtcacagccacagatgaggacagtggcctcaatggggagctggtctaccgaatagaagctggggctcaggaccgcttcctcattcatctggtcaccggggtcatccgtgttggtaatgccaccatcgacagagaggagcaggagtcctacaggctaacggtggtggccaccgaccggggcaccgttcctctctcgggcacagccattgtcaccattctgatcgatgacatcaatgactcccgccccgagttcctcaaccccatccagacagtgagcgtgctggagtcggctgagccaggcactgtcattgccaatatcacggccattgaccacgacctcaacccaaagctagagtaccacattgtcggcattgtggccaaggacgacactgatcgcctggtgcccaaccaggaggacgcctttgctgtgaatatcaacacaggatctgtaatggtgaagtcccccatgaatcgggagctggttgccacctatgaggtcactctctcagtgattgacaatgccagcgacctaccagagcgctctgtcagtgtgccaaatgccaagctgactgtcaacgtcctggacgtcaatgacaatacgccccagttcaagccctttgggatcacctactacatggagcggatcctggagggggccacccctgggaccacactcattgctgtggcagccgtggaccctgacaagggccttaatgggctggtcacctacaccctgctggacctggtgcccccagggtatgtccagctggaggactcctcggcagggaaggtcattgccaaccggacagtggactacgaggaggtgcactggctcaactttaccgtgagggcctcagacaacgggtccccgccccgggcagctgagatccctgtctacctggaaatcgtggacatcaatgacaacaaccccatctttgaccagccctcctaccaggaggctgtctttgaggatgtgcctgtgggcacaatcatcctgacagtcactgccactgatgctgactcaggcaactttgcactcattgagtacagccttggagatggagagagcaagtttgccatcaaccccaccacgggtgacatctatgtgctgtcttctctggaccgggagaagaaggaccactatatcctgactgccttggccaaagacaaccctggggatgtagccagcaaccgtcgcgaaaattcagtgcaggtggtgatccaagtgctggatgtcaatgactgccggccacagttctccaagccccagttcagcacaagcgtgtatgagaatgagccggcgggcacctcggtcatcaccatgatggccactgaccaggatgaaggtcccaatggagagttgacctactcacttgagggccctggcgtggaggccttccatgtggacatggactcgggcttggtgaccacacagcggccactgcagtcctacgagaagttcagtctgaccgtggtggccacagatggtggagagcccccactctggggcaccaccatgctcctggtggaggtcatcgacgtcaatgacaaccgccctgtctttgtgcgcccacccaacggcaccatcctccacatcagagaggagatcccgctgcgctccaacgtgtacgaggtctacgccacggacaaggatgagggcctcaacggggcggtgcgctacagcttcctgaagactgcgggcaaccgggactgggagttcttcatcatcgacccaatcagcggcctcatccagactgctcagcgcctggaccgcgagtcgcaggcggtgtacagcctcatcttggtggccagcgacctgggccagccagtgccatacgagactatgcagccgctgcaggtggccctggaggacatcgatgacaacgaaccccttttcgtgaggcctccaaaaggcagcccccagtaccagctgctgacagtgcctgagcactcaccacgcggcaccctcgtgggcaacgtgacaggcgcagtggatgcagatgagggccccaacgcgatcgtgtactacttcatcgcagccggcaacgaagagaagaacttccatctgcagcccgatgggtgtctgctggtgctgcgggacctggaccgggagcgagaagccatcttctccttcatcgtcaaggcctccagcaatcgcagctggacacctccccgtggaccctccccaaccctcgacctggttgctgacctcacactgcaggaggtgcgcgttgtgctagaggacatcaacgaccagccaccacgcttcaccaaggctgagtacactgcaggggtggccaccgacgccaaggtgggctcagagttgatccaggtgctggccctggatgcagacattggcaacaacagccttgtcttctacagcattctggccatccactacttccgggcccttgccaacgactctgaagatgtgggccaggtcttcaccatggggagcatggacggcattctgcgcaccttcgacctcttcatggcctacagccccggctacttcgtggtggacattgtggcccgagacctggcaggccacaacgacacggccatcatcggcatctacatcctgagggacgaccagcgcgtcaagatcgtcattaacgagatccccgaccgtgtgcgcggcttcgaggaggagttcatccacctgctctccaacatcactggggccattgtcaatactgacaatgtgcagttccatgtggacaagaagggccgggtgaactttgcgcagacagaactgcttatccacgtggtgaaccgcgataccaaccgcatcctggacgtggaccgggtgatccagatgatcgatgagaacaaggagcagctacggaatcttttccggaactacaacgtcctggacgtgcagcctgccatctctgtccggctgccggatgacatgtctgccctgcagatggcgatcatcgtcctggctatcctcctgttcctggccgccatgctctttgtcctcatgaactggtactacaggactgtacacaagaggaagctcaaggccattgtggctggctcagctgggaatcgtggcttcatcgacatcatggacatgcctaacaccaacaagtactcctttgatggagccaaccctgtgtggctggatcccttctgtcggaacctggagctggccgcccaggcggagcatgaggatgacctaccggagaacctgagtgagatcgccgacctgtggaacagccccacgcgcacccatggaacttttgggcgtgagccagcagctgtcaagcctgatgatgaccgatacctgcgggctgccatccaggagtatgacaacattgccaagctgggccagatcattcgtgaggggccaatcaagggctcgctgctgaaggtggtcctggaggattacctgcggctcaaaaagctctttgcacagcggatggtgcaaaaagcctcctcctgccactcctccatctctgagctgatacagactgagctggacgaggagccaggagaccacagcccagggcagggtagcctgcgcttccgccacaagccaccagtggagctcaaggggcccgatgggatccatgtggtgcacggcagcacgggcacgctgctggccaccgacctcaacagcctgcccgaggaagaccagaagggcctgggccgctcgctggagacgctgaccgctgccgaggccactgccttcgagcgcaacgcccgcacagaatccgccaaatccacacccctgcacaaacttcgcgacgtgatcatggagacccccctggagatcacagagctgtgactagacagggaagccttgtgggtgtgagcagcacccatccaccgtcccctcccagggagcaagggcagggacagggccggtcgggggggaccctccaaggccaggccttggggacaaccttggcttggccctggcagcccgcatcagctgctcagatcccacttttgccagacgctcattcagcatctgacctctaccttcataagatctgttatttttataagaaaaccaaacaaaaatgttaagcatctaaggacaaggtaaggagggtcactggggcccaagagtctggggaccagcttggctcaggctgagctgaaagaggccaaacaggccctcctccctcccagctccaccccgcaagcaccatcccctccggctaagcaggcgcaagggaggcccagcgcggacatcccctgctggccggacacccgactccagtccaagtctcgctacatttccgccacatccctctctgctggacgtccaggtggaggtggcatccccacgtggacaagaaagtcaatgtcaatgaacaagcattctctccatttcactggcttcccaaatgtgtgcccagcttataaacagaagtgactgatgttccctccggttttgaatgtggagtgtttgtgtgtgttccttttttaaattaagttattccctcaaaaaaaaaaaa

SEQ ID NO: 3402 - DNA, 3696 bp, Homo Sapiens
  NM_022132
acaggcctgagaatcagagaaaccttctctggggctgcaaggacctgagctcagcttccgccccagccagggaagcggcaggggaaagcaccggctccaggccagcgtgggccgctctctcgctcggtgcccgccgccatgtgggccgtcctgaggttagccctgcggccgtgtgcccgcgcctctcccgccgggccgcgcgcctatcacggggactcggtggcctcgctgggcacccagccggacttgggctctgccctctaccaggagaactacaagcagatgaaagcactagtaaatcagctccatgaacgagtggagcatataaaactaggaggtggtgagaaagcccgagcacttcacatatcaagaggaaaactattgcccagagaaagaattgacaatctcatagacccagggtctccatttctggaattatcccagtttgcaggttaccagttatatgacaatgaggaggtgccaggaggtggcattattacaggcattggaagagtatcaggagtagaatgcatgattattgccaatgatgccaccgtcaaaggaggtgcctactacccagtgactgtgaaaaaacaattacgggcccaagaaattgccatgcaaaacaggctcccctgcatctacttagttgattcgggaggagcatacttacctcgacaagcagatgtgtttccagatcgagaccactttggccgtacattctataatcaggcaattatgtcttctaaaaatattgcacagatcgcagtggtcatgggctcctgcaccgcaggaggagcctatgtgcctgccatggctgatgaaaacatcattgtacgcaagcagggtaccattttcttggcaggaccccccttggttaaagcggcaactggggaagaagtatctgctgaggatcttggaggtgctgatcttcattgcagaaagtctggagtaagtgaccactgggctttggatgatcatcatgcccttcacttaactaggaaggttgtgaggaatctaaattatcagaagaaattggatgtcaccattgaaccttctgaagagcctttatttcctgctgatgaattgtatggaatagttggtgctaaccttaagaggagctttgatgtccgagaggtcattgctagaatcgtggatggaagcagattcactgagttcaaagccttttatggagacacattagttacaggatttgctcgaatatttgggtacccagtaggtatcgttggaaacaacggagttctcttttctgaatctgcaaaaaagggtactcactttgtccagttatgctgccaaagaaatattcctctgctgttccttcaaaacattactggatttatggttggtagagagtatgaagctgaaggaattgccaaggatggtgccaagatggtggccgctgtggcctgtgcccaagtgcctaagataaccctcatcattgggggctcctatggagccggaaactatgggatgtgtggcagagcatatagcccaagatttctctacatttggccaaatgctcgtatctcagtgatgggaggagagcaggcagccaatgtgttggccacgataacaaaggaccaaagagcccgggaaggaaagcagttctccagtgctgatgaagcggctttaaaagagcccatcattaagaagtttgaagaggaaggaaacccttactattccagcgcaagggtatgggatgatgggatcattgatccagcagacaccagactggtcttgggtctcagttttagtgcagccctcaacgcaccaatagagaagactgacttcggtatcttcaggatgtaactggaataaaggatgttttctgttggacatgtactgaaaattaacacatgtagtagccttaaaattttagacttctcgaacatgaggctgttacagtaatttttttaacactgtgcattgtacttttctaccttaaaaaaatcagtgaggatatttatttaatgaacatcaattccttttaaattttcttagagaaatttctctgtggctcagttttaccacccataaagcggagacagtaatttacggttatcctttctgacccacaaagtatgaaaagttctgtaatctgtaaactcagttctgtaatctgtattattgagatgattaatataaagttgtattttcactgaaatgattgttttgctggttatgcttggtgatattttagcgggcttatttttgaaaggcatctgttacttcagtggcataaagtgccctcacactgctgtgcagccatcaccaccattcatctccagaatttgttctcagtcccaaactgaaactataccattcaaacaacagcgctccccatttccccctcccccgagcccatgacatctccttattattattttttttttgagacagggtgtttctctgttgcccaggctggagtgcggtggtgtgatctcggctcactgcagcttccacctcccgggttcaagcgattcttgtgcctcagcctcccaagcagctgggactataggcacgcaccaccacacccagctaagttctgtatttttagcagagacgggatttcactaggttgcccaggctggtctcaaactactgacctcaagtgatccacccgcctcggcctcccaaagtgctgggattacaggtgtgagccaccgcgcctgaccacatctccttattcttaaatgtatgtgtttctcatggtttgatttattcttgctgggccatttcagcccctgtcatggcttcactcgccatctaaatgcagatgattactgccttgacggttcttaacccagctctcccctgagctgcaggcctgcatatccagtaggtctactggacatctgtactggttgttgtggaggaacctctggcttgctcattaagtcctactgattttcactatcccctgaatttccccacttatttttgtctttcactatcgcaggccttagaagaggtctacctgcctccagtcttacctagtccagtctaccccctggagttagaatggccatcctgaagtgaaaagtaatgtcagattactcccttcagtgatttcttgtagaagtgccaatccctgaatgccaccaagatcttaatcttcacatctttaatcttatctctttgactcctctttacaccggagaacggctccagctgttctagctctctttcagttctttgaaccttcccaccttagggtctataaggttccctctgcccaaattgttctactctcccttcttcttcaacacatccttcagtttaagcacttgcttctctcagtttaaactccacttccttagggatgtctctgtgacctccctgtgctggattagcttccctactctatgctcttgtaaaacactatctacttcctttgtcataaactcatcattttcctataaacattaatattgtcctcctgctagaatgtaagctccgtgagagcaaggatcctcctgtttaccctgtacctccaatgtctggcacttgtaggtgctcaaatattcgttgaatgaatgaaaaatccatattgtaattgatgtcctctggccacatagttttaaaattaggtgattgattatatgaccgaatagaactatcaaatgttttcctaataaagtcaatatttcaaaaaaaaaaaaaaaaaaaaaaaaa

SEQ ID NO: 3403 - DNA, 3471 bp, Homo Sapiens
  NM_022133
gcccgggcagagactggctgaggcggggagcagctgcttttggggcgggggtgtcacgtgaggcttctcgctgctgagggaggaggcgaaaagctgcggttaaggagagtccggtttaaccgtcaccgggaagcgcgctcgttcgggatcgccgagggggctgagtactgtcaagatgataagcatggaataaagcttcagaagggtctttaccaatctttctcctaccaacttttacatacatgaaatcaggttaaaatgaactttacagaaatacttcacaagggaataaagtagaggaaaaagggataacatgtaacatggagtcaaggaaaaagagtgtgaagtagttttgctctctctatcttgcaaataggagtccttaaagacaactgggagaaggggtttgagatagtgaattcctaagaagaaaataatggattgcatattagttgttctctaagtggactcaacagtgtgcaagcttgttggaaaagccaaaagaagatggcaactccttatgtcccagttcctatgcccataggaaactctgcttccagttttacaacaaacagaaatcaaagaagttcttcttttggcagtgtctcaacaagctcaaattcttctaagggccagttagaagactcaaatatgggtaattttaaacagacaagtgttcctgatcaaatggataatacttcatctgtctgtagcagtcccctcattaggactaaatttacaggtacagcttcttccattgagtattctactagaccaagagacactgaagaacaaaatccggaaacagtgaattgggaagatagaccatctacacctactatactgggttatgaagtgatggaagaaagagctaaatttactgtatataaaatactagtaaagaaaaccccagaagaaagctgggtagttttcagaagatacactgacttctctaggcttaatgacaaattaaaagagatgtttccaggttttcgactagcacttcctccaaaacgctggtttaaagataattacaatgctgactttttagaagacagacaattaggattacaagcgtttcttcaaaatttagtagctcacaaggacattgctaactgccttgcagtgagagaatttctttgtttggatgatccaccgggtccatttgatagcctagaagaaagcagggcattctgtgaaactttagaagagacaaactaccgcttacagaaagaactacttgaaaaacaaaaggagatggaatcactaaagaaactgctcagtgagaagcaacttcatatagacactttagagaacagaatcagaacattgtctttagaacctgaagaatcactggatgtgtcagaaacagaaggtgaacagatcctaaaggtggagtcctctgcacttgaggttgatcaagatgtcctggatgaagaatctagagctgataataaaccatgcttaagttttagtgaacctgaaaatgctgtatcagagatagaagtagcagaagtggcatatgatgctgaagaagactaatgtatcacaagcagttccctccatttagactattcaaaaatttagaagagtggcaaatactattttaaaagaagaaccaagaactgtaaaacatatagaaaagagcaagaatgcacatgtataaagtttacataaagaagtttttttaagttattgagataggaaatatattcactgctgcttttaattgtattttatccaattacatttaatacactaaaaaaaatcttgttggaattctgttatcaaggcccacattcttaaatactgtgcataaattattatggtgttttgcctatatattgctccaaactactgtgtatatatgtatgtgtgttaaatcaccaattatattaatcaaatggaaattaattgcatgttactatctgggtgatatattcttctttatatctctgacatgacatattttcattaatagtttaaatcagtgaccatcataataaagataaaatttagttgagtttttaatgtttacatgtttacatctctaaataaaatttgcttatttgaaatgttaatgctctttagaaaaatgactttctagtaccaaaggaaaactacttgaaagagctgtaatcatatagctaaagtgataagatagccttgattttaaaagctgattcattaatatcaaaatactttaataagtgtcacagttattaatatgttacatttgtttagtttccacgtaatctttatctctacctagatttagtgagtttgcctctttcagaatactacctccttttgttaaggcatattctttcgaaaatatagattctaaataaataggggcttatacaaaaaagaaaataaaaagccatatatactgcaaagttcctaactggcttgactcctgacattgcatttttatttctatttgtgtgaagatgttgttatactgtattatggctgattttctttttaatatatttagccaagtgatgcactttatgataattaaactcttttgtgccaagtttaattggtggatttttttagtaagtagagttaggagaaagaattatgtagtgcctttactatttcactttctacaaaagtctcctagggtctttgagtcagctttatgaaaaaatgtttgtttatttcagctttgtgtacagtcattaaaagtgccttgtttcatttttataggatgaagttatttattttctattttcactgttttgcatattgctgttaataagcattgtaatcatgctggcattttgcaatcccagtcggtatgctttctaaaaactgagggaaacttactggggaaatagaataacaatctccatttttttctttactatctaaaagtttatcggtatcttgatgtatatatatattaaggtgtggctgtttaaaattctaatgacatatatcaacacattcaatggctgttgttaacctttgaagtaaaaaggagatcactttttaccaaataaccaaaaatttttagtctgtcaaagtgcacaggtatgttctcagaacatttttcacaatgtgtatcagaaatatgtttgctatccttagagacagaaatgaatataataaattgatctgcttatttattaaaattattattctagacttacaaaaggcttaaaaagaacaatcatttaatcagtaccattctgtatcttatataacagatctttgccaaattctagatattatagtgttgcctgtctgttctaaagcgaaccagccactttttcaatctggctttttggaagattgtatttaaagttcttcaaggatgaagaaaaaaatctgttaattaggtaaaccactattatttatatttataatttacttttttttacttttataatgcattttactcccagtattatgttcatttaataaattattttttcactacaaaaaaaaaaaaaaaaa

SEQ ID NO: 3404 - DNA, 1667 bp, Homo Sapiens
  NM_022135
cttctaggaaaggtggagtcggtagtgagaagccggaggtgagaagacccctgagcggatggattcattcattttctgaatttcctatgtgaggacagtattagagcccagtgaggctttgagaggccccaaagatgagcgccaacagcagcagagtgggccagcttctcttgcagggttcagcgtgcattaggtggaagcaggatgtggaaggggctgtctaccacctagccaactgcctcttactcctgggcttcatggggggcagtggggtgtatggatgcttctatctttttggcttcctgagtgcaggttacctgtgctgcgtgctgtggggctggttcagtgcctgtggcctggacattgttctttggagcttcctgctggctgtggtctgcctgctccagctggcacacctggtataccgcctgcgtgaggacaccctccctgaggagtttgacctcctctacaagacgctgtgcctgcccttgcaggtgcccctacagacatacaaggagattgttcactgctgcgaggagcaggtcttaactctggccactgaacagacctatgctgtggagggtgagacacccatcaaccgcctgtccctgctgctctctggccgggttcgtgtgagccaggatgggcagtttctgcactacatctttccataccagttcatggactctcctgagtgggaatcactacagccttctgaggagggggtgttccaggtcactctgactgctgagacctcatgtagctacatttcctggccccggaaaagtctccatcttcttctgaccaaagagcgatacatctcctgcctcttctcggctctgctgggatatgacatctcagagaagctctacactctcaatgacaagctctttgctaagtttgggctgcgctttgacatccgccttcccagcctctaccatgtcctgggtcccactgctgcagatgctggaccagagtccgagaagggtgatgaggaagtctgtgagccagctgtgtcccctcctcaggccacacccacctctctccagcaaacacccccttgttctacccctccagctaccaccaactttcctgcacctcctacccgggccaggttgtccaggccagacagtggcatactggcttctagaattcctctccagagctactctcaagttatatccaggggacaggcccctttggctccaacccacacgcctgaactttaaggatcattggactatcttctctgtggccagcgcagctctcttctgtgttcacagaatggccactgataggcatgcctcttttcccacccactggaaggctcacaggcaaggtgagagaggacacagaaggtgccaacactgtcgctacagtaaggacctgaagtgactttgagaaattcaccctcacaaaccttccttcaggagcaggcattggtagtgcagaggcacagattccgtcctttaccagctgcagaatcttgggcaagttacatagcctctgtgagcctcatcggtaaacagtgggggttatgaaacccacctcacagggttgttgtgaggatccaatgagttgatttaggtaagcacctagcacatgccgtggcaccaagtaagcactcaataaatcactcaactcttaaaaaaaaaaaaaaaaaaaaa

SEQ ID NO: 3405 - DNA, 1893 bp, Homo Sapiens
  NM_022136
attagacagcacactgctgactgttttcagttgtttctgtaacagcagaaagtgcactcactaggagtagtcagaattcaaaatgctcaagagaaagccatccaatgtttcagagaaggagaaacatcaaaaaccaaagcgaagcagcagttttgggaatttcgatcgttttcggaataattctttatcaaaaccagatgattcaactgaggcacatgaaggagatcccacaaatggaagtggagaacaaagtaaaacttcaaataatggaggcggtttgggtaaaaaaatgagagctatttcatggacaatgaagaaaaaagtgggtaaaaagtacatcaaagccctttctgaggaaaaggatgaggaagatggagagaatgcccacccatatagaaacagtgaccctgtgattgggacccacacagagaaggtgtccctcaaagccagtgactccatggatagtctctacagtggacagagctcatcaagtggcataacaagctgttcagatggtacaagtaaccgggacagctttcgactggatgacgatggcccctattcaggaccattctgtggccgtgccagagtgcatacggatttcacgccaagtccctatgacactgactccctcaaaatcaagaaaggagacatcatagacattatttgcaaaacaccaatggggatgtggacaggaatgttgaacaataaagtgggaaacttcaaattcatttatgtggatgtcatctcagaagaggaagcagcccccaagaaaataaaggcaaaccgaaggagtaacagcaaaaaatccaagactctgcaggagttcctagagaggattcatctgcaggaatacacctcaacacttttgctcaatggttatgagactctagaagatttaaaagatataaaagagagtcacctcattgaattaaatattgaaaacccagatgacagaagaaggttactatcagctgctgaaaacttccttgaagaagaaattattcaagagcaagaaaatgaacctgagcccctatccttgagctcagacatctccttaaataagtcacagttagatgactgcccaagggactctggttgctatatctcatcaggaaattcagataatggcaaagaggatctggagtctgaaaatctgtctgacatggtacataagattattatcacagagccaagtgactgaacacgcattcccaactatatatctacagatgcattccattttaactcttcttgagctaaaacgtcaaataggagaggaagataagataaatatttgtaaataaaacctaaagtttaaatgttttaatctgaataattgtacataaaattttgtatctctaacattccaaattactgtcaataaaatatatatttattattttaaatgctatgtgttaatatttcacttgcttgtattagaaaggcaaaatgtaagactttggtatgtgtgacatatgctttatttggctttattttacaagtacagtatctgcaaaaaacaaagtaaccttttttcatacctgccagttttgaatttatatatgttattgaacaaatagtaatagaggattcgctgttgaaacaagttgtccaagcaatgttatattcatttttatacttattgggaaagtgtgagttaatattggacacattttatcctgatccacagtggagttttagtaattatattttgttgatttcttcattttgttttctggtataaaagtagagataatgtgtagtcacttctgatttagtgaaaccaattgtaataattgtggaaatgttttgtctttaagtgtaaatattttaaaatttgacataccctaatgttaataataaaaagaactatttgcatattgcaaaaaa

SEQ ID NO: 3406 - DNA, 1781 bp, Homo Sapiens
  NM_022145
gcagaagtccggggctggcaagcgcttcctgcgcagcgcctaggcgacctggagtttgtgacgctgtgatggtctagaggctggagattcaagatctgggtgccatcattttctggttctgttgatgaccctcttccaggttacatacagcttacatcttgcatcctcaagcgtttttcttataaggctaaaaattcacaaagcatatatcaatgaatcaggaggatctagatccggatagtactacagatgtgggagatgttacaaatactgaagaagaacttattagagaatgtgaagaaatgtggaaagatatggaagaatgtcagaataaattatcacttattggaactgaaacactcaccgattcaaatgctcagctatcattgttaattatgcaagtaaaatgtttaaccgctgaactcagtcaatggcagaaaaaaacacctgaaacaattcccttgactgaagacgttctcataacattaggaaaagaagagttccaaaagctgagacaagatcttgaaatggtactgtccactaaggagtcaaagaatgaaaagttaaaggaagacttagaaagggaacaacggtggttggatgaacagcaacagataatggaatctcttaatgtactacacagtgaattgaaaaataaggttgaaacattttctgaatcaagaatctttaatgaactgaaaactaaaatgcttaatataaaagaatataaggagaaactcttgagtaccttgggcgagtttctagaagaccattttcctctgcctgatagaagtgttaaaaagaaaaagaaaaacattcaagaatcatctgtaaacctgataacactgcatgaaatgttagagattcttataaatagattatttgatgttccacatgatccatatgtcaaaattagtgattccttttggccaccttatgttgagctgctgctgcgtaatggaattgccttgagacatccagaagatccaacccgaataagattagaagctttccatcagtaaaaggatgttttcttttttcacacagtaaaaattcttatcattcaaggatattggaaccacaggactatttggataaaaaacattatttgcaaattaatgcgcataggccatcttacttttattgcaaaatggcatgtgctgccatctattattcatttttaaatggtcatttcttattcagtgagtgctttagtgttttaaactatatggataagaatgcaggtagataatattctaggcataaaacatttaatgtaccttacctcatgcaatattctttggattctttgttgatttatgatattgctaatataatattttcttaaaatatataacaatatcttttatgcattttgagttccagctggtgcttctttatatttagaaattataatgggaaggtcatttaatttacagatggttttaaaattgaggtaatatctgaggtggcataatttaaaaatatttagcaaatttgtttcatatatactgtcttatttctagatttgtttaaaattggaatatgaaaaactaatggataaagctagcataaaattgatattttagtttgtattattaatatatcatgttaccttatatattaatctactcttgattctgctaattattaccaacaaaattgtattcatgacattttattaatcctctgtgaattttctgtaaataaaattatttctgaaaatctctaaaaaaaaaaaaaaaaaaaaaaagaaaaaaaaaaaaaaaaaaaaaaaaaaa

SEQ ID NO: 3407 - DNA, 1700 bp, Homo Sapiens
  NM_022149
gcgggcgcggactgaggctgcgcgccgcaggttccggctgctggcggcgttgcggccgcaggtttgactcccgtgcggtgcggcccagcagccacaaagctcccgctgccattgctccttgtactcccgccgtcactgccgctgtccaacccctcccccggggcttgcgcggcggctcccacacccctcggcccgtgtacgcgctctgcacctgcctgcccgaaaacatgttgcagacaccagagagcagggggctcccggtcccgcaggccgagggggagaaggatggcggccatgatggtgagacccgggccccgaccgcctcgcaggagcgccccaaggaggagcttggcgccgggagggaggagggggctgcggagcccgccctcacccggaaaggcgcgagggccttggcggccaaagccttggcaaggcgcagggcctaccgccggctgaatcggacggtggcggagttggtgcagttcctcctggtgaaagacaagaagaagagtcccatcacacgctcggagatggtgaaatacgttattggagacttgaagattctgttcccggacatcatcgcaagggccgcagagcatctgcggtatgtctttggttttgagctgaaacagtttgaccgcaagcaccacacttacatcctgatcaacaaactaaaacctctggaggaggaggaggaggaggatctgggaggagatggccccagattgggtctgttaatgatgatcctgggccttatctatatgagaggtaatagcgccagggaggcccaggtctgggagatgctgcgtcggttgggggtgcaaccctcaaagtatcatttcctctttgggtatccgaagaggcttattatggaagattttgtgcagcagcgatatctcagttacaggcgggtgcctcacaccaatccaccagaatatgaattctcttggggtccccgaagcaacctggaaatcagcaagatggaagtcctggggttcgtggccaaactgcataagaaggaaccgcagcactggccagtgcagtaccgtgaggccctagcagacgaggccgacagggccagagccaaggccagagctgaagccagtatgagggccagggccagtgctagggccggcatccacctctggtgagggttggtgaaaagttggccagtgggtccccgtgaggacgaactactgtcctgagtcataagtaatatgggtggggcgagggtcttatttctgtagaaatcgtgtgactttaaggatttagattttgtatcttatgttttgtaacatttaataattactgttaaaatgctgtttgtaaatgagattggtctactttttcctgtaggattttattgtagagttttgctggttttgtaaaatggatggaagaactttgtatttatactgtgattttgaacagattatgcaacattggaaggaaggctgtactttgatggtttgaaggaactcagcagtatgatgatctggttccaggggaaaaaaatagctggttggtgtctagccccccaacacttttgtctgttgtgtataaaagaagaaagactggcatgtaccttcatttgcttagctatttgagtatctagagaaaaattaaaatgcaatgagttagcagtataccctggcacacttaataaattaaacatttgtggaaaaaaaaaaaaaaaaaaa

SEQ ID NO: 3408 - DNA, 2435 bp, Homo Sapiens
  NM_022151
gcccgccgcgcagcttccccgagcgagaccaaaacaggtggaatccgggctggagccggagctccggcggcgcgggtggcggcacgtccctccagacagtaccacaggcacctggagtaccggcatcggtcgctgtggcccccgagtgtccgtcagagcctaggggagcctgccctcccgcgcctcgtcggggcccggccaggcaccttggccgccggcgcacggacgcgggcacgagcactagatcacggctgctggacctcggcacgttgacaagatttctctggggtaccgcggaggattactttgaatttcggtggtcgcctgtggtctggcatatttagaacttaagtctattatttcgggcaccatgactttgaggcttttagaagactggtgcagggggatggacatgaaccctcggaaagcgctattgattgccggcatctcccagagctgcagtgtggcagaaatcgaggaggctctgcaggctggtttagctcccttgggggagtacagactgcttggaaggatgttcaggagggatgagaacaggaaagtagccttagtagggcttactgcggagactagtcacgccctggtccctaaggagataccgggaaaagggggtatctggagagtgatctttaagccccctgacccagataatacatttttaagcagattaaatgaatttttagcgggagagggcatgacagtgggtgagttgagcagagctcttggacatgaaaatggctccttagacccagagcagggcatgatcccggaaatgtgggcccctatgttggcacaggcattagaggctcttcagcctgccctgcaatgcttgaagtataaaaagctgagagtgttctcgggcagggagtctccagaaccaggagaagaagaatttggacgctggatgtttcatactactcagatgataaaggcgtggcaggtgccagatgtagagaagagaaggcgattgctagagagccttcgaggcccagcacttgatgttattcgtgtcctcaagataaacaatcctttaattactgtcgatgaatgtctgcaggctcttgaggaggtatttggggttacagataatcctagggagttgcaggtcaaatatctaaccacttaccagaaggatgaggaaaagttgtcggcttatgtactaaggctggagcctttgttacagaagctggtacagagaggagcaattgagagagatgctgtgaatcaggcccgcctagaccaagtcattgctggggcagtccacaaaacaattcgcagagagcttaatctgccagaggatggcccagcccctggtttcttgcagttattggtactaataaaggattatgaggcagctgaggaggaggaggcccttctccaggcaatattggaaggtaatttcacctgagtctcagggaaccacgaagggatatggcaatgagtagagcatgaaggtagaacagtctatatactcttgtgacacatacaatccctaccttgtgctgccaagtaactcatttttgtgcaattctcagtataagccctttgtcgtttctgtgcctatttaaagtctcctaaaggtgtaattgactaggaaggatgtagttctacactgccatttacctatttaaattcatccttgtgaatatctttgttgttgttgttgagacagagtctcgctctgtcacccaggctggagtgcagtggcgtgatcttggctcactgcatcctccgccttccaggtttaagctattctcctgcctcagttgcccgagtagctgggactacaggcatgtgccaccacgcccagctaagttttgcattatcagtagagacggggtttcaccatgttggccaggctagtttcgaactcctgacctcaagtgatccacctgcttcggcctctgaaagtgctgggattacaggcgtgagacactgcgcccagcctcatccctgtgaatttcttattgtacacaagttctttcactatctgtgtgcagtgctctgaggggacagacaaggcttgggtgtatatgccaaccagatctcattgaagtatcagcttgtttggtactaggtgcaagtgtagcatgtcacatgtgaccatgttggatcattgacaatttttaggtatgtactgacctacatttatgatgaagatcctgagcggaggttaagatattaagttattttccatatgaatcagaattatattgattctgtgcaatcaaaacaaaaggcagaatagaatgctgagattggttaagtttgcaatgaccatcttgaaccacagatttctgctatgtgtcatcaaaacatctagttctgagtaacattttcacgattgttataaaattataggtgtgaacttctaaaataaaggaatgctaataaaatgaaaaaaaaaaaaaaaaaaa

SEQ ID NO: 3409 - DNA, 2375 bp, Homo Sapiens
  NM_022152
gggcgcggagccccagccgagcctagccctgcccggccccggaggacttgcaacactccgaggccaggaacgctccgtctggaacggcgcaggtcccagcagctggggttccccctcagcccgtgagcagccatgtccaaccccagcgccccaccaccatatgaagaccgcaaccccctgtacccaggccctccgccccctgggggctatgggcagccatctgtcctgccaggagggtatcctgcctaccctggctacccgcagcctggctacggtcaccctgctggctacccacagcccatgccccccacccacccgatgcccatgaactacggcccaggccatggctatgatggggaggagagagcggtgagtgatagcttcgggcctggagagtgggatgaccggaaagtgcgacacacttttatccgaaaggtttactccatcatctccgtgcagctgctcatcactgtggccatcattgctatcttcacctttgtggaacctgtcagcgcctttgtgaggagaaatgtggctgtctactacgtgtcctatgctgtcttcgttgtcacctacctgatccttgcctgctgccagggacccagacgccgtttcccatggaacatcattctgctgaccctttttacttttgccatgggcttcatgacgggcaccatttccagtatgtaccaaaccaaagccgtcatcattgcaatgatcatcactgcggtggtatccatttcagtcaccatcttctgctttcagaccaaggtggacttcacctcgtgcacaggcctcttctgtgtcctgggaattgtgctcctggtgactgggattgtcactagcattgtgctctacttccaatacgtttactggctccacatgctctatgctgctctgggggccatttgtttcaccctgttcctggcttacgacacacagctggtcctggggaaccggaagcacaccatcagccccgaggactacatcactggcgccctgcagatttacacagacatcatctacatcttcacctttgtgctgcagctgatgggggatcgcaattaaggagcaagcccccattttcacccgatcctgggctctcccttccaagctagagggctgggccctatgactgtggtctgggctttaggcccctttccttccccttgagtaacatgcccagtttcctttctgtcctggagacaggtggcctctctggctatggatgtgtgggtacttggtggggacggaggagctagggactaactgttgctcttggtgggcttggcagggactaggctgaagatgtgtcttctccccgccacctactgtatgacaccacattcttcctaacagctggggttgtgaggaatatgaaaagagcctattcgatagctagaagggaatatgaaaggtagaagtgacttcaaggtcacgaggttcccctcccacctctgtcacaggcttcttgactacgtagttggagctatttcttcccccagcaaagccagagagctttgtccccggcctcctggacacataggccattatcctgtattcctttggcttggcatcttttagctcaggaaggtagaagagatctgtgcccatgggtctccttgcttcaatcccttcttgtttcagtgacatatgtattgtttatctgggttagggatgggggacagataatagaacgagcaaagtaacctatacaggccagcatggaacagcatctcccctgggcttgctcctggcttgtgacgctataagacagagcaggccacatgtggccatctgctccccattcttgaaagctgctggggcctccttgcaggcttctggatctctggtcagagtgaactcttgcttcctgtattcaggcagctcagagcagaaagtaaggggcagagtcatacgtgtggccaggaagtagccagggtgaagagagactcggtgcgggcagggagaatgcctgggggtccctcacctggctagggagataccgaagcctactgtggtactgaagacttctgggttctttccttctgctaacccagggagggtcctaagaggaaggtgacttctctctgtttgtcttaagttgcactgggggatttctgacttgaggcccatctctccagccagccactgccttctttgtaatattaagtgccttgagctggaatggggaagggggacaagggtcagtctgtcgggtgggggcagaaatcaaatcagcccaaggatatagttaggattaattacttaatagagaaatcctaactatatcacacaaagggatacaactataaatgtaataaagtttatgtctagaagttaaaacccaaaaaaaaaaaaaaaaaaaaaaaaaa

SEQ ID NO: 3410 - DNA, 4774 bp, Homo Sapiens
  NM_022153
gggggcgggtgcctggagcacggcgctggggccgcccgcagcgctcactcgctcgcactcagtcgcgggaggcttccccgcgccggccgcgtcccgcccgctccccggcaccagaagttcctctgcgcgtccgacggcgacatgggcgtccccacggccctggaggccggcagctggcgctggggatccctgctcttcgctctcttcctggctgcgtccctaggtccggtggcagccttcaaggtcgccacgccgtattccctgtatgtctgtcccgaggggcagaacgtcaccctcacctgcaggctcttgggccctgtggacaaagggcacgatgtgaccttctacaagacgtggtaccgcagctcgaggggcgaggtgcagacctgctcagagcgccggcccatccgcaacctcacgttccaggaccttcacctgcaccatggaggccaccaggctgccaacaccagccacgacctggctcagcgccacgggctggagtcggcctccgaccaccatggcaacttctccatcaccatgcgcaacctgaccctgctggatagcggcctctactgctgcctggtggtggagatcaggcaccaccactcggagcacagggtccatggtgccatggagctgcaggtgcagacaggcaaagatgcaccatccaactgtgtggtgtacccatcctcctcccaggatagtgaaaacatcacggctgcagccctggctacgggtgcctgcatcgtaggaatcctctgcctccccctcatcctgctcctggtctacaagcaaaggcaggcagcctccaaccgccgtgcccaggagctggtgcggatggacagcaacattcaagggattgaaaaccccggctttgaagcctcaccacctgcccaggggatacccgaggccaaagtcaggcaccccctgtcctatgtggcccagcggcagccttctgagtctgggcggcatctgctttcggagcccagcacccccctgtctcctccaggccccggagacgtcttcttcccatccctggaccctgtccctgactctccaaactttgaggtcatctagcccagctgggggacagtgggctgttgtggctgggtctggggcaggtgcatttgagccagggctggctctgtgagtggcctccttggcctcggccctggttccctccctcctgctctgggctcagatactgtgacatcccagaagcccagcccctcaacccctctggatgctacatggggatgctggacggctcagcccctgttccaaggattttggggtgctgagattctcccctagagacctgaaattcaccagctacagatgccaaatgacttacatcttaagaagtctcagaacgtccagcccttcagcagctctcgttctgagacatgagccttgggatgtggcagcatcagtgggacaagatggacactgggccaccctcccaggcaccagacacagggcacggtggagagacttctcccccgtggccgccttggctcccccgttttgcccgaggctgctcttctgtcagacttcctctttgtaccacagtggctctggggccaggcctgcctgcccactggccatcgccaccttccccagctgcctcctaccagcagtttctctgaagatctgtcaacaggttaagtcaatctggggcttccactgcctgcattccagtccccagagcttggtggtcccgaaacgggaagtacatattggggcatggtggcctccgtgagcaaatggtgtcttgggcaatctgaggccaggacagatgttgccccacccactggagatggtgctgagggaggtgggtggggccttctgggaaggtgagtggagaggggcacctgccccccgccctccccatcccctactcccactgctcagcgcgggccattgcaagggtgccacacaatgtcttgtccaccctgggacacttctgagtatgaagcgggatgctattaaaaactacatggggaaacaggtgcaaaccctggagatggattgtaagagccagtttaaatctgcactctgctgctcctcccccacccccaccttccactccatacaatctgggcctggtggagtcttcgcttcagagccattcggccaggtgcgggtgatgttcccatctcctgcttgtgggcatgccctggctttgtttttatacacataggcaaggtgagtcctctgtggaattgtgattgaaggattttaaagcaggggaggagagtagggggcatctctgtacactctgggggtaaaacagggaaggcagtgcctgagcatggggacaggtgaggtggggctgggcagaccccctgtagcgtttagcaggatgggggccccaggtactgtggagagcatagtccagcctgggcatttgtctcctagcagcctacactggctctgctgagctgggcctgggtgctgaaagccaggatttggggctaggcgggaagatgttcgcccaattgcttggggggttggggggatggaaaaggggagcacctctaggctgcctggcagcagtgagccctgggcctgtggctacagccagggaaccccacctggacacatggccctgcttctaagccccccagttaggcccaaaggaatggtccactgagggcctcctgctctgcctgggctgggccaggggctttgaggagagggtaaacataggcccggagatggggctgacacctcgagtggccagaatatgcccaaaccccggcttctcccttgtccctaggcagaggggggtcccttcttttgttccctctggtcaccacaatgcttgatgccagctgccataggaagagggtgctggctggccatggtggcacacacctgtcctcccagcactttgcagggctgaggtggaaggaccgcttaagcccaggtgttcaaggctgctgtgagctgtgttcgagccactacactccagcctggggacggagcaaaactttgcctcaaaacaaattttaaaaagaaagaaagaaggaaagagggtatgtttttcacaattcatgggggcctgcatggcaggagtggggacaggacacctgctgttcctggagtcgaaggacaagcccacagcccagattccggttctcccaactcaggaagagcatgccctgccctctggggaggctggcctggccccagccctcagctgctgaccttgaggcagagacaacttctaagaatttggctgccagaccccaggcctggctgctgctgtgtggagagggaggcggcccgcagcagaacagccaccgcacttcctcctcagcttcctctggtgcggccctgccctctcttctctggacccttttacaactgaacgcatctgggcttcgtggtttcctgttttcagcgaaatttactctgagctcccagttccatcttcatccatggccacaggccctgcctacaacgcactagggacgtccctccctgctgctgctggggaggggcaggctgctggagccgccctctgagttgcccgggatggtagtgcctctgatgccagccctggtggctgtgggctggggtgcatgggagagctgggtgcgagaacatggcgcctccagggggcgggaggagcactaggggctggggcaggaggctcctggagcgctggattcgtggcacagtctgaggccctgagagggaaatccatgcttttaagaactaattcattgttaggagatcaatcaggaattaggggccatcttacctatctcctgacattcacagtttaatagagacttcctgcctttattccctcccagggagaggctgaaggaatggaattgaaagcaccatttggagggttttgctgacacagcggggactgctcagcactccctaaaaacacaccatggaggccactggtgactgctggtgggcaggctggccctgcctgggggagtccgtggcgatgggcgctggggtggaggtgcaggagccccaggacctgcttttcaaaagacttctgcctgaccagagctcccactacatgcagtggcccagggcagaggggctgatacatggcctttttcagggggtgctcctcgcggggtggacttgggagtgtgcagtgggacagggggctgcaggggtcctgccaccaccgagcaccaacttggcccctggggtcctgcctcatgaatgaggccttccccagggctggcctgactgtgctgggggctgggttaacgttttctcagggaaccacaatgcacgaaagaggaactggggttgctaaccaggatgctgggaacaaaggcctcttgaagcccagccacagcccagctgagcatgaggcccagcccatagacggcacaggccacctggcccattccctgggcattccctgctttgcattgctgcttctcttcaccccatggaggctatgtcaccctaactatcctggaatgtgttgagagggattctgaatgatcaatatagcttggtgagacagtgccgagatagatagccatgtctgccttgggcacgggagagggaagtggcagcatgcatgctgtttcttggccttttctgttagaatacttggtgctttccaacacactttcacatgtgttgtaacttgtttgatccacccccttccctgaaaatcctgggaggttttattgctgccatttaacacagagggcaatagaggttctgaaaggtctgtgtcttgtcaaaacaagtaaacggtggaactacgactaaa

SEQ ID NO: 3411 - DNA, 3309 bp, Homo Sapiens
  NM_022154
ggcggagagaataaagcagaaagacaggaagaggaggtggagttctacagttagtgtggttttagtttttcctaagaagtggcgtggtttggggctttatatccgggaggagcatatgtacgcaaatcctggggcgtttgcaaacccggatccggggcgtctggccccatgcccggccgggcgtttgagggctactgccacgcagcgtttctggagcctgccggctggtgccctggtggcctttatctctgtccccctttgtcctctttatctcaggctctccaggaggccggggggcccactccgcctatcgctcccctcggctacgctgccacttcaatgccccgcaggtcgcgagctgctgttctttcgaaggcgtcggagaaccaggggcgtcccgcgccacctctgactcggagcagcgccgagcactgacgctcccgcccttgggcaaggacgccagtgcgcccgcgcgcgtccctctgcgcggcagcccgtcgcgggccctcaaggggaagcccaggccaggatggccccgggtcgcgcggtggccgggctcctgttgctggcggccgccggcctcggaggagtggcggaggggccagggctagccttcagcgaggatgtgctgagcgtgttcggcgcgaatctgagcctgtcggcggcgcagctccagcacttgctggagcagatgggagccgcctcccgcgtgggcgtcccggagcctggccagctgcacttcaaccagtgtttaactgctgaagagatcttttcccttcatggcttttcaaatgctacccaaataaccagctccaaattctctgtcatctgtccagcagtcttacagcaattgaactttcacccatgtgaggatcggcccaagcacaaaacaagaccaagtcattcagaagtttggggatatggattcctgtcagtgacgattattaatctggcatctctcctcggattgattttgactccactgataaagaaatcttatttcccaaagattttgaccttttttgtggggctggctattgggactcttttttcaaatgcaattttccaacttattccagaggcatttggatttgatcccaaagtcgacagttatgttgagaaggcagttgctgtgtttggtggattttacctacttttcttttttgaaagaatgctaaagatgttattaaagacatatggtcagaatggtcatacccactttggaaatgataactttggtcctcaagaaaaaactcatcaacctaaagcattacctgccatcaatggtgtgacatgctatgcaaatcctgctgtcacagaagctaatggacatatccattttgataatgtcagtgtggtatctctacaggatggaaaaaaagagccaagttcatgtacctgtttgaaggggcccaaactgtcagaaatagggacgattgcctggatgataacgctctgcgatgccctccacaatttcatcgatggcctggcgattggggcttcctgcaccttgtctctccttcagggactcagtacttccatagcaatcctatgtgaggagtttccccacgagttaggagactttgtgatcctactcaatgcagggatgagcactcgacaagccttgctattcaacttcctttctgcatgttcctgctatgttgggctagcttttggcattttggtgggcaacaatttcgctccaaatattatatttgcacttgctggaggcatgttcctctatatttctctggcagatatgtttccagagatgaatgatatgctgagagaaaaggtaactggaagaaaaaccgatttcaccttcttcatgattcagaatgctggaatgttaactggattcacagccattctactcattaccttgtatgcaggagaaatcgaattggagtaatagaaaatggaagatggtgttgttaataaaggcatttaatagataaaaacatctccaaaaaggattttgaagctgatcctatttagttaaaaagataattttgctttcaactgtaggtccagaaaactaattattggcatcagtctgtgaaatagtccattatttgttgttaaaaatgcttcaaaaggttttcagtgtcagtctgagatgcctggtatataggagcctttgggaaatacctatttttcagtattccatgcatattagatatcaccatgaagcaagagacatgcattctataatcatgtagacactcagactcaggggaaaatacaagttatatcctgaaagcctttaaaactctatggtaggatcaaagattcaaatggtttcagagaggttttatttcaattaatttgttctagtgctttcaagagcaagtacatcaaaatgtagaaggtaaaatgtatgcaacactaatataaattattccaagtctttaaggagccaaagaaaaaaaagatttctcacagctttttgttctgttttgtatttcaattaggaacttgcagtattattttgaaaaccattctaaaataataggagttaggaaataaataaagttttgctagccctgctaagttcaggcttagaggcttatcgctaagtataaacttcaccagattccacgaaaagctggatagctttttttctgacttatgttgtggttgcacccctcacaaatggcagaacagtatgtaaagctggtaacacctcggtttcagtgcaccatgtgtttgctttgtgaaggtgaagaatatgttggtttagagaaagaaattggatgtaattttatgcaatttacttttaaagacaaacataactatttagcagagaatattttaataaatgcaaaacaacagctggactgctgtacatcaaggacagattaactggaaaacatatgttccttatgtgtgatcgagagccattcagaaaagacttcctttgtgttcagcctatacttttccatatggtataccttgaaaaaaattagcacaccatggttatttttctaccttttataaaagacagagcctgtttactcatttagaagatagagaaaattggtctaaaattgaacatcctagattcacactcccaagtcacttaaggtgatttgatggtgaggaaaatgattgacaaagcccaacaatgatctcaggaattacattttccaacagaccaaaaaatgttttcatgtagcagcaatgcagatttggtgaatatttaatatatattttagtatgtatttcactttatgactgacaattaaaaaatattgtttggccaaatagtaaacacccttttgaaaccatgaaaaaaaaaaaaaaaaa

SEQ ID NO: 3412 - DNA, 1885 bp, Homo Sapiens
  NM_022156
ggtggcggcgcggagccttgggcccggctgcggcccggcggcggccccggcgcggtgcgggcgttcgcggcgccccgggagctgcaggggccccgggcggcggcgaggccggagaggggcgggcccgggacaccggcacccggcgccctcggagccaaaggcgcgcggcggacacggcggggccctcgcgcgcctggagacgatgccaaagctgcagggcttcgagttctggagccgcaccctgcgaggggcccgccacgtcgtggcccccatggtggaccagagcgagctggcctggaggctgctgagccggcgccacggggcacagctctgctacacgcccatgctgcatgcccaggtctttgtccgcgacgccaactaccggaaggagaacctgtactgcgaggtgtgccccgaggaccggcccctcatcgtgcagttctgtgccaatgacccggaggtgtttgttcaggcggctctcctggctcaggattactgtgacgccattgacctgaacttgggctgcccacagatgatagccaagagaggtcactatggcgcctttctgcaggacgagtgggacctgctccaaagaatgattttgctggcccacgagaaactctctgttcctgtcacgtgcaaaatccgtgtcttcccggagattgacaagaccgtgaggtacgcccagatgctggagaaggccggctgccagttgctgacggtgcacggacgcaccaaggagcagaaggggcccctgtcgggtgcagcgtcctgggagcatatcaaggctgtgcggaaggctgtggccatccctgtgtttgctaacgggaacatccagtgcctgcaggacgtggagcgctgcctccgggacacgggtgtgcagggcgtcatgagcgcagagggcaacctgcacaaccccgccctgttcgagggccggagccctgccgtgtgggagctggccgaggagtatctggacatcgtgcgggagcacccctgccccctgtcctacgtccgggcccacctcttcaagctgtggcaccacacgctgcaggtgcaccaggagctgcgagaggagctggccaaggtgaagaccctggagggcatcgctgctgtgagccaggagctgaagctgcggtgtcaggaggagatatccaggcaggagggagcgaagcccaccggcgacttgcccttccactggatctgccagccctacatccggccggggcccagggaggggagcaaggagaaggcaggtgcgcgcagcaagcgggccctggaggaagaggagggtggcacggaggtcctgtccaagaacaagcaaaagaagcagctgaggaacccccacaagaccttcgacccctctctgaagccaaaatatgcaaagtgtgaccagtgtggaaacccaaagggcaacagatgtgtgttcagcctgtgccgcggctgctgcaagaagcgagcctccaaagagactgcagactgcccaggtcacggattgctttttaaaaccaaattggagaagtctctggcctggaaagaggcccagcctgagctgcaggagcctcagccagcagcacctggaacaccaggtggcttctccgaagtcatgggcagtgccctggcctgaaggcccacaacccccacccccaggactgctgctggagcctggacacgtcctacttaagaaaatgccttttactcagggaatctcctgctacttaatgtggaaagacacgcccatgtcccccttcggcccactctgggggcctggaaatgctgcagtggggagcaggccccaggctggacctgccctgtcctcagcacgcgtgtgcaaaagtgaacaataaatcatttcaaagatgcgagaaaaaaaaaaaaaaaaaaaaaa

SEQ ID NO: 3413 - DNA, 1020 bp, Homo Sapiens
  NM_022163
gcggtgcattgtgggagaacgaaagatggcggcgcccgtaaggcggacgctgttaggggtggcggggggttggcggcggttcgagaggctctgggccggcagtctaagctctcgcagcctggctcttgcagccgcaccctcaagcaacggatccccatggcgcttgttgggcgcgttgtgcctgcagcggccacctgtagtctccaagccgttgaccccattgcaggaagagatggcgtctctactgcagcagattgagatagagagaagcctgtattcagaccacgagcttcgtgctctggatgaaaaccagcgactggcaaagaagaaagctgaccttcatgatgaagaagatgaacaggatatattgctggcgcaagatttggaagatatgtgggagcagaaatttctacagttcaaacttggagctcgcataacagaagctgatgaaaagaatgaccgaacatccctgaacaggaagctagacaggaaccttgtcctgttagtcagagagaagtttggagaccaggatgtttggatactgccccaggcagagtggcagcctggggagacccttcgaggaacagctgaacgaaccctggccacactctcagaaaacaacatggaagccaagttcctaggaaatgcaccctgtgggcactacacattcaagttcccccaggcaatgcggacagagagtaacctcggagccaaggtgttcttcttcaaagcactgctattaactggagacttttcccaggctgggaataagggccatcatgtgtgggtcactaaggatgagctgggtgactatttgaaaccaaaatacctggcccaagttaggaggtttgtttcagacctctgatgggccgagctgcctgtggacggtgctcagacaagtctgggattagagcctcaaggacattgtgtgattgcctcacatttgcaggtaatatcaagcagcaaactaaattctgagaaataaacgagtctattactgaaaaaaaaaaaaaaaaaaaa

SEQ ID NO: 3414 - DNA, 3567 bp, Homo Sapiens
  NM_022167
cccgcctccctaggcgtggaggagggggggcggctcagccccgcgcccgtgcgcgcgctcgcggccgggttgcagggctgggcgcgcgccccgcgtcccgggcaggaagatggtggcgagcgcgcgagtgcagaagctggtgcggcgctacaagctggcgattgccacggcgctggccatcctgctgctgcagggcctggtagtgtggagcttcagcggcctggaggaggacgaggcgggcgagaaaggaaggcagaggaagccacggccactggaccctggcgagggttccaaggacacagacagttcagcagggcgacggggcagcacaggcagaaggcatgggcgctggcggggccgtgctgagagcccaggagtgcccgtggccaaggtggtacgggcagtaaccagccggcagagagccagccggcgggtcccacctgccccacccccggaagccccaggccgccagaacctgagtggggcagcagctggggaggcgctggtaggggcagctggcttcccaccacacggagatacagggagcgtggagggcgccccccagcccacggacaatggcttcacccccaagtgcgagatcgtgggcaaggacgcactgtctgcactggcccgggccagcaccaagcagtgccagcaggagatcgccaatgtggtgtgcctgcaccaggctgggagcctcatgcccaaggctgtgccccggcactgtcagctgactgggaagatgagccccggcatccagtgggatgagagccaagcccagcagcccatggatggccccccggtgcgaatcgcctacatgctggtggttcacggccgcgccatccgccagctgaagcgtctcctcaaggccgtttatcacgagcagcacttcttttacatccatgtggacaagcgttccgactacctgcaccgggaggtggtggagctggcccagggctatgataacgtgcgggtgacgccctggcgcatggttaccatctggggcggggccagcctcctgaggatgtacctgcggagcatgcgggacctgctagaggtgcctggctgggcctgggacttcttcatcaacctcagtgccactgactatccaaccaggaccaatgaggagctggtggcattcctatccaagaaccgggacaagaatttcctcaagtcacatggccgggacaactccaggttcatcaagaaacagggcctggaccggctcttccatgagtgcgactcacacatgtggcgcctgggcgagcggcagatcccagcaggcattgtggtggatggcggttctgactggttcgtgctgacacgcagctttgtggagtatgtggtgtacacagatgacccgcttgtggcccagctgcgccagttctacacatacacactgctcccagccgagtccttcttccacacggtgctggagaacagcctggcctgtgagaccctcgtggacaacaacctgcgggtcaccaactggaaccgcaagctgggctgcaagtgccagtacaagcacattgtggactggtgtggctgctcccccaacgacttcaagccacaggacttcctccggctgcagcaagtctccagacccaccttcttcgcccggaagttcgagtcgactgtgaaccaggaggtgctggaaatcctggacttccacctgtatggcagctacccccccggcacgccagccctcaaggcctactgggagaacacctacgacgcggctgatggccccagtgggctcagtgatgtcatgctcactgcttacacagccttcgcccgcctcagcctgcaccatgccgccactgctgcacccccaatgggcaccccactctgcaggtttgagcccaggggcttgccgtccagcgtgcacctgtatttctatgacgaccatttccagggctacctggtgacgcaggcggtgcagccctcagcccaggggccggcagagacgcttgagatgtggctgatgccccaagggtcgctgaagctgttggggcgcagtgaccaggccagccggctccagagtctggaggttggcactgattgggaccccaaagagcgtcttttccggaactttggggggttactggggccgctggacgagcctgtggccgtgcagcgctgggcccggggccccaacctcacagccacagtggtctggatcgacccaacctatgtggtggccacatcttatgacatcacagtagatacggagactgaggtcacgcaatacaagcccccactgagccggcccctgcggccagggccctggactgttcgactccttcagttctgggaaccgctgggtgagacccgcttccttgtgctgcccttgaccttcaaccgcaaactacctctcaggaaagatgatgccagctggctgcacgcagggccaccccacaacgagtacatggagcagagtttccagggcctgagtagcatcctgaacctgcctcagccggagctcgcggaggaggctgcccagcggcacacacagctcacaggccctgcgctcgaggcctggacagacagggaactgagcagcttctggtccgtggctggactgtgtgccataggcccctctccctgcccctccctggagccctgcagactgaccagctggagctctctgtcccccgaccccaaatcagagctggggcctgtcaaagcagacgggcgactcaggtagcagggccccagccagtacccgtggaggacccgggaaattgcaccttacagacagtggaggggtgtcccctcccacaggcaagaaccagaggcccaggctgcacacccatttcagccatcaagaacccacacagacggcagggaaggtggacacagtatgaactactgctgatgtctctgttggggatcagagggctggcgggaacgcgagaagggcaccagcagcattccacacccagctcttcctcaccttcctgtctagtttgaatttcttttttttctttttttttttttttttttaatttaaaaaggaaaatgggtggttgggagagaaactagaacagaagatgtgcaatagggctcagagcagccccaggaagtgggccatgtctgtggggagcaggggcttgctgagcccacctgctattgttctgcacgaggctgggcctgcctcactctccagggcctcatgccccattctgggcctgtggtgctcgtggctgaggctccacagggctgcaagtgccctgccaggctctaaggcccgaagaacaggtgatatcgggggcgctgcagagctgggctctagcaggacagttcttttgtagccaggggaccctagaagtggggtggggcggctccagggctttccagcataccctgcccctggatgggaaaggcagggtcagggcccactgagacccatgcagagtttccaggtgtgcactggaagtgaggtcacatgagcagcgtgggaagaagactctgtcaagactctcagaagaacctggagtaattgtgcctgaagctcagcgtgaagtctgaaatatgcaacagaagaaatatatctctatctctcta

SEQ ID NO: 3415 - DNA, 3434 bp, Homo Sapiens
  NM_022168
gccccgctgcccacctgcccgcctgcccacctgcccaggtgcgagtgcagccccgcgcgccggcctgagagccctgtggacaacctcgtcattgtcaggcacagagcggtagaccctgcttctctaagtgggcagcggacagcggcacgcacatttcacctgtcccgcagacaacagcaccatctgcttgggagaaccctctcccttctctgagaaagaaagatgtcgaatgggtattccacagacgagaatttccgctatctcatctcgtgcttcagggccagggtgaaaatgtacatccaggtggagcctgtgctggactacctgacctttctgcctgcagaggtgaaggagcagattcagaggacagtcgccacctccgggaacatgcaggcagttgaactgctgctgagcaccttggagaagggagtctggcaccttggttggactcgggaattcgtggaggccctccggagaaccggcagccctctggccgcccgctacatgaaccctgagctcacggacttgccctctccatcgtttgagaacgctcatgatgaatatctccaactgctgaacctccttcagcccactctggtggacaagcttctagttagagacgtcttggataagtgcatggaggaggaactgttgacaattgaagacagaaaccggattgctgctgcagaaaacaatggaaatgaatcaggtgtaagagagctactaaaaaggattgtgcagaaagaaaactggttctctgcatttctgaatgttcttcgtcaaacaggaaacaatgaacttgtccaagagttaacaggctctgattgctcagaaagcaatgcagagattgagaatttatcacaagttgatggtcctcaagtggaagagcaacttctttcaaccacagttcagccaaatctggagaaggaggtctggggcatggagaataactcatcagaatcatcttttgcagattcttctgtagtttcagaatcagacacaagtttggcagaaggaagtgtcagctgcttagatgaaagtcttggacataacagcaacatgggcagtgattcaggcaccatgggaagtgattcagatgaagagaatgtggcagcaagagcatccccggagccagaactccagctcaggccttaccaaatggaagttgcccagccagccttggaagggaagaatatcatcatctgcctccctacagggagtggaaaaaccagagtggctgtttacattgccaaggatcacttagacaagaagaaaaaagcatctgagcctggaaaagttatagttcttgtcaataaggtactgctagttgaacagctcttccgcaaggagttccaaccatttttgaagaaatggtatcgtgttattggattaagtggtgatacccaactgaaaatatcatttccagaagttgtcaagtcctgtgatattattatcagtacagctcaaatccttgaaaactccctcttaaacttggaaaatggagaagatgctggtgttcaattgtcagacttttccctcattatcattgatgaatgtcatcacaccaacaaagaagcagtgtataataacatcatgaggcattatttgatgcagaagttgaaaaacaatagactcaagaaagaaaacaaaccagtgattccccttcctcagatactgggactaacagcttcacctggtgttggaggggccacgaagcaagccaaagctgaagaacacattttaaaactatgtgccaatcttgatgcatttactattaaaactgttaaagaaaaccttgatcaactgaaaaaccaaatacaggagccatgcaagaagtttgccattgcagatgcaaccagagaagatccatttaaagagaaacttctagaaataatgacaaggattcaaacttattgtcaaatgagtccaatgtcagattttggaactcaaccctatgaacaatgggccattcaaatggaaaaaaaagctgcaaaagaaggaaatcgcaaagaacgtgtttgtgcagaacatttgaggaagtacaatgaggccctacaaattaatgacacaattcgaatgatagatgcgtatactcatcttgaaactttctataatgaagagaaagataagaagtttgcagtcatagaagatgatagtgatgagggtggtgatgatgagtattgtgatggtgatgaagatgaggatgatttaaagaaacctttgaaactggatgaaacagatagatttctcatgactttattttttgaaaacaataaaatgttgaaaaggctggctgaaaacccagaatatgaaaatgaaaagctgaccaaattaagaaataccataatggagcaatatactaggactgaggaatcagcacgaggaataatctttacaaaaacacgacagagtgcatatgcgctttcccagtggattactgaaaatgaaaaatttgctgaagtaggagtcaaagcccaccatctgattggagctggacacagcagtgagttcaaacccatgacacagaatgaacaaaaagaagtcattagtaaatttcgcactggaaaaataaatctgcttatcgctaccacagtggcagaagaaggtctggatattaaagaatgtaacattgttatccgttatggtctcgtcaccaatgaaatagccatggtccaggcccgtggtcgagccagagctgatgagagcacctacgtcctggttgctcacagtggttcaggagttatcgaacatgagacagttaatgatttccgagagaagatgatgtataaagctatacattgtgttcaaaatatgaaaccagaggagtatgctcataagattttggaattacagatgcaaagtataatggaaaagaaaatgaaaaccaagagaaatattgccaagcattacaagaataacccatcactaataactttcctttgcaaaaactgcagtgtgctagcctgttctggggaagatatccatgtaattgagaaaatgcatcacgtcaatatgaccccagaattcaaggaactttacattgtaagagaaaacaaagcactgcaaaagaagtgtgccgactatcaaataaatggtgaaatcatctgcaaatgtggccaggcttggggaacaatgatggtgcacaaaggcttagatttgccttgtctcaaaataaggaattttgtagtggttttcaaaaataattcaacaaagaaacaatacaaaaagtgggtagaattacctatcacatttcccaatcttgactattcagaatgctgtttatttagtgatgaggattagcacttgattgaagattcttttaaaatactatcagttaaacatttaatatgattatgattaatgtattcattatgctacagaactgacataagaatcaataaaatgattgttttactctgcaaaaaaaaaaaaaa

SEQ ID NO: 3416 - DNA, 4226 bp, Homo Sapiens
  NM_022336
ggggcagacggccggagagccaggtgtgccagggacctatggcagcagggctgaacgtgcccgctccagcctctccagtgctgggagagacctctagatggtgcaggtgagtttgcaatgagggaaagcccctcggcaaggactgagtttccaaacttgcagacagggcagggagcggtcaaggaagagttcccgggaagccctttaaacggaaaggaagcggggctagtgtcagagaggtgtgccaggtcccaggcagccctgctggcccctaaggacatagagtacctgcttctgagagggctgccacggtggccacctgtgaagcctgtcacccagaactggatggtacctgactttcttcatagacccatcttctgctgggactgaagctgacctccaacagaagccaggtgagcccttgggagaggatggcccatgtgggggactgcacgcagacgccctggctccccgtcctggtggtgtctctgatgtgctcagcccgagcggaatactcaaactgcggtgagaacgagtactacaaccagactacggggctgtgccaggagtgccccccgtgtgggccgggagaggagccctacctgtcctgtggctacggcaccaaagacgaggactacggctgcgtcccctgcccggcggagaagttttccaaaggaggctaccagatatgcaggcgtcacaaagactgtgagggcttcttccgggccaccgtgctgacaccaggggacatggagaatgacgctgagtgtggcccttgcctccctggctactacatgctggagaacagaccgaggaacatctatggcatggtctgctactcctgcctcctggcaccccccaacaccaaggaatgtgtgggagccacttcaggagcttctgccaacttccctggcacctcgggcagcagcaccctgtctcccttccagcacgcccacaaagaactctcaggccaaggacacctggccactgccctgatcattgcaatgtccaccatcttcatcatggccatcgccatcgtcctcatcatcatgttctacatcctgaagacaaagccctctgccccagcctgttgcaccagccacccggggaagagcgtggaggcccaagtgagcaaggacgaggagaagaaagaggccccagacaacgtggtgatgttctccgagaaggatgaatttgagaagctgacagcaactccagcaaagcccaccaagagcgagaacgatgcctcatccgagaatgagcagctgctgagccggagcgtcgacagtgatgaggagcccgcccctgacaagcagggctccccggagctgtgcctgctgtcgctggttcacctggccagggagaagtctgccaccagcaacaagtcagccgggattcaaagccggaggaaaaagatcctcgatgtgtatgccaacgtgtgtggagtcgtggaaggtcttagccccacggagctgccatttgattgcctcgagaagactagccgaatgctcagctccacgtacaactctgagaaggctgttgtgaaaacgtggcgccacctcgccgagagcttcggcctgaagagggatgagattgggggcatgacagacggcatgcaactctttgaccgcatcagcacggcaggctacagcatccctgagctactcacaaaactggtgcagattgagcggctggatgctgtggagtccttgtgtgcagacatactggagtgggcgggggttgtgccacctgcctcccagccacatgctgcatcctgaaaagcatgcctgtgggctgtcctcccaggacaagccaaggagccaacgagggctctggagctgtgagtggtgccaaaagactgccaagaatcaaggcttttgtgatatgtcaccgtatgccttaggatgttcaaggagccagacgaaataaggcctgtcttccaatttaaccaaagataaaggactagagccgggatactttcagatgctcgcctgtacctcaccaggcagagtaaatatctactcactcatacagccagcccaccagcccaccattaactcactgaacaatgagacaatgttgaggactcaaatgaatcaaaccccgtgggaatgacagaagtgaagaatctggtccctgtctttaaggagtttgcactccagtagaagacagaaggaacgtatgtttacaaaccacttcactggaagacgtcaaacaagctgaatgaaggggcgcttagaaaacgttaatagaagttctaagcgggagatgactccctactgggatgatgaaggatggcatcctagtgaagaagcagctcaaacattttgataaaatggcaacaaaatgcagacaccctgctccaggtattatttcaggtttagtacaagtctgttaataccctatgtggtttcattaggataactttttacctatccttgaggtcatccatattcttacaggccttccagtcaataatggaagagctcactctatacaaaaccaatatgcaaggcatgtgtttgtccaagcaattggatgtgtgcagtagccaatttcatttactgcattactctttggcctgggaaccctgtggtctgcactacatgtgaatggccttccacttcagtcttaggcagatttgaccttttaggggcagcaatgctgaaggacacagcaatttaaattataatgtgtcaggctgtgttttcacttcaaacatgtatgagtagtcagctgtaattagagaaatgatgacttcctaagagttcagccacgcataattctagatttcaagagcatctaagacttgtggattagcctcatggcatgagagtttcagactcagccttctgagccagtcagggaaagtggagttctgcagcgcaaatgagagcctgggcttgatgtcgagggagctggcttctagttgtgccaccttgggccttgtcttttcctctctctgcctcagtttctcgtctgccaatgagatgttagttagtgattctataattggggcaggtagggttcaggtgagcaaaaagaaagtggagctataggaaatgccaggcctttgaggtgctctatggaagtcaacacagtgtggtttgtccatttaaatgggaataaaaacagaaaaactcagacttggcattttcacaataactgcaatggtttgacataacatttataggcagaaagttaataaactggcattgttcttggcatattattgtactatccctgtaactgccaagagctcaggagccaggctagtgatcacaccaggggttagagttcactgctgaactccctgatggcaggtctgtgtttattactacattaaaacaaagtctctgacttataaagcgaggttgtaaaaattacaagttgcatgactgaaaaaatgctttagggggaaaatcagtcatatctttaacaccaacaagcaatttcccaccaacgaatgtagtacatactgtgagaggatcataatgaggtcctgaatatttaatatcatcatttactgtgtctgtttgctgctgtttttcgaacctatttggtttaccctgcaagctaaatactccacggcagagcttaattatccttttaattcctctttgaaatcctgtggtgcccccttccccctgccttgtgatgatgatgagtgagtctccccttaattagactgcaaatgtcacttgtgatgagtgtgccattccaggataacagcttgcaccctcctcagaatgttttcagcgaaagagtggggtggctgttctctgctcctggtgctttggcctcatttcacactattagaattctggggctgtaaggccagccagtgtcagctcatgttccattggctctccacctgccatttttagggagctattccttatatagttacaaattcccttgtcatttacttatttggaaacatgggatttactctgacaagctttagcctatgttatgggattcagaacaatgagatcataataattctcactgaccaaagctgggactccatcctgccatttttgtgtggagatattcataattctgcaatactttaaaacatttagaaaacaccccagggtaggtctgtggcccttagacagtgaagtcttaattgtcaatattatttttgtctaattctgtatatatataacttattatattttataatctcaataaacacattaataagaaaaaaaaaaaaa

SEQ ID NO: 3417 - DNA, 6678 bp, Homo Sapiens
  NM_022340
gagttccgagcgaccgatggagatggcggctgcggctgagtgacggacggtggaggcccagagcccgggcctgaagggggggacaaacctgggtgcccgcaggagcccggcagggtactgtgctaaaccctggggagacggcgaagtggaaaacatatagagtctgtgccctcccagattttacagtcttacttggtcacttcacgtatgtacctgcggttataaattgagatgagtgctgtgaaggagaagtccattctgatgctctgagtgtcttacaagtatcaagaacttactatatgtggttgaataaacaatcaaggtaaagagcatcaagtaaaaacttctgcttgttgataagtacttcagacattcccccagtggctgaagtggcatatgaattatgaagttggatcatttggaatgaatgtaagagaattgccaagggctcctcctactccagagaggaaacctcatccagggccatgaagccacttcctcaccatctgtgtgctgcttaagctaatgctgcgggaaccatggttccttgggaggaatcaagctgactcttggcatgagattcctgccttcctagggttgagagcggcactgccatggcttctctggacgacccaggggaagtgagggagggcttcctctgccctctgtgcctgaaggatctgcagtctttctatcagcttcactcacattacgaggaagaacactcaggggaagaccgtgatgtcaaagggcaaattaaaagtcttgtccagaaggctaaaaaagcaaaggacaggttgttgaaacgagaaggggatgatcgagcagagtcagggacccaaggatatgagtctttcagctatggaggggttgatccttacatgtgggaaccccaggagcttggtgctgtgagaagccatctttccgacttcaaaaaacaccgagctgctagaattgaccactatgttgtggaagtcaataaactaataatcaggttagagaagctcactgcatttgacagaacaaatactgagtctgcaaagattcgagcaatagaaaagtctgtggtgccttgggtcaacgaccaggatgtccctttctgtccagactgtgggaataagttcagcatccggaaccgccgccaccactgccgcctctgcgggtctattatgtgcaagaagtgtatggagctcatcagccttcccttggcaaacaagctcaccagtgccagcaaggagtccctgagcacccacaccagccccagccagtcacccaacagtgtccatggctcccgccgaggcagcatcagcagcatgagcagtgtcagctcggtcctggatgagaaggacgatgaccggatccgctgctgtacacactgcaaggacacgctgctcaagagagagcagcagattgatgagaaggagcacacacctgacatcgtgaagctctacgagaaattacgactttgcatggagaaagttgaccagaaagctccagaatacatcaggatggcagcatcattaaatgctggggagacaacctacagtctggaacatgccagtgaccttcgagtggaagtgcagaaagtgtatgagctgatagacgctttaagtaagaagatcttaaccttgggcttgaaccaggaccctccaccacatccaagcaatttgcggctgcagagaatgatcagatactcagctacactttttgtgcaggaaaagttgcttggtttgatgtcactgccaaccaaagaacagtttgaggaactgaaaaagaaaaggaaggaggaaatggagaggaagagggccgtggagagacaagctgccctggagtcccagcgaaggcttgaggaaaggcagagtggcctggcttctcgagcggccaacggggaggtggcatctctccgcaggggccctgcccccttgagaaaggctgagggctggctcccactgtcaggaggtcaggggcagagtgaggactcagacccgctcctccagcagatccacaacatcacatcattcatcaggcaggccaaggccgcgggccgcatggatgaagtgcgcactctgcaggagaacctgcggcagctgcaggacgagtatgaccagcagcagacagagaaggccatcgagctgtcccggaggcaggctgaggaggaggacctgcagcgggaacagctgcagatgttgcgtgaacgggagttggaacgagaaagggagcagtttcgggtggcatccctgcacacacggactcggtccctggacttcagagaaatcggcccttttcagctggagcccagcagagagcctcgcacccaccttgcttatgctttggatctaggctcttccccagttccaagcagcacagctcccaagaccccttcacttagctcaactcaacccaccagagtgtggtctgggcccccagccgttggccaggagcgcttaccccagagcagcatgccacagcaacatgaggggccctccttaaacccctttgatgaggaagacctctccagccccatggaagaggccactactggtcctcctgctgcaggggtttccttagacccttcagcccgcatcctgaaagagtacaatcctttcgaggaagaggacgaggaggaggaagcagtggcagggaatccattcattcagccagacagcccagctcctaaccccttcagtgaggaagacgaacatccccagcagaggctctcaagccctctggttcctggtaacccctttgaggaacccacctgtatcaacccctttgagatggacagtgacagtgggccagaggctgaggagcccatagaggaagagctcctcctgcagcagatcgataacatcaaggcatacatctttgatgccaagcagtgcggccgcctggatgaggtagaggtgctgacagagaatctgcgggagctgaagcacaccctggccaagcagaaggggggcactgactgaccagcagtggagagggcacctttgggcccaggggtctggcaggagccagtggagcaggacagagggcaggcaggatggatggggaaggtggcagggtgagaactcagatgcacacaggtgaggggcaggaatctgctgttttgtgttgcgcactttgaggtatttccactacagttgaataataaaatagaaactagaacagggagaatcagcattcagttgctgcttttcctgtttattattactatcttttgtaatcggaggtttaccccttttgaagggactttacatttttactaccgagatataactaaatgcagctctgttgggcccagggcagaaatggctgctgtgtacctcttgggtccatttgctactgcctagtcttggttccttatgcagtattatagggcagcctttttagagcccttcctttagccaagacagagaagatagattccactgagctctattctgctctgacagaagtccatccctagtaggctgtgagttccatttcacctggggccgcctctcccctgctctgcacttcctgtctgtacaatagaagggggaggtgctgctatgaaggggagagtttagacccaggagagcccagcacctctttttaaggtggggtgatgggaatatttcaccagggtctattttctcagtttaagttcttttttgtctctttcaggaagttaagctcccagtgcagggtatcaatgtgaatctggtcctgagctttttagaaaataagagtggtggccgggcgcgctggctcacgcctgtaatcgcaacactttgggaggccgaggcaggcagatcacaaggtcaggagatcgagaccaccctggctaacacagtgaaatcccgtctctactaaaaatacaaaaaattagccaggcgtggtggtgggtgcctgtagtcccagctactttggaggctgaggcaggagaatgctgtgaacccgggaggcagagcttgcagtgagccgagatcgcaccactgcactccagcctgggcagtgagagtgagactccgtctcaaaaaaaaataagagtggttaactttttggttgatattagtattatttgtgagaagagtttccccacccttcttctgatagaacaattgtctgtcactggagaaatctccctccagagctttggcaaagttactctgatctgggtctgtttaaaaggccgggtctctaatttaggaatcggtgatttggaagcttttgcagaacatcaccagaagaagggaagcttcccagagtcagaagctaaattaaaataatttccaaggctatttgatcagccttcttcctttttggttcattgtgtcctgacttggggcactgatgagattttttattttttttgagacagagtttcactttgttgcccaggctggagtgtagtggcatgatctcagctcactgcaacctccacctccctggttcaagtgatatttgtgcctcagccccctgaatagctaggattacaggcgtgggccaccacgcctggttaatctctgtatttttagtagaggtagagtttcaccattttggccaggctggtttcgaactcctggcctcaagtgatctgccaccttggcctcccaaagtgctgggaatacaggcgtgagccactgtgcccgccctgatgagatattttattaccaatgttagtattgagaaactgaaatgtttgaagaagcacaacccaggatcgtgctggtagcaccacagtacttaaactgttggtcaattaaggccagaaagggaaattgttaatttagctctggtgctttggtttacaggaacataactcttaactgacatctgacatcatgatagccatatgtgctcagctctgggtagagtttctgcagttactcatctgaactaatgaacaataactgaccactagtcactttatgccgtgtaactagctctaggccatactttcactggttactggtgtgaaagctgaaattcattttgttacattctggtgaagacccctcttgataatgggaatgttttaactctcttgatgaaaaaataatctgtatttgtgttgatgttcacatttctgtagcacatttcttatccttttggttgaatgaaaagatcttgtataggggtgtggagatggggagtgggtagaagtgtgtgaaggacgctttgcatttgggatctgttcacaaacagccatatgagtgtgttaatgaatgtcagccagttaccaaccctgctggttgttatgggttgttttgagaagttggcaaccaggcatctaagatgttgcctggtacaggcctcttttcttccctgaggcccatgacatttctctgttactctagagggtttctcagatggccagtaggctcctccctgcttagggtctcatttctctgaaaagaggatgaactgaaaagcaggtagttccagaagctaattgctgctttccatcataattatttttcttgtgagaacatttctcttttaattagctagtgattttgattaagactaattcactaaacatacccttccctcaaatcacctcaggtagcaatctgtaagtaactaaaagcattgaaaaacacacaagaaacatttttaaaaactatttttaaaggcctggccgggtgcagtggctcactcctgtaatcccagcactttgggaggccgagacgggtggatcacctgaggtcaggaatttgagactagcatggccaacatggtgaaaccccgtgtctactaaaaatacaaaaattagctgggcgtggtggcagacgcctgtaatcccagctactcagggaggctgaggcacgagaatcgcttgaacctgggaggcggaggttgcagtgagccaagattgcgccactgcactccaacctgggtgacaagagcaagactccgtctcacaaaaaacaaacaaaactgactgattgaatatactaaaccaaactaaaatcatattcttttgattaagtttatccatggctgtattcttctatgaattcttccatttaattcttccacgattatcttctcctgtaaatacatcacaggagttagaattctctacccatcagctgtaccatgtcgcagaattcatgcaggcacaaagttggagttacagagatgggttgacagcaggcaaacttggcctatgtattataaccacaacttcaagttcttacctcatgtgaatattcaccctttctttagtcttccaaggcaaacagccccgtctcatcaccagatgagcaaggtcttgatatggcatagcagatctccctagacacagatcatgagaaaagatggaagagacttagggattcaggcatcagatgaagttggcttttcccttttatgccttgtttgtatttaccctgtctaatacactaaggatacttactcattgtacttgcagctcaatatgtctttgctgttcagatactaaaatgtacctctgagtcattgtgagctgtgtggtaggttggacattggcatagttggtgatgggactcaaaatgaaaaggtggtctctttaccaggtcacagactgtagcagattgtgcttgttatctgacaatgactgtcactttgagggtcgttgatttgcatgcactactctggggccttgtattggagccttttttaaaaaaaataaaatctgagatagag

SEQ ID NO: 3418 - DNA, 1900 bp, Homo Sapiens
  NM_022343
agccgcggggagcgaggagcgcgcggagccggccatgggcaagtcagcttccaaacagtttcataatgaggtcctgaaggcccacaatgagtaccggcagaagcacggcgtccccccactgaagctctgcaagaacctcaaccgggaggctcaacagtattctgaggccctggccagcacgaggatcctcaagcacagcccggagtccagccgtggccagtgtggggagaaccttgcatgggcatcctatgatcagacaggaaaggaggtggctgatagatggtacagtgaaatcaagaactataacttccagcagcctggcttcacctcggggactggacacttcacggccatggtatggaagaacaccaagaagatgggcgtggggaaggcgtccgcaagtgacgggtcctcctttgtggtggccagatacttcccagcggggaatgttgtcaatgagggcttcttcgaagaaaacgtcctgccgccgaagaagtaacttgttaaatgtaatgggaaggtggcagacttaagaacgtggatatgaagtgcctagaaccaccacaacctggctgtgcgtctgtccctgtgggtgtatgtgcttgtgtgtgtgatgcatgtgagcgtctctggcacacacacttggacatacagttctgtgtgcgctcattcttattacaggagtgagcaaaggaagcatttaccccgatggttacctagaccacgattatttggattggggggaggggggatccgttttttttttttaattttttgttatttctaagcaaacctcttttgtacttttcttacttctaatatccatccctggactttttgtattccaaatgtttgtgatgctgagaagtgaagttcattttatgtgatcttcatgcgtcgtaatctacttttggtagataattaagattattaaaccctcatttaaatgtgacataaaatacagctttaagcacataaatataaagcagcttccatcaggaacatggagcaggcagggactccattttacagaattactgagatttctcagttgtaaaacatgatgtcatcctgcatgcctcctggaattctccaatggggtcgccaaacaacaaatggagaaaaaaagttttacttccttgcattcttctacctttaaatagcaaagtaccactaccaccaccacctcttgcccccttccctcttttcttaaacttctggcatttcagagctcagcaggctacccctggtttctggagagttgggctaggcctgaagctccccctcccccacctctgctaggcagcccaggcctggtctgggagacagcccctcaccctgcctgggctcttggccaagcggccttggatggatgaagtcagagaggtggggtgagggtgagcttactcagggcccccagaggaagccctcagcctctgccctccccccacacagggcgggagcccaggcctgttcctggcagctgtggctgcagctgtgctcctgctccctcctggaatgtgcgacaagcccaaatgttccagggaggcggccggggcagggggcttagaagtgctaatatggttctgtgttttgcctgaaacgataccaggttcccctgaatagcaactttacaaggtccatgtgggagggaccaacccagatgccctgctgagtgtccctgaaaccatggcagctccatctgtcaagatggcaggggccggagtgagggggctgctggcttaacagcaggcatctgggcaggccagtcctcaaagcagctcctgaaggtctgtgttgcactgtcaccagtctcaagctatgcctctaatttcaccagggatattgactaagaagacaataaaatctttttctttgtgtaaaaaaaaaaaaaaaaaaa

SEQ ID NO: 3419 - DNA, 1631 bp, Homo Sapiens
  NM_022344
ggagacacagggccgctcagaggccgccgcaatgctcccctctttgcaggagtcgatggatggagatgaaaaggaactagagagcagcgaagagggaggctcagccgaggagcggagactcgagccgccgtccagcagccactactgtctttacagctatcgcggaagcagattggcacagcaacgaggggacagtgaggacggaagcccaagtggcacaaatgcagaaactccctctggtgatgatttcagcctctccttggcagatactaatctaccatccgaagtggagccagagctgcgcagtttcattgctaagcgtctttcaagaggtgcagtctttgaagggctgggtaatgttgcatctgtggagctaaaaattccaggttaccgagttggttgttattactgccttttccaaaatgaaaaactgcttcctgaaacagtaacgatagactctgaacgtaacccttcagaatatgtggtctgttttttaggagggtctgaaaaaggacttgagcttttcaggcttgaattggacaagtacattcaagggctgaaaaataacatgaattgtgaggcaaggggcctggagagtcacataaaatcctatctgagcagctggtttgaggatgttgtatgcccaatccaaagggttgttcttctctttcaggaaaagcttacctttctgctacatgctgctttgagttacactcctgttgaagttaaagaatcagatgaaaaaacaaagagagacattaacaggtttctgagtgtggccagtcttcaaggacttattcatgaaggcaccatgacttctttgtgcatggccatgacagaggagcagcataagtctgtggtcatcgattgcagcagctcccagcctcagttctgcaatgcaggaagtaaccggttttgtgaggattggatgcaagcttttttaaatggtgccaaaggaggtaacccttttcttttccgacaagtactggagaactttaaactaaaggccatacaagacacaaacaatttgaagagatttatccgacaggcagaaatgaatcattatgctttgtttaaatgttacatgttcctaaagaactgtggtagtggagatatacttttgaagattgttaaagtggaacatgaagaaatgcctgaagccaaaaatgtgatagctgtccttgaagaattcatgaaagaagctcttgaccaaagtttttgatcatatgttttgagataattgtatgatcaagttgtatatttaagtcttagtgtttgaaattgcagttataattgttcataggattgctatttaagatgatttgaaactcaatccagattttctttttgtattttaccaatttaacttaaataaaaatctgaagaacatcttcactgagtcctagatagataatgtatgtgagagttgtgaaattttagtgtctcactggccccataaattccacgcttcaggaagttgttgcttaaaaaatttcagagatgattttgtttgtggcttttctcaggaaaagcctgagtttgctgcagtatttagcaacttttcttctcagaaaaaccataatacttccttttcagtggactgtagcttcttaaaaaaaaaaaaaaaaaaa

SEQ ID NO: 3420 - DNA, 4682 bp, Homo Sapiens
  NM_022346
cttacggcagtctcgcgggatttccccctctcgcgggaattatttgaacgttcgagcggtaaatactccctggggctgtcatagaagactactcggagagcgctgcctctgggttggcgggctggcaggctgtagccgagcgcgggcaggactcgtcccggcagggttccagagccatgggagcggaaaggaggctgctgtcgattaaggaggcctttcggctggcgcagcagccgcaccagaaccaggcgaagctggtggtggcgctgagccgcacctaccgcacgatggatgataagacagtttttcatgaggagttcattcattaccttaaatatgttatggtggtctataaacgtgaaccagctgtggagagggtaatagaatttgcagcaaagtttgttacctcatttcaccaatcagatatggaagatgatgaggaagaggaagatggtggccttttaaattatttgtttacttttctcttaaagtctcatgaagcaaacagcaatgcagtgagatttagagtgtgcctgctcataaacaagcttttgggaagtatgccagaaaatgctcagattgatgatgatgtgtttgataaaattaataaagccatgcttattagattgaaagataagattccaaatgtgagaatacaggcagttctggcgctttcacgacttcaggatcccaaggatgatgaatgcccagtggttaatgcatatgctactttgattgaaaatgattcaaatccagaagttagacgggcagtgttatcatgtattgcaccatcagcaaagactttgccaaaaattgtagggcgcaccaaggatgtgaaagaggctgtcagaaagctggcttatcaggttttagctgaaaaggttcatatgagagctatgtccattgctcagagagtaatgctccttcaacaaggtcttaatgacagatcagatgctgtgaaacaagctatgcagaagcatcttcttcaaggctggttacggttctctgaaggaaatatcttagagttgctccatcggttggatgtagaaaattcttctgaagtggcagtctctgttctcaatgccttgttttcaataactcctctcagtgaactggtgggactctgtaaaaacaatgatggcaggaaattgattccagtggaaacattaactcctgaaattgctttgtattggtgtgccctttgtgaatatttgaaatcaaaaggagatgaaggtgaagaatttttagagcagattttgccagagcctgtagtatatgcagactatttattgagttacatccagagcattccagttgttaatgaagaacacagaggtgatttttcctatattggaaatttgatgacaaaagaattcataggtcaacaattgattctaattattaagtctttggataccagtgaagaaggaggaagaaaaaaactgctggctgttttacaggagattcttattttacccacaatcccaatatccctggtttcttttcttgttgaaagactactccacatcattatagatgataataagagaacacaaattgttacagaaattatctcagagattcgggcgcccattgttactgttggtgttaataacgatccagctgatgtaagaaagaaagaactcaagatggctgaaataaaagttaagcttatcgaagccaaagaagctttggaaaattgcattaccttacaggattttaatcgggcatcagaattaaaagaagaaataaaagcattagaagatgccagaataaaccttttgaaagagacagagcaacttgaaattaaagaagtccacatagagaagaatgatgctgaaacattgcagaaatgtcttattttatgctatgaactgttgaagcagatgtccatttcaacaggcttaagtgcaaccatgaatggaatcatcgaatctttgattcttcctggaataataagtattcatcctgttgtaagaaacctggctgttttatgcttgggatgctgtggactacagaatcaggattttgcaaggaaacacttcgtattactattgcaggttttgcaaattgatgatgtcacaataaaaataagtgctttaaaggcaatctttgaccaactgatgacgttcgggattgaaccatttaaaactaaaaaaatcaaaacacttcattgtgaaggtacagaaataaacagtgatgatgagcaagaatcaaaagaagttgaagagactgctacagctaagaatgttctgaaactcctttctgatttcttagatagtgaggtatctgaacttaggactggagctgcagaaggactagccaagctgatgttctctgggcttttggtcagcagcaggattctttctcgtcttattttgttatggtacaatcctgtgactgaagaggatgttcaacttcgacattgcctaggcgtgttcttccccgtgtttgcttatgcaagcaggactaatcaggaatgctttgaagaagcttttcttccaaccctgcaaacactggccaatgcccctgcatcttctcctttagctgaaattgatatcacaaatgttgctgagttacttgtagatttgacaagaccaagtggattaaatcctcaggccaagacttcccaagattatcaggccttaacagtacatgacaatttggctatgaaaatttgcaatgagatcttaacaagtccgtgctcgccagaaattcgagtctatacaaaagccttgagttctttagaactcagtagccatcttgcaaaagatcttctggttctattgaatgagattctggagcaagtaaaagataggacatgtctgagagctttggagaaaatcaagattcagttagaaaaaggaaataaagaatttggtgaccaagctgaagcagcacaggatgccaccttgactacaactactttccaaaatgaagatgaaaagaataaagaagtatatatgactccactcaggggtgtaaaagcaacccaagcatcaaagtctactcagctaaagactaacagaggacagagaaaagtgacagtttcagctaggacgaacaggaggtgtcagactgctgaagccgactctgaaagtgatcatgaagttccagaaccagaatcagaaatgaagatgagactaccaagacgagccaaaaccgcagcactagaaaaaagtaaacttaaccttgcccaatttctcaatgaagatctaagttaggaaagacgatggaggtggaatcctttaagattatgtccagttatttgctttaataaagaagaagttacccttgtcaaaatcagaacaaacctgatgtctttctgaagattttctgctgtgcgcttccacgttactttggcctgtattaaagcagtagagcagcatcagttattatagtccagaaaaagtgtgcatcagtcagtcacacagatttatcacaatctgaggtgggcctaggaatctcatttttaaatagtctctccaagtgattcttatgaactctttatgtttaaaatcatgtcattatggaaaacttacaagtgtaactagctagtagcttgcatttgagaagcttatgacttagatgggcagaatcaacaaagatgaaaccgcctgaggacacatttaacaagtaacatttctagggaaaatgaaggaagtaccacaaactggctagaaaggagcttatcaatcaccagtgaggaagaccagtataacgttcaacaacagttattttgacaaaaacttattttgtgattcctacagtgaaaacatttttggtgatatctgcctgggaaatctctcttcctaaagtatttgtatatgggagtccttgtttgtgaatgtttcctggattagggaggtgtcaacataaatgtattattaaccatgaagctgctcgctatatttttggcataacaaaataatatttatttactgtggataataattctagtgggaatataatgtgacaggaacttctctttatatacgctaccaatttatgagcactattcactgtcaatttcatttcttgtcttttgaaattgacacttggcctgacttacgaaacttgtactatatgaaattggtcctcttttctgcaatacccaacgaaacaccttttctctttattattcagaaatgtcctaacatggatctgtttgttttaataattgtgctttttttaggcttatcatctactagaggccatttacttaaggtgaaattttaagatggagctaaagtaagatcactggtttttagaaccaaattgctatacatatgtgcctcatagaacttataaaaggagtcaaagtttcaaagcaagatagttattaagcaaaaggaaaaatggtaatgatagaaagtcagttaaaaatagatgattgttcttcattctgtttgttggctctgtgttctcctgtgcttcagattccttatgtgttgttgttttaaagacaatttgcagggggttgggagaaggactgaaaaggtacattaagtgtgctgtaaggaaaagtcttagaaacataataagctaaaatcccattcacacatggccaggctatccaaaaagaaaggagccatgttctcatgtggtttaccataccaaagcttgctttctctggcatgggaaaaataaatttaagcaccaaaaaaaaaaaaaaaagaaaa

SEQ ID NO: 3421 - DNA, 1432 bp, Homo Sapiens
  NM_022349
ttttactgaagttgctagaagtttacagaaaaggaagtgcaggaacatttcacaaatctacaatctgtgagtatcacatcctgtatagctgtaaacactggaataaggaagggctgatgactttcagaagatgaaggtaagtagaaaccgttgatgggactgagaaaccagagttaaaacctctttggagcttctgaggactcagctggaaccaacgggcacagttggcaacaccatcatgacatcacaacctgttcccaatgagaccatcatagtgctcccatcaaatgtcatcaacttctcccaagcagagaaacccgaacccaccaaccaggggcaggatagcctgaagaaacatctacacgcagaaatcaaagttattgggactatccagatcttgtgtggcatgatggtattgagcttggggatcattttggcatctgcttccttctctccaaattttacccaagtgacttctacactgttgaactctgcttacccattcataggaccctttttttttatcatctctggctctctatcaatcgccacagagaaaaggttaaccaagcttttggtgcatagcagcctggttggaagcattctgagtgctctgtctgccctggtgggtttcattatcctgtctgtcaaacaggccaccttaaatcctgcctcactgcagtgtgagttggacaaaaataatataccaacaagaagttatgtttcttacttttatcatgattcactttataccacggactgctatacagccaaagccagtctggctggaactctctctctgatgctgatttgcactctgctggaattctgcctagctgtgctcactgctgtgctgcggtggaaacaggcttactctgacttccctggggtgagtgtgctggccggcttcacttaaccttgcctagtgtatcttatccctgcactgtgttgagtatgtcaccaagagtggtagaaggaacaaccagccaatcacgagatacacatgggagggcatttgcattgtgatggaagacagagaagaaaagcagatggcaattgagtagctgataagctgaaaattcactggatatgaaaatagttaatcatgagaaatcaactgattcaatcttcctattttgtcagcgaagggaatgagactctgggaagttaaatgactggcctggcattatgctatgagtttgtgcctttgctgaggacactagaacctggcttgcctcccttataagcagaaacaatttctgccacaaccactagtctctttaatagtattgacttggtaaagggcatttacacacgtaactggatccagtgaatgtcttatgctctgcatttgcccctggtgatcttaaaattcgtttgcctttttaaagctatattaaaaatgtattgttgaatcaaaaaaaaaaaaaaa

SEQ ID NO: 3422 - DNA, 5691 bp, Homo Sapiens
  NM_022350
ccaactcaaacaggcagataaagagagatcaaagagatgagcatgagatacagtcccctcgtgcccaaggagacagggtggttacagacatggaaaatctgagaataatcacctctgataaagatcacagaagctgcccgggaggtgtttggtaagcttggagttacgtttgtggggtggatgggcagaagtcagatttcatagcactgaggatgcagcacaaggagaagttcaagatcaattcctaagacaacaacttggcactaaaaaacataaactatgttctgaaggctttaccctggggacaagggaagggaggtgataacagcagaagtggcagccactggcgatcctttctttccatggtttggcttctactccaaagccacttatttgtgcattctacaaaaagtttcttgtcctttttgaaataaagctcttatcctaagctccattcacacctgcgtgataatgaaccagctagtacttactgtactcaggaagcatgcaaagttctgaatcttagaacagaaagtgaaagcaaaagtaaattccccttcagtcaaatctgcagcagcatgatttaagattaaattcatgtattgaaaatattgttcagaccccatgtgacataactggagccagtgcagtgccatgaagaactacgagattagcctggatattaacttgtcttctagagaatagatttcatgttccattcttctgcaatggttaattcacacagaaaaccaatgtttaacattcacagaggattttactgcttaacagccatcttgccccaaatatgcatttgttctcagttctcagtgccatctagttatcacttcactgaggatcctggggctttcccagtagccactaatggggaacgatttccttggcaggagctaaggctccccagtgtggtcattcctctccattatgacctctttgtccaccccaatctcacctctctggactttgttgcatctgagaagatcgaagtcttggtcagcaatgctacccagtttatcatcttgcacagcaaagatcttgaaatcacgaatgccacccttcagtcagaggaagattcaagatacatgaaaccaggaaaagaactgaaagttttgagttaccctgctcatgaacaaattgcactgctggttccagagaaacttacgcctcacctgaaatactatgtggctatggacttccaagccaagttaggtgatggctttgaagggttttataaaagcacatacagaactcttggtggtgaaacaagaattcttgcagtaacagattttgagccaacccaggcacgcatggctttcccttgctttgatgaaccgttgttcaaagccaacttttcaatcaagatacgaagagagagcaggcatattgcactatccaacatgccaaaggttaagacaattgaacttgaaggaggtcttttggaagatcactttgaaactactgtaaaaatgagtacataccttgtagcctacatagtttgtgatttccactctctgagtggcttcacttcatcaggggtcaaggtgtccatctatgcatccccagacaaacggaatcaaacacattatgctttgcaggcatcactgaagctacttgatttttatgaaaagtactttgatatctactatccactctccaaactggatttaattgctattcctgactttgcacctggagccatggaaaattggggcctcattacatatagggagacgtcactgctttttgaccccaagacctcttctgcttccgataaactgtgggtcaccagagtcatagcccatgaactggcgcaccagtggtttggcaacctggtcacaatggaatggtggaatgatatttggcttaaggagggttttgcaaaatacatggaacttatcgctgttaatgctacatatccagagctgcaatttgatgactattttttgaatgtgtgttttgaagtaattacaaaagattcattgaattcatcccgccctatctccaaaccagcggaaaccccgactcaaatacaggaaatgtttgatgaagtttcctataacaagggagcttgtattttgaatatgctcaaggattttctgggtgaggagaaattccagaaaggaataattcagtacttaaagaagttcagctatagaaatgctaagaatgatgacttgtggagcagtctgtcaaatagttgtttagaaagtgattttacatctggtggagtttgtcattcggatcccaagatgacaagtaacatgctcgcctttctgggggaaaatgcagaggtcaaagagatgatgactacatggactctccagaaaggaatccccctgctggtggttaaacaagacgggtgttcactccgactgcaacaggagcgcttcctccagggggttttccaggaagaccctgaatggagggccctgcaggagaggtacctgtggcatatcccattgacctactccacgagttcttctaatgtgatccacagacacattctaaaatcaaagacagatactctggatctacctgaaaagaccagttgggtgaaatttaatgtggactcaaatggttactacatcgttcactatgagggtcatggatgggaccaactcattacacagctgaatcagaaccacacacttctcagacctaaggacagagtaggtctgattcatgatgtgtttcagctagttggtgcagggagactgaccctagacaaagctcttgacatgacttactacctccaacatgaaacaagcagccccgcacttctcgaaggtctgagttacttggaatcgttttaccacatgatggacagaaggaatatttcagatatctctgaaaacctcaagcgttaccttcttcagtattttaagccagtgattgacaggcaaagctggagtgacaagggctcagtctgggacaggatgctccgctcggctctcttgaagctggcctgtgacctgaaccatgctccttgcatccagaaagctgctgaactcttctcccagtggatggaatccagtggaaaattaaatataccaacagatgttttaaagattgtgtattctgtgggtgctcagacaacagcaggatggaattaccttttagagcaatatgaactgtcaatgtcaagtgctgaacaaaacaaaattctgtatgctttgtcaacgagcaagcatcaggaaaagttactgaagttaattgaactaggaatggaaggaaaggttatcaagacacagaacttggcagctctccttcatgcgattgccagacgtccaaaggggcagcaactagcatgggattttgtaagagaaaattggacccatcttctgaaaaaatttgacttgggctcatatgacataaggatgatcatctctggcacaacagctcacttttcttccaaggataagttgcaagaggtgaaactattttttgaatctcttgaggctcaaggatcacatctggatatttttcaaactgttctggaaacgataaccaaaaatataaaatggctggagaagaatcttccgactctgaggacttggctaatggttaatacttaaatggtcaatagaaaaagtaggctgggcgcggtggctcacgcctgtaatcccagcactttgggaggctgagaagggcggatcacgaggtcaggagatggagaccatcctggctaacacggtgagaccccgtctccgctaaaaatacaaaaaattagccgggcatggtggcaggtgcctgtagtcccagctactcggcaggctgcagcaggaaaatggcataaacccgggaggtggagcttgcagtgagccgagattgcaccactgcattccagcctgggtgactgagcgagactctgtctcaaaaaaaaaaaaaaaaaaaaaaagaaaaagaaaaagaaaagaaaagaaaaggtacatcagacatgactgcctgcatgaagtcaaacagggtaacaccagtgaagctcaagtcaagagctgtggatattttgtctaaccaacaagaagtctcaagaaatcaggcagtgcagctgcctgctctcagctatcgtatccagccaaaagatgcatgatgatggagtggtgggggaaggccagttcagtatcctatttaaaagtaaacttcctgaataatggatatatgtggagatacagacatagatatatagatacagctgtaattatttagcctcaagtgactttctccattgcttcacgctatgccactattttgcttctttaatttttttaaccttgcttagtattctatagtttgcccaaccagttttacgtccaaggaaaattagccaatgcataaaatatacaaactatgaaaggcaaggatcaggaaaccagagactttgccaccaaatctcagattattagaaactaggtgtcagggtttatcaagaaggccaggaaggccttttgggttaagccttacattcatgaagaacctcaagggtagatttttgagagcattccaaatgaatggtctctggtcaaatgaatgaatggtcaaatgaataaatctgccctcacagagatacaaaaggaaaaggaatataattcataccatttggtttaagccttacattcatgaagtacctcaagggtagatttttgagatcattccaaatgaagtcgaatctgccctcacagagacacaagaaaggaatataattcatacactattgcatttttaataaatcttttgaaatttgcagaattagattgtattgtgtattttcggttaaatgataattgaatgtaaatatttagatgcagcaccatattttataacccagctttagcatttcttcatattttaaggaaaccccccacctccttcttttaagggcgcttcttgctctctgaaatgccctgctaaatgcttctcttaattatttgaataaggtagtttggaataaagaaagaaaagatcactctacatacagatagtaaacttaatttgtgatcctatatatgagacagtataaaaatacagataagttttagaaagactcaaaacaatatgtaaatgactgatgtttgcattattaaggaagacttgggatgttgggtcaagaggggaaagtgttagtcaatccactttggagcaatatcatgaaggtcaattataattccatatacctttctttgatgccacagtcagagatagaatacagtttgggtggccatggatgtgccccaatacagtacacattttttggttaaatttgttttcagatcatttcatggaatctttgaagtatctttgactctaactttgacttggtggtggaccttccttggtttttataacacctaagagatatcctttagaattacatgtattttagcataaggaaattgaaaaagtaaaacatactggtttttttcaacaagaccatatgtaaattaaatagtgaaatgtgtatgagtttcagtagaactgtaccatcaacaatgtttccataaatatgcagagttctttcttttgtattgttatttacaatattgttaaattgaatgcatttgcaatttctaggattctaaagaattgagtacagaaagtagcaattttattatttgatgataatatgagaattactgtgccaatactgttttgataaataaatagatttttaaaaataaa

SEQ ID NO: 3423 - DNA, 5140 bp, Homo Sapiens
  NM_022351
agaggccggaggagggagggggggacaccgagcgcggagagcgcggagagcgcggagggaggcgcgcgcgggagcgaacaccctcccggatccagagcccggcggcggcgaagcagcagctgcggccgcgcccttgccagagccggtgcgtccgcctagccccgctccgcctgaggccgtcagggctcccgaggatggaagattcccaggagacatcgccgtcctccaacaactcctcggaggagctcagctctgctctgcacctgtccaagggcatgtcgatcttcctcgacatactgaggagagcagacaaaaatgatgatggaaaattatcctttgaagaattcaaagcatattttgcagatggtgttctcagtggagaagaattacacgagcttttccataccattgatacacataatactaataatcttgacacagaagagctatgtgaatatttttctcagcacttgggcgagtatgagaatgtactagcagcacttgaagacctgaatctttccatcctgaaggcaatgggcaaaacaaagaaagactaccaagaagcctccaatttggaacaattcgtaactagatttttattgaaggaaaccctgaatcagctgcagtctctccagaattccctggaatgtgccatggaaactactgaggagcaaacccgtcaagaaaggcaagggccagccaagccagaagtcctgtcgattcaatggcctggaaaacgatcaagccgccgagtccagagacacaacagcttctccccaaacagccctcagtttaatgtcagcggtccaggcttattagaagaagacaaccagtggatgacccagataaatagactccagaaattaattgatagactggaaaagaaggatctcaaactcgaaccaccagaagaagaaattattgaagggaatactaaatctcacatcatgcttgtgcagcggcagatgtctgtgatagaagaggacctggaagaattccagctcgctctgaaacactacgtggagagtgcttcctcccaaagtggatgcttgcgtatttctatacagaagctttcaaatgaatctcgctacatgatctatgagttctgggagaatagtagtgtatggaatagccaccttcagacaaattatagcaagacattccaaagaagtaatgtggatttcttggaaactccagaactcacatctacaatgctagttcctgcttcgtggtggatcctgaacaactagatgttcctagacattttctttatggttccaagtgcaaaacaggtgttcttatctaaaacgtcaattagaaaattatctgcggttgttaatctactgtatatttttgtttggtatatttactaagtgcactctttcaaaacttattctataactttatcaattcatgtgaattttagctcaattttcaaagttcactaatattctcaatatttaatgctaaatgctttgctacattgtaactcacctaaaaccttttagtgacaaaatcctaatatgtggaaaaaagcatatgcataaaggaataatattgtgaaaatgaatctgttatgataaagaaaaaataaagtggaaacttttagagtattacttcatagggcagattttgtaaactgtcgtatactgtaaagggttaaatcagcgttttgtgatttttaagtaactgtgagtgaagtttattcttcaacaatgtctactccatccccaacccaactcacagccctatgactactatctttgcattagttaaaaagttagtatataggcatcaaacaaccttggctgtaacctatagaatctctatccacgtatcaggttatagactggtttttcaaaagtgaacaatcctgtgataagttggagtaccatttagtaatacagcaacattgtgtcatttattagcatcataattctttgttatgtaagttaaatatatcaagaaagaagagactgtttggaaaaatgtggttcaagttttatgctatatagttttggtatgcgatacagacagctaacttttcttatgaaaaatacatatttgcatgtaaacaatgatttcaaaatacttgaaaaataaaattttaacccaaatgaataactaagaaatataaaacaagcacaaaatcttagggaagtcataaaatagtagtgaaagtattagacagaagacatctgttttcgaatttcaacactagaatgactaaaactatctacctatagaactatctgtagatagtatactatctacactctgctcaacaagctcagaaattaaatatttttaataataaaaatctgttctggttataaaccttgctaatgaaaatacaatacatataaaaatgtatagccatgttattttctagtataaattcctttgaaactataagtctttgaggaaaattataaggtaaaattttcctgtttttccccctttgaaaaactcaggaaaaaaggaagattgaactaataaaattttatttcttaaatataaatttgacctaaaatattttctcaaactaattcatgaaacagcaacttttaccaatacctttgtatactctcagttctcattcagtataaataaaattttaaaatcctttcatagttctattagaaataagtagtaaattttgatatattgtacatacacacgtgtgtgtgtgtgtgtgtgtgtgtgtgtgtgtgtgtgtgtgtatttgtgtgcctctggtcaactctaaggatgacagacactgtgtaacaacacctgggtcaactcttttaatttatatacaaagcaaagaacaacattaatggagatgcacaatgattattcaaacaagctatatatatgtacaaaggcaaacagacacataacagtctctgcagactgattgtatatagtaagaaaagatcaaaagactttaaaacctaaatgacttttgacatacaaactcttcttgagaatgtttgttgtaaatggtttcaaaaatacaaattatagccaatcaaaacattgctttggttggtgcatttaagtatccaactcaaaaagcatatcaaatattttgggtactaggcagtttccaaagtagcatggtagtattacttgttaaaagggttctgttttcattaacagtactaagtggaagggatctgcagattccaaactggaataagctctatcatattctgaaacaagaattagaatgacttgagaacgggcaaataacaaagcaaaccaatataattatatggtcattctgaccccagctcttatacaaattatacatgtatttttgtgtatgtttgtgagagttgtatgtatgtgaatgtgtgtgagtgtgtattcacatacacatatatactggaacctatagtagaaaaggaaactagtagggccaaaaaaaaaaagaaaaagaaaaagaaaaaagaaaaaaaaagaaaaaactgggacctaagtataaatatctcatcctaaagtaaacaataagtttatagttaacgaagatttttttctatttaaaaccccattttcctaaagaacaaagtagtaaaataaaaaaaaatttaaaaaattaaaaaataaaaaaaagaggtcactaaaagaccaagatgggaaacgtaacatggaatacaagcttgaatctgggaaacaagctcaaaaaacagtgaaaaaaaaagtactggtttaggagttcaaaattcagtgaaacaaactttttgccaatagacctagggatctaagaaatagaattagggagagtttacacttacttacctatatatcagcagatttttctggaagaaaccctttttttttttttttttaaacagtaacatccagagtgacaaattgcaggagatttaatgtataaaatttctaggaattaaaagcttaaacccaaaaattgttcatccatatataagaaattatcgaattaaaacttaatgtatgtcaattattttcaaatgtctaaattcctttggaaataaaaatatcagttttactttgaaattgctcaacttctgctattcatatggtctgattagtgacataagtagcagccgtttttcaacttcagtttcattcactaccattgtttccaaattatcaatctctgctagtaattatgaatttaagaccatattattatcaaaaacctagagaccaatcatatatctgaaaagaaatacccattaaaaattctgcctcctgtttattgagaactatgcattgaacattctgaatcattctaagcctctggagagactgtaatgatccattcatgagctggtatgaaatcagtgggaagcagaacaacagaaggaactttaaaagcaacaagcaattatgtaccatatatacactgtagcaaatattttatatttgagagtctttacagcttacatttccattccattattacaagtgatgaaaaacaaaaaattgcaagtagtatgcaaattataaatatacagtcttcccacttcactaaccaaattcctactttccagtgttacttcccaatttatgcaggaaacctcctgcaaagctgaaactgattagaaaattctttatattttaaaatagctctttctcatttttagagaagtcaaatagccaaccatcaaaattaagaataaattgaattgtcacagtccattacagttattgttgctagatccacctcatttgcagatgtccaaacttaaattcatctgttcttaaaatgctacttaaaactttggttgttttcctgtaatataaaagaaaaagttaatttatcaattgattgaatacagtttttactaattagtttatcaaaccaaatactgtgaacgtaccaggtgtttacagatttaaatgcatgttaccatagaaactattaaagtaactagaactgtcaaataacaaaacggctcatgtttttaaaatatatgtaactcattttaaaatatattaaattgtattccaaacctgttcttctgtttctgtggcacctaggtttaaaatatgtattaatgtgtaaatcacaagtaaaatgaattctaatgtacaagtttgttttaaaaagtgtatgtcaagcttttatttacacaataaaatgttattaaagatggaaagtcta

SEQ ID NO: 3424 - DNA, 2339 bp, Homo Sapiens
  NM_022353
agattccatcctatttctccgatgaaagtatcaggtacctcacccctaagtttagatttgatgatagttcccttaaaaatgaatgacgaataatctaccccatccttttctcacagtagcaaccaaattccagccaagggcaaaaaaaaaatttctttttaatgtagcttagtgtttggaacttgatgttgtgtagtcagacaaacctgtattcggcctccgctggatcagtcactagctgtgtaattttacagaactctcatcacctgcaaatctgggggaaatgcaggtgcgcacagagagcgttttgggcaaagacggcctttaagcttttcttcactaagcatgccgctcgctagcggaacagcagccagctctggacgggaccttgcacagttccgatgacatcacttccgggcgccaggttcgggctttctcctgcagcgataagggcagtcgacagtctttagtagggaaaggagacaagtgctagctactgccgcccaagtggaaggaattatctatagagtaagtatgctaatcttgactaagactgcaggagttttttttaaaccatcaaaaaggaaagtttatgaatttttaagaagttttaattttcatcctggaacactatttcttcataaaatagtattgggaattgaaactagttgtgatgatacagcagctgctgtggtggatgaaactggaaatgtgttgggagaagcaatacattcccaaactgaagttcatttaaaaacaggtgggattgttcctccagcagctcaacagcttcacagagaaaatattcaacgaatagtacaagaagctctttctgccagtggagtctctccaagtgacctctcagcaattgcaactaccataaaaccaggacttgctttaagcctgggagtgggcttatcatttagcttacagctggtaggacagttaaaaaagccattcattcccattcatcatatggaggctcatgcacttactattaggttgaccaataaagtagaatttccttttttagttcttttgatttctggaggtcactgtctgttggcattagttcaaggagtttcagattttctgcttcttggaaagtctttggacatagcaccaggtgacatgcttgacaaggtggcaagaagactttctttaataaaacatccagagtgctccaccatgagtggtgggaaagccatagaacatttggccaaacaaggaaatagatttcattttgacatcaaacctcccttgcatcatgctaaaaattgtgatttttcttttactggacttcaacacgttactgataaaataataatgaaaaaggaaaaagaggaaggtattgagaaggggcaaatcctgtcttcagcagcagacattgctgccacagtacagcacacaatggcatgtcatcttgtgaaaagaacacatcgggctattctgttttgtaagcagagagacttgttacctcaaaataatgcagtactggttgcatctggtggtgtcgcaagtaacttctatatccgcagagctctggaaattttaacaaatgcaacacagtgcactttgttgtgtcctcctcccagactatgcactgataatggcattatgattgcatggaatggtattgaaagactacgtgctggcttgggcattttacatgacatagaaggcatccgctatgaaccaaaatgtcctcttggagtagacatatcaaaagaagttggagaagcttccataaaagtaccacaattaaaaatggagatatgatttctgctgttcaaaaaagtccctaaagagacaggctcttgccatgttgcccgggctggtcctgaactgctgaattcaagtgatcctcccaccttggcctccagaagtgctgggattatgggtgtgagccaccatgcctagccaaaatgtttcttaaggtatacattttgggtcttagaagacttatacatttgtaatatttattactaaatatctcaaagtattacaataaatgttaccatgtgagctactttgaatcaggcttcttgcacaccaatttaaaaatgttaactcttgatatatacactagttataccactcatgtcagtcaataaattttaaggtttaagtgcaggcctttgtttacagaaatcctaattttttgaaaccataactctgacctgacactaaattcctgtagacatgctaaggaaaatctgcttagtatcgagatcaagaactttcattcaaaaagattattcagttatgttatttgcatattaccattattaaaaataaaaaaatttttaaaagatgaaaaaaaaaaaaaaaaaaaaaaa

SEQ ID NO: 3425 - DNA, 5467 bp, Homo Sapiens
  NM_183372
atcagcgaattgcagggtcaagggctggtgctttgaaagagaggcggaggggagagagggattttcccgtccccgctgcgctctgtcctccattactccttttctcggcccgcggcccgaacccgctgtgcggtagaggcagccgggtccctttaaggcccagctgcgcctgtgccttgggctctcctgacacggcccatccggaccctgaggagccagcgggccgcaagcaagttgctgggcggcggtggagatagcggcggtgctgggaggggtaggtgagggtcgcgaggctgcctgagcttctgagtgagcctggtgattttgggaacgcgggacgggcgacctgcggcgccaggagcggggccgaggtacggcggcacggctgcagcctggatgggaagttcaagtttactgcgaagtccacccagcgttccggaggtgagggcgccgcgccaggccgggcgggaggcattctgaaggcaaatcctgtttagacccaggcaaaggttcctggtgacccaggctctcatgagcagattgtcccttatcattctcctgaggatgtctggagcttcagtgctgtgtgctcttggcctccacactgggggtgccaccaactcccactgtccagggcttctggtggactctccgaggcaccgatgtagaaacttacccattcagtgcaccaagagcagcttcacatggtgtgggccgacatgaagagctgccagatccaacagaaatgtgattgataacagtaaagccacactcctcaagtgcctgaaatacccctcattgtcttcttcaggtggcaagggctctggaacagccacataaagcccttgaagataaggatggtcaaacaaaataatatcatacctggagaaactcagatcttgctaagatttactggttgggaatccaaagttaatgccaagaagcagctgccagttgggatcaaatgtgagcctatggatcaagtccctgactccacctcttctgccacaaacgtcagcatggtggtatcagccggcccttggtccagcgagaaggcagagatgaacattctagaaatcaacgagaaattgcgcccccagttggcagagaacaaacagcagttcagaaacctcaaagagagatgttttctaactcaactggccggcttcctggccaaccgacagaagaaatacaagtatgaagagtgtaaagacctcataaaatttatgctgaggaatgagcgacagttcaaggaggagaagcttgcagagcagctgaagcaagctgaggagctcaggcaatataaagtcctggttcactctcaggaacgagagctgacccagttaagggagaagttacgggaagggagagatgcctcccgctcattgaatgagcatctccaggccctcctcactccggatgagccggacaagtcccaggggcaggacctccaagaacagctggctgaggggtgtagactggcacagcaccttgtccaaaagctcagcccagaaaatgacgaagatgaggatgaagatgttcaagttgaggaggatgagaaagtactggaatcatctgcccccagggaggtgcagaaggctgaagagagcaaagtccctgaggactcactggaggaatgtgccatcacttgttcaaatagccacggcccttgtgactccatccagcctcacaagaacatcaaaatcacatttgaggaagacaaagtcaactcatctctggttgtagacagagaatcctctcatgatggatgtcaggatgctctaaacattctcccagtccctggccccacctcttctgccacaaacgtcagcatggtggtatcagccggccctttgtccagcgagaaggcagagatgaacattctagaaatcaatgagaaattgtgcccccagctggcagagaagaaacagcagttcagaagcctcaaagagaaatgttttgtaactcaagtggcctgcttcctggccaagcagcagaacaaatacaaatatgaagagtgcaaagacctcataaaatctatgctgaggaatgagcgacagttcaaggaggagaagcttgcagagcagctgaagcaagctgaggagctcaggcaatataaagtcctggttcactctcaggaacgagagctgacccagttaagggagaagttacgggaagggagagatgcctcccgctcattgaatgagcatctccaggccctcctcactccggatgagccggacaagtcccaggggcaggacctccaagaacagctggctgaggggtgtagactggcacagcaccttgtccaaaagctcagcccagaaaatgataacgatgacgatgaagatgttcaagttgaggtggctgagaaagtgcagaaatcgtcttcccccagggagatgcagaaggctgaagaaaaggaagtccctgaggactcactggaggagtgtgccatcacttgttcaaatagccatggcccttatgactccaaccagccacatagaaaaaccaaaatcacatttgaggaagacaaagtcgactcaactctcattggctcatcctctcatgttgaatgggaggatgctgtacacattatcccagaaaatgaaagtgatgatgaggaagaggaagaaaaagggccagtgtctcccaggaatctgcaggagtctgaagaggaggaagtcccccaggagtcctgggatgaaggttattcgactctctcaattcctcctgaaaggttggcctcgtaccagtcttacagcagcacatttcactcattagaggaacagcaagtctgcatggctgttgacataggcagacatcggtgggatcaagtgaaaaaggaggaccaagaggcaacaggtcccaggctcagcagggagctgctggatgagaaagagcctgaagtcttgcaggactcactggatagatgttattcaactccttcagtttatcttggactgactgactcatgccagccctacagaagtgccttttacgtattggagcaacagcgtattggcttggctgttgacatggatgaaattgaaaagtaccaagaagtggaagaagaccaagacccatcatgccccaggctcagcagggagctgctggctgagaaagagcctgaagtcttgcaggactcactggatagatgttattcgactccttcaggttatcttgaactgcctgacttaggccagccctacagaagtgctgtttactcattggaggaacagtaccttggcttggctcttgacgtggacagaattaaaaaggaccaagaagaggaagaagaccaaggcccaccgtgccccaggctcagcagggagctgctggaggtagtagagcctgaagtcttgcaggactcactggatgttattcaactccttccagttgtcttgaacagcctgactcctgccagccctacggaagttccttttatgcattggaggaaaaacatgttggcttttctcttgacgtgggagaaattgaaaagaaggggaaggggaagaaaagaaggggaagaagatcaaagaagaaaagaagaaggggaagaaaagaaggggaagaagatcaaaacccaccatgccccaggctcagcagcgtgctgatggaagtggaagtgcctgaagtcttacaggactcactggatagatattattcgactccatcaatgtactttgaactacctgactcattccagcactacagaagtgtgttttactcatttgaggaacagcacatcagctttgcccttgacatggacaataggttttttactttgacggtgagaagtctccacctggtcttccagatgggagtcatattcccacaataagcagcccttactaagccgagaggtgtcattcctgcaggcaggacctataggcacctgaagatttgaatgaaactatagttccatttggaagcccagacataggatgggtcagtgggcatggctctattcctattctcagagcatgccagtggcaacctgtgctcagtctgaagacaatggacccacgttaggtgtgacacgttcacataactgtgcagcacatgccgggagtgatcagtcggacattttaatttgaaccacgtatctctgggtagctacaaaattcctcagggatttcattttgcaggcatgtctctgagcttctatacctgctcaaggtcagtgtcatctttgtgtttagctcatccaaaggtgttaccctggtttcaatgaacctaacctcattctttgtgtcttcagtgttggcttgttttagctgatccatctgtaacacaggagggatccttggctgaggattgtatttcagaaccaccaactgctcttgacaattgttaacccgctaggctcctttggttagagaagccacagtccttcagcctccaattggtgtcagtacttaggaagaccacagctagatggacaaacagcattgggaggccttagccctgctcctctcaattccatcctgtagagaacaggagtcaggagccgctggcaggagacagcatgtcacccaggactctgccggtgcagaatatgagcaatgccatgttcttgcagaaaacgcttagcctgagtttcataggaggtaatcaccagacaactgcagaatgtagaacactgagcaggacaactgacctgtctccttcacatagtccatatcaccacaaatcacacaacaaaaaggagaagagatattttgggttgaaaaaaagtaaaaagataatgtagctgcatttctttagttattttgaaccccaaatatttcctcatctttttgttgttgtcatggatggtggtgacatggacttgtttatagaggacaggtcagctgtctggctcaatgatctacattctgaagttgtctgaaaatgtcttcatgattaaattcagcctaaactttttgacgggaacactgcagagacaatgctgtgagtttccaacctcagcccatctgcgggcagagaaggtctagtttgtccaacaccattatgatatcaggactggttacttggttaaggaggggtctaggagatctgtcccttttagagacaccttacttataatgaagtacttgggaaagtggttttcaagagtataaatatcctgtattctaatgatcatcctctaaacattttatcatttattaatcctccctgcctgtgtctattattatattcatatctctacgctgcaaattttgggtctcaatttttactgtgcctttgtttttactagtgtctgctgttgcaaaaagaagaaaacattctttgcctgagttttaatttttgtccaaagttaattttaatctatacaattaaaaccttttgcctatcactctggacttttggattgttttttacattcagtgttataatatttgattatgctgattggttttggtgggtactgatgcgaattaataaaaacatttcatttcca

SEQ ID NO: 3426 - DNA, 2863 bp, Homo Sapiens
  NM_183381
ggatgaggcctcgccctcgcctctttagtaggtcgggtgagtgtagtgtgcagggaagagacgcgtcagcgccagggccaggcccgcccgggggcagcccggcagccgaatcttgggctactctgtcccaacagccggagcagatcagaccgaccggccctgcccgctcggtcccgcgccctccagaccctacggtctccgtttctaggggcacatggttagcggcaggcgcccacagccaatccactttgccagcctgccccttcctctgccaagagcagcttcttcagccgcgctccagttccgcagacgcctgccccaccctgctcttcccttccagggaagacggatcacgcggccaagaacgagactcgcaaactgggcatttctccgagccgggctagagcaagtagcgagactccgcgtgagagtgggaaagagccttaacaggcaaccatgttgcccagtgggttttctgtgcctttgggtgcggaccaatgaggcgcgtggggcgggacttccgcttcgcctaggtgttgtcgtccctgctagtactccgggctgtgggggtcggtgcggatattcagtcatgaaatcagggtagggacttctcccgcagcgacgcggctggcaagactgtttgtgttgcgggggccggacttcaaggtgattttacaacgagatgctgctctccatagggatgctcatgctgtcagccacacaagtctacaccatcttgactgtccagctctttgcattcttaaacctactgcctgtagaagcagacattttagcatataactttgaaaatgcatctcagacatttgatgacctccctgcaagatttggttatagacttccagctgaaggtttaaagggttttttgattaactcaaaaccagagaatgcctgtgaacccatagtgcctccaccagtaaaagacaattcatctggcactttcatcgtgttaattagaagacttgattgtaattttgatataaaggttttaaatgcacagagagcaggatacaaggcagccatagttcacaatgttgattctgatgacctcattagcatgggatccaacgacattgaggtactaaagaaaattgacattccatctgtctttattggtgaatcatcagctaattctctgaaagatgaattcacatatgaaaaagggggccaccttatcttagttccagaatttagtcttcctttggaatactacctaattcccttccttatcatagtgggcatctgtctcatcttgatagtcattttcatgatcacaaaatttgtccaggatagacatagagctagaagaaacagacttcgtaaagatcaacttaagaaacttcctgtacataaattcaagaaaggagatgagtatgatgtatgtgccatttgtttggatgagtatgaagatggagacaaactcagaatccttccctgttcccatgcttatcactgcaagtgtgtagacccttggctaactaaaaccaaaaaaacctgtccagtgtgcaagcaaaaagttgttccttctcaaggcgattcagactctgacacagacagtagtcaagaagaaaatgaagtgacagaacatacccctttactgagacctttagcttctgtcagtgcccagtcatttggggctttatcggaatcccgctcacatcagaacatgacagaatcttcagactatgaggaagacgacaatgaagatactgacagtagtgatgcagaaaatgaaattaatgaacatgatgtcgtggtccagttgcagcctaatggtgaacgggattacaacatagcaaatactgtttgactttcagaagatgattggtttatttccctttaaaatgattaggtatatactgtaatttgattttttgctcccttcaaagatttctgtagaaataacttattttttagtattctacagtttaatcaaattactgaaacaggacttttgatctggtatttatctgccaagaatatacttcattcactaataatagactggtgctgtaactcaagcatcaattcagctcttcttttggaatgaaagtatagccaaaacataaaaaaaaaaaaatcctcagtatagcttgcaattaagacctagatcacagtatttaagtgttttgcgttttatacatgaggtcagtgctacagccacctagcatgaactaacccagcttccacctccataaagttacctagagttgttgagttggaatatgttctggcatttacctgacctgccaatcattagggagaggcaacaaggtaattcagcctttcctcctatcagcacaaagaaactcaaagctgttttttccctttctgttccaaagcagtcttatcctgacaggagcggtctatactagtgcagatttcaacacttttttttaacgttttaattactatagtgttatgtagagatttgattgagcagctaatgtttctgaactttacttactaattttcagtgtccttaagggttctgtagtgttatcaaagcaaaaagaaaatgctgcataaaaataccaaacttcagcaactgttaatactcagatcatatacctcttaataaatagcatcttatgctaattagccctgctaaactatgtacagaggaaactgttcaagtattggatttgaaagtaagtgacttatgtttaacagaactaatgatgtattgaaacactgtattatgaaaagctaaattatacatcattgtaactatgtagaaagtgtagactaatgtataatcaaaatgctaaggatttttatatggccttgtatgaggggagtttgaatgttaataaacatgttttccactttaagatccagtaaa

SEQ ID NO: 3427 - DNA, 5528 bp, Homo Sapiens
  NM_183397
agaaacagcctatagacgccacgagtcggcggcgctaccgaggggctgtgggcgcgcagctggaacctccggctgtcagtgcgcttacagttcctaaccccgaccctgcgcgcagcccgcactatggcagccccgccgcagctaagggctctgctcgtagtcgtcaacgcactgctgcgcaagcgccgctaccacgctgcgttggccgtgcttaagggcttccggaacggggctgtctatggagccaaaatccgggcccctcacgcgctggtcatgacctttctcttccggaatggcagatcaacatgtacctgttgtcacgcgtcctgtttgccctgagccgcctggctgtagagaagggctacatccctgaacccaggtgggacccgttcccgctgctcactgcggtggtgtgggggctggtgctgtggctctttgagtatcaccgatccaccctgcagccctcgctgcagtcctccatgacctacctctatgaggacagcaatgtatggcacgacatctcagacttcctcgtctataacaagagccgtccctccaattaatgcagccctgaggtgtctggctgtggctcaagatttggccccatgcagaccctcccaaaggatactgccttctcaagatcataggcctcagactccaactggtgttatcccagggttccgtttgctgaagtaaaaacactgattttaaaatcccagtgggtacctttgtatggtggcacaagtggccgaatcaggctgaggaatctacggcttggttccagctgtgcagctgacttctgtgagactggggccagccacactactctctaggcctcaggggtcaaggagctcagaggagggccctgaggtctctttccggtgggtatgttcattcttcaactgttcttatgtcacagagggctccttgctggtgggcagtgggttgtaaatactttttaaaaaacactaagttccttatctcagatgctgttctactggagaagttctagattcccactgtccaatagaaacacgtgagccatatatgtaattaaaatgtttctagtagctgcattacaaaaaagaagcctgggcactgtggctcactcctgtaatctcagaactttgggaggctgaggcaggtggatcacttgagctcaggagcttgagaccagcctgggcaacatggtgaaacccagtttctacaaaaaatacaaaaaattagccgggttccatcacctgtggttccagctgaggtgggaggatcacttgagcctatgaggtcgaggctacagtgagcaaagatcacgccactgcactccagcctgggcgacagtgagaccctgtctcaccaaagaaaaaaaaaaggtgagattaatcttcactatatattttaacacaaatttctaaaagttatttcaacatataattaacatcattagatattttgtactcttttttgtattaagtattcaaaattgggtgtatattttgccacccacattttcaggacccagtagccacatgtggctagtggctgctgtgacgggcaacacagatatggaacacttgtatcctcacagattattctagtggacagtgcagatctagagctagaggacatgggtttgagtccccactcccccactgtgtaaccttggggaaggttctggacctctcagagcctcaatttatcataaaatgaggataatcataatgccgtggtcctcactggacttgtgcaactaccactgatgtgctactaattactttcatttagtgcattcatacttccacttgggtgttttccacatattattattattttttttttttaagtagcgacagggtctcgctctgtcactagggctagtctcgacctcctagcctcaagcaatcttcctgcctcagtctcccaaagtgccatgattacaggcatgagccactgcccctagcctgcacatattatttttaaaccatacagtggccttgcaaatgtgtgttttcgtccccattttacagatgtagaaactgagggtcaggccaggtgcagtggctcacgcctgtaatcccagcactttgggaggctgaggcaggcagataacctgagatcaggagttcttgaccagcctggccaacatggtaaaaccccatctctactaaaaatacaaaaattagccaggcatggtggcacgtccctgtaatcccagctactggggaggctgaggcaggagaatcgcttgaacctgggaggcagaggctgcagtgagctgagatcgcacgactgcactccagcctgggccacagagcgagactgtgtctaaaaaaaaaataaaaaaagaaaagaaaagaaactgagaatcagagaggagagtaacttgcccaaggtaatacagctagtataacagccgaatcaagatttgaactcagattcgtctgatttcaaagcccatgttttttccagtgccttgtttcaaatttagaaacctaagccatgctatgcaaatgttagctcattataggatatgggccagaaaggggtacacattcaaatgcccataggggcctacaatgacatagtgctatgcgatgaggagtgatggggacatagggaactggagacttgtgtaccagtctgattttttcttttttttttttttttgagacagagtcttgctctctcgcccaggctggagtgcagtggcgcgatcttggctcactgcaagctctgcctcccaggtttacttacaccattctcctgcctcagcctccggagtagctgggcctacaggtgcccgccaccacacccggctaattttttgtatttttagtagagatggggtttcaccgtgttagccaggatggtctcaatctcctgacctcatgatccacccaccttggcctcccaaaatgctgggattacaggtgtgagccaccatgcctggccaagtctgcttttttcgaaaccacgatcctagaccaggcacggtggcttgcacctgtaatcccagcactttgggaggccgaggcgggtggatcacctgaggtcaggagttcgagaccagcctggccaacatggcgaaatcctgtctctactaaaaatacaaaaattagctggacatggtggcaggcacctgtaattccagctacttgggaggctgaggtgggagaatctcttgaacctggggggctgctgtgagccgagatagttccattacacttcagcctgggtgacagagtaagactctgtctcaaaaaaaaaaaaaaaaaaaaaaacacaatcctggacaaatcaaacaagtctccaggaaaatctggtccatgggctaccaatttgagaccattggtctggtagatacactttcattaatatacttactccatcactctttctatattttagaagttactagtagaaatgtatgcaggagtcactggagaccttattaaaatgcagcttctgattcagtgagctggggtggggcctgagagtctgcatttctcccaggctccctggtgctgccagtggtgctgctctgagtaacaagggggtggggaatgatatggagccgtccattattatcccatctgacaaatgagtcacagagcccttaggtaattgaggtgggatcagtctgattctgtaagctgtgttttcagccacaacatttactgcaaacttggagtaggtaattatgaagttcctttaacttgctgtggaggttgaatgagctctagagtaaggggtccgcaaccccggtaccggtccatggcctgttcggaaccaggccacgcagcaggagttgaaaggtgggtgagctagcgaagcttcatctgtatgtacagccactccccactgctcacattaccacctgagctctgccttctgtcagatcagtggtggcattagatgctcgtaggaatgcaaaccctattgtgaactgcgcatgcaagggatctaggttgcatgctccttatgagaatctaatgcctgatgatctgtcactgtctcccgtcacgccttgatgggactgtctagttgctggaaaacaaactcagggctcccactgattctacattatggtgtgttgtacaattatttcattatatattacaaggtaataataatagaaataaaatccacagtaaatgcaatgtgcttgaatcatcctgaaaccacgtcccctccccagtggtccgtggaaaaattatcttccccaaaactggtccctggtgccaaaaaggttggggactgctgctctaggggttggggagggcagagggcttgggccatcaccaggcaggttttatagcagatggtgggggtgccctgcctatagctcctctaaataacgactctggtgcacactagccagctttgccagtggccgcccctctgtctttctgcctgaggactctagcttgtcactggtgcctcctttgccagcctctggcaggcctgaagggctggagaatgaacacatccttggagcaaccttcaaccaatgactgataaatacccccactcccacagcccgcatccctcacccctcgggtgggataactcagaggtgcgtgctccacactgactcccagggccgcccagcagggctgagcctcaaacaccctccccatctcccttcctcatgcccctaccagtgcttcctgggaccacttcccatatgaaccacttgcactcaaacccttgtcttagagtctgctattgggggaacccaaactaaaactggcctctgtacagcaggttgagaggcaatatagcatggtggtcagggacataggctttggagccagagtgcctgggctcaagccctggccccacagtttccttgggcaagtgactgagccattctgtgcctctatttcctcattgataaagtaggcgttgtcgtagcacacacctcatcgagtggtgtggagggttaaagaatatgacacagttaaagtgagtccccaataaatgctgttatttctaagagcatccaaatgtagaggaagtgtgcccctgaggactgagcacaccctgcttttagcctgtcctgcccccagctgaaggtgaaaccttggccgcctgccctcctgaagtcccgccactgctgctgggggttggccaactccgctaccgactgtctctgctctctaagaataggtttccctcacagatggcatctctctggatgctgctagagcatctggtgcttccaactgcacactccagggaggaaggcagtgtggtctgtgccggggagcagggctctgccttccagcagatctgagaggagtcccatttggctccttcctagctgccctccattctctaagacctgtaaaacagggatggccagagggctcttgttgcacagtaagtgctatgcttcctaaatgctagttcctgaaatagaatggtttaacctctacttactaaacacctgctacaatcctgttaattcttttgacatgtaagactaaaataaataaataaataaataaatatatatgtgtataaaa

SEQ ID NO: 3428 - DNA, 7680 bp, Homo Sapiens
  NM_183416
ctcccacctcgatgcggtgccgggctgctgcgtgatggggctgcggagcggcgccctgcggctcgcggcggccgctgctcgcgctgaggtgcgtcggtgcccggccccccgcgcccccgcgcgccgcggctcctgttgacccggtccgcccgtcggtctgcagcgcggctgaggaaacttggctgtaacttcaaaagaagatttgattctttatttctggactgcatatatatatataacaaggccattaaaatgtcgggagcctcagtgaaggtggctgtccgggtaaggcccttcaattctcgagagaccagcaaggaatccaaatgcatcattcagatgcaaggcaactcgaccagtattattaacccaaagaatccaaaggaagctccaaagtccttcagcttcgactattcctactggtctcatacctcacccgaagatccctgttttgcatctcaaaaccgtgtgtacaatgacattggcaaggaaatgctcttacacgcctttgagggatataatgtctgtatttttgcctatgggcagactggtgctggaaaatcttatacaatgatgggtaaacaagaagaaagccaggctggcatcattccacagttatgtgaagaactttttgagaaaatcaatgacaactgtaatgaagaaatgtcttactctgtagaggtgagctacatggaaatttactgtgaaagagtacgagatttgctgaatccaaaaaacaagggtaatttgcgtgtgcgtgaacacccacttcttggaccctatgtggaggatctgtccaagttggcagttacttcctacacagacattgctgacctcatggatgctgggaacaaagccaggacagtggcagctacaaacatgaatgaaacaagtagccgttcccacgctgtgtttacgattgttttcacccagaagaaacacgataatgagaccaacctttccactgagaaggtcagtaaaatcagcttggtggatctagcaggaagtgaacgagctgattcaactggtgccaaagggactcgattaaaggaaggagcaaatattaataagtctcttacaactttgggcaaagtcatttcagccttggccgaggtgagtaaaaagaagaagaaaacagattttattccctacagggattctgtacttacttggctccttcgagaaaatttaggtggcaattctcggactgcaatggttgctgctctgagccccgcggatatcaactacgatgagactttgagcactctgagatatgcagatcgtgcaaaacaaattaaatgcaatgctgttatcaatgaggaccccaatgccaaactggttcgtgaattaaaggaggaggtgacacggctgaaggaccttcttcgtgctcagggcctgggagatattattgatacatccatggggtccctcacttcatccccatcttcctgctcactcagtagtcaggtgggcttgacgtctgtgaccagtattcaagagaggatcatgtctacacctggaggagaggaagctattgaacgtttaaaggaatcagagaagatcattgctgagttgaatgaaacttgggaagagaagcttcgtaaaacagaggccatcagaatggagagagaggctttgttggctgagatgggagttgccattcgggaagatggaggaaccctaggggttttctcacctaaaaagaccccacatcttgttaacctcaatgaagacccactaatgtctgagtgcctactttattacatcaaagatggaattacaagggttggccaagcagatgctgagcggcgccaggacatagtgctgagcggggctcacattaaagaagagcattgtatcttccggagtgagagaagcaacagcggggaagttatcgtgaccttagagccctgtgagcgctcagaaacctacgtaaatggcaagagggtgtcccagcctgttcagctgcgctcaggaaaccgtatcatcatgggtaaaaaccatgttttccgctttaaccacccggaacaagcacgagctgagcgagagaagactccttctgctgagaccccctctgagcctgtggactggacatttgcccagagggagcttctggaaaaacaaggaattgatatgaaacaagagatggagaaaaggctacaggaaatggagatcttatacaaaaaggagaaggaagaagcagatcttcttttggagcagcagagactggacgcggattctgatagcggggacgattctgacaagaggtcgtgtgaagagagctggaaactgattacttctctgagagaaaagctacctcccagcaagttgcaaaccattgttaaaaaatgtggcctcccaagcagtgggaagaaacgtgaaccaattaaaatgtatcagataccccaaagaaggcgcttgagtaaagattccaagtgggtcacaatctcagatcttaaaattcaggctgtcaaagagatttgctatgaggttgctctcaatgacttcaggcacagtcggcaggagattgaagccctggccattgtcaagatgaaggagctttgtgccatgtatggcaagaaagaccccaatgagcgggactcctggagggcagtggccagggacgtctgggataccgtcggtgttggggatgagaagatcgaagacgtcatggccactgggaaaggcagcactgatgtagatgacctcaaggttcatatagacaagctggaagatattttgcaagaagtcaaaaagcaaaataacatgaaagacgaggagataaaagtcttaagaaataaaatgctcaaaatggaaaaagtcttgccactgatcggatctcaggaacagaaaagcccaggaagccacaaagcaaaggagcctgttggtgctggtgttagtagcacctctgagaataatgtaagtaaaggagacaatggagaacttgcaaaagaagaacgtgtttcccagctgatgaatggggatccagcttttagacgtggacgtctgcgctggatgaggcaagagcaaattcggtttaagaacttgcaacagcaggagataacaaagcagcttcgtcggcagaatgtacctcataggttcatccctcctgagaaccggaagccccgcttcccctttaagagcaaccctaaacacagaaactcttggagtcctgggacacatatcatcataacagaagatgaggttatagagcttaggattccaaaagacgatgaagcaaggaaagggaataaagaagagagccaagaaaaagggggtaaaggagcttttaaggatccccagtttccatggggctctcaaggaatgagaagtcaagatcacatccaagttagcaagcagcacattaataatcagcaacagccacctcaactacgttggagaagcaattctctcaataatggccagccgaaaagtacgcgctgccaggcatctgcctccgcggagtcattaaactcccacagtggtcaccccactgctgatgtacagactttccaggcaaagcgccatattcatcaacaccgtcagtcttactgtaattataacactggaggtcagttagagggcaatgcagccacttcctatcagaagcagactgacaaacccagccactgtagccagtttgtgacacctccgcggatgaggagacagttctcagcacccaatctcaaagctggtcgagaaaccacagtataaatcagttactggacaaacttgaaatcatggtggaagaaacagacagtgttagctcatgatttgatttggttctacctttggccttgagttcttattatttacattataaatattaactggttttatattgttaagacaaaacactggtaaaagtttcaacacctcccttttgcttgtataccataaatgggcagtttctgaaattttggataaagcatcaagaactcctttttctgaaacgttcctccttttttagtgcctaattaatatacttacttacacagacttgtcccatcttgatgtaagtttgttatgtttttataatgcctataaattaatctgacatccagaaagacctgcctcttagtttatgcagacattcaaaaggagaatttgataagcagaattaaatgtctgttattcataaatgttagaaattggtttaaaaataataacatgcaactgggtgggcacagctttggatttctcatccacgtctgttcccttctttaaatatgattagaattttcgtaagccaaaactaaaggtcttcaaacatatcttgcaatacatagctttgcatcttccacacaacttccacgtcttcttttattctgtattttacaaaaaactcatataatggttttttcttttgaatgtatcagaatatgtatgaaatttgtcatatcagaatctataaattggcactgtgtctgggattctgtttgtggtttgcattttgaagttcaatgtatcatttgacacacatgcacacaaagtgaactattcaccaaaatcatgccaacagaaataccaacaaaaaacttgtgtagcttgtaaggaggttatttggcttgagagggaagaggtgggacagacatgggggacaaagctacagcatatggctctgtggtgctgcttttttccaatagttgatgaaatagtgaaataaaagttaactttggttgggcttggaataaaggagatgatacataataaactattctttggttagcattagtaatgcttgtagacactcaaacaaggaaggcgaagtcctgatgatgatttattgtatcaatacctcattttatttggttgtggtctcagtttgcctcactggagaatccactaagaaagatggattttaatgggaagaaaagaattattttctacatcgttcctcatctcttgagtttgtcaaaaagttttctaagaggcagtgtgaagagccagagatgtccgaaattgcctgacttcatgttttggaagattcctaagtcacatgaaatcatctatcaaacacttgtcttccaaacggtgtgaaaaactacagccaagatagcagttagcattcaaggaagccttaaagattgtgattatgtttttttttcctttgcgtgtgggcactatgctttattagaacacattatttttaatcatagtattttttctttgcctctaagaaaatactttcttaatgctcagaaagttgcttccaattaatgtttttttccccttaaaaagagaagctttgagagatatttttgctttcatagctagaacagttgaagtcttcaactgaggttttatagcagattagacatgggtaaatgatgtctgtaatgggttgagttactgagatgacaatctcctgtgccatttggtttgaatgtacttgataggctgcttcaaatcagtcacttcaatgcattttgtgtaaacccagttgtccttttttattcctctttagacataaatgtgctaactattcctttctatacacaatttattttctaagattaaaaataataattgctaggtttggtggcacatgcgtacagccccagctacttaggaggctgaagcaggaggatccctagagcccaggagttctgggctgtggtacactatgccagttgggtgtaagtttggcatcaatatggtgatgtccctgaagcaggaaaccacaaacttgcatcaggacgggtgaacccagcccaggttggaaatggagcaggccaaaactcccaggctgatcagtaatgggatcttgcctatgaatagccagtgcactgcagccaggacaacagagtgagaacctgtctttaaaaaaaaaaaaaaaaaaaaaaaaaaaggtaatatttattatattattcaggtttcaactctgtagcaaaaatgggctctcatttccctaacttgagataacatagggtaggtccatatattttcattcttacagtggtcttttcatgggagtgaatgagttactctccactggtgattaggtaatactgtagaatgaagagttgtataatatattcatttacagctgtggattgtggtaaggactatgtccacagtgatattccaaagaattgggtttatatttgtgcttcatctgttaatcccaggtgtcctcatgttgctgaaatatttagatagctaaaatatcccttaatttcacagatgaccaggaagaaattaaccaaggttttattgactgccatgtatgtcccatgatgcatttctgagcaaatgcttatcctagagaataactctgtatgaataaaattgcttaattgagtctcttactaaataagtaactagtgccatgcttttgtgagctcttggtatggcccatattactttgttttttgtttttgttattgttgttttgtgatagtcttgctctgtcgcccaggctgcagtgcagtggcacaatctcagctcactgcaacctctgcctcctgggttcaagcaattctcctgtctcagcctcctgggtagctgggactacaggtgcatgccaccatgcctggctaacttttgtatttttagtagagacagggtttcaccacgttggtcaggctggtctcgaattcctaacctcaggtgatccacctgccttggcctcccaaagtgctgagattacaggcgtgagccaccgcgcctggcctgtttgtttttttaacatgatttttctctaagcttaaataccacaaggccaaagagaaatggtcataatttaaaccattattatattgttgaggtatccctagctattattatagcaaagtgggaaaaaagtgtttattctattgaagttatgtaatgatccgacattaatgggaatatagaggagtcctaattaattggtataatttcacaaagcggaatggtattccttggagagttaaagacattctctttagtaagtgtaaaccaaagggcattttctttattcctgcttctaattccttctagcccagtgaattatttctcttttcactggtaatgtgatgaatgggaattgtttattacattgaagtgacttgaagtgaccttttgtgctttaggtgcaggttgacactgaaaaaaaaacaaaacactgaatttttcacacctatgtctgcattaaaggctgttttactaccggaagttacatagacttcctgcagtcagctgctgtgccccagtgccttactggtcctttgtagatttgccttaatgatttgtacaaatgactgggaggcggggatgctgcctgtgtcctggtgaaccttaatgaaggggccgtcttaggcacagtgcaaaacaagcatttgtcctgtactgttagagccaaaattgtgatgagcaatactgataattgtccagtttatgtcatctttcccagattttaaaatctgttctagatattcttagcttgaaccacttttgattgtgaaatgtattaggtgttgtcccattattactgtaaaatgaagttttgaatcttcttgttaataaactgtggatttcccctctcaatttcttaaacaacaacaaaaaaatgcttgaagattgtctttgagtgtaagatctgccttttcagaaagggagtgttagtttgtaatgttaaaaaataaagacctcattcaataaaagttgaagtcatcttttaaaaaaaaaaaaaaaaaa

SEQ ID NO: 3429 - DNA, 2346 bp, Homo Sapiens
  NM_183425
gcagcgccggtcgggagcgcagcgcggcgcagctcggcgcgcacggcgggagcggcgcgcgagtggtcgggcctggcggctggacgggcgcccctcgctgccccgcgcgctccccgccgccccccatgagcgcagccccgcgcggcccgggtccgtaggcggcggggcgccccccatgctgctgcagcccgcgccgtgcgccccgagcgcgggcttcccgcggcccctggccgcccccggcgccatgcacggctcgcagaaggacaccacgttcaccaagatcttcgtgggcggcctgccgtaccacactaccgacgcctcgctcaggaagtacttcgagggcttcggcgacatcgaggaggccgtggtcatcaccgaccgccagacgggcaagtcccgcggctacggcttcgtgaccatggccgaccgggcggcagctgagagggcttgcaaagacccgaaccccatcatcgacggccgcaaggccaacgtgaacctggcatatctgggcgccaagccgcggagcctccagacgggctgaccccgcactacatctacccaccagccatcgtgcagcccagcgtggtgatcccagccgcccctgtcccgtcgctgtcctcgccctacattgagtacacgccggccagcccggcctacgcccagtacccaccggccacctatgaccagtacccatacgccgcctcgcctgccacggctgccagcttcgtgggctacagctaccctgccgccgtgccccaggccctctcagccgcagcacccgcgggcaccactttcgtgcagtaccaggcgccgcagctgcagcctgacaggatgcagtgaggggcgttcctgccccgaggactgtggcattgtcaccttcacagcagacagagctgccaggccatgatgggctggcgacagcccggctgagcttcagtgaggtgccaccagcacccgtgcctccgaagaccgctcgggcattccgcctgcgccctgggacagcggagagacggcttctctttaatctaggtcccattgtgtcttgagggaggactttaagaatgactgagaactatttaaagacgcaatcccaggttccttgcacaccatggcagcctctccttgcaccttctcctgcctctccacactccaggttccctcaggcttgtgtccccactgctgcatcgtggcggggtgtcacagaccctctgcagcccctggctgccctggactgtgcagagatgcctgactccagggaaacctgaaagcaagaagttaatggactgtttattgtaacttgatcctcccgagctgtgagcgcagtctgaggtgtgaggacacggcctcctgttggagtcccattttctccatcagggcacgtgggcggcttcctcaagcccggaggagctcccaggcgcacaggggccgccggtaacaggggccgccggccaaaggcccctttccagtcatagcactgaagttgcaacttttttcttgtaattgttttgctactaagataatttcagaagttcagtctattttttcagcggatactgccgccaccaagaatccaaaacctatttttgacttggagagacttgcttttgttggttccgcccgtggagacgacgatagtgtttctgtataataaagtgtctgccggctcgcgggccaggatcctctcggtgggatgggcaccacagacaggaggcccctcaggcccgtgcgggccactgtctgctgccgcctgccggggtggcagagtgagttgtctcaggaccccgtcactgcgacgttgacactcctctcccttcccttcctccccaactccccaaacactgtggaaggggagaaggaagtgatccacagcattcaggccacttggggtctagaccatggtggtgccagcctggggggggcagtggccctcagctctgcccgctggagcggttgagtgcagaagggtgcgcctcttccctctacccccgcaccacctgctgtgtgccagcctgagacggttcctgcctgtcttgggggttggtggagggtggaggcagttctgccagccgtggcagggctgctatggggcatccagggctgtgggggtctggaggaggggacatgaggtgagaggtatcctggccgagggcggggggcagcggggggtctccctccggacctacctcagggagctgagcgtgcaggcgctccagggcaggcctgggacagagtcaaggctcagagaataaaggtagctaatctcatcataatatttttattagaatgttctgatgataaaaataaaacttgttttctttaaagaaaaaaaaaaaaaaaaaaaaaaaa

SEQ ID NO: 3430 - DNA, 1572 bp, Homo Sapiens
  NM_184041
gtggtgcctttaaaaggccgggcgccgccttccgcctgcccgcctcctgcgccgccccttccgaggctaaatcggctgcgttcctctcggaacgcgccgcagaaggggtcctggtgacgagtcccgcgttctctccttgaatccactcgccagcccgccgccctctgccgccgcaccctgcacacccgcccctctcctgtgccaggaacttgctactaccagcaccatgccctaccaatatccagcactgaccccggagcagaagaaggagctgtctgacatcgctcaccgcatcgtggcacctggcaagggcatcctggctgcagatgagtccactgggagcattgccaagcggctgcagtccattggcaccgagaacaccgaggagaaccggcgcttctaccgccagctgctgctgacagctgacgaccgcgtgaacccctgcattgggggtgtcatcctcttccatgagacactctaccagaaggcggatgatgggcgtcccttcccccaagttatcaaatccaagggcggtgttgtgggcatcaaggtagacaagggcgtggtccccctggcagggacaaatggcgagactaccacccaagggttggatgggctgtctgagcgctgtgcccagtacaagaaggacggagctgacttcgccaagtggcgttgtgtgctgaagattggggaacacaccccctcagccctcgccatcatggaaaatgccaatgttctggcccgttatgccagtatctgccagcagaatggcattgtgcccatcgtggagcctgagatcctccctgatggggaccatgacttgaagcgctgccagtatgtgaccgagaaggtgctggctgctgtctacaaggctctgagtgaccaccacatctacctggaaggcaccttgctgaagcccaacatggtcaccccaggccatgcttgcactcagaagttttctcatgaggagattgccatggcgaccgtcacagcgctgcgccgcacagtgccccccgctgtcactgggatcaccttcctgtctggaggccagagtgaggaggaggcgtccatcaacctcaatgccattaacaagtgccccctgctgaagccctgggccctgaccttctcctacggccgagccctgcaggcctctgccctgaaggcctggggcgggaagaaggagaacctgaaggctgcgcaggaggagtatgtcaagcgagccctggccaacagccttgcctgtcaaggaaagtacactccgagcggtcaggctggggctgctgccagcgagtccctcttcgtctctaaccacgcctattaagcggaggtgttcccaggctgcccccaacactccaggccctgccccctcccactcttgaagaggaggccgcctcctcggggctccaggctggcttgcccgcgctctttcttccctcgtgacagtggtgtgtggtgtcgtctgtgaatgctaagtccatcaccctttccggcacactgccaaataaacagctatttaagggggaaaaaaaaaaaaaaaaaaaaaaaaaaaaaaaaaaaaaaaaaaaaaaaaaa

SEQ ID NO: 3431 - DNA, 1594 bp, Homo Sapiens
  NM_184043
cttaaaaaaaaccagggctccagagaatcagaacagccaccatcaccgcagggagtcaagggaggagggagattagagaaggagccagggagggtggcagggaggccacgtgatccgagtcccctcacccctttccttcccacaggtccctggccaaagatttatttctcttgacaaccaagggcctccgtctggatttccaaggaagaatttcctctgaagcaccggaacttgctactaccagcaccatgccctaccaatatccagcactgaccccggagcagaagaaggagctgtctgacatcgctcaccgcatcgtggcacctggcaagggcatcctggctgcagatgagtccactgggagcattgccaagcggctgcagtccattggcaccgagaacaccgaggagaaccggcgcttctaccgccagctgctgctgacagctgacgaccgcgtgaacccctgcattgggggtgtcatcctcttccatgagacactctaccagaaggcggatgatgggcgtcccttcccccaagttatcaaatccaagggcggtgttgtgggcatcaaggtagacaagggcgtggtccccctggcagggacaaatggcgagactaccacccaagggttggatgggctgtctgagcgctgtgcccagtacaagaaggacggagctgacttcgccaagtggcgttgtgtgctgaagattggggaacacaccccctcagccctcgccatcatggaaaatgccaatgttctggcccgttatgccagtatctgccagcagaatggcattgtgcccatcgtggagcctgagatcctccctgatggggaccatgacttgaagcgctgccagtatgtgaccgagaaggtgctggctgctgtctacaaggctctgagtgaccaccacatctacctggaaggcaccttgctgaagcccaacatggtcaccccaggccatgcttgcactcagaagttttctcatgaggagattgccatggcgaccgtcacagcgctgcgccgcacagtgccccccgctgtcactgggatcaccttcctgtctggaggccagagtgaggaggaggcgtccatcaacctcaatgccattaacaagtgccccctgctgaagccctgggccctgaccttctcctacggccgagccctgcaggcctctgccctgaaggcctggggcgggaagaaggagaacctgaaggctgcgcaggaggagtatgtcaagcgagccctggccaacagccttgcctgtcaaggaaagtacactccgagcggtcaggctggggctgctgccagcgagtccctcttcgtctctaaccacgcctattaagcggaggtgttcccaggctgcccccaacactccaggccctgccccctcccactcttgaagaggaggccgcctcctcggggctccaggctggcttgcccgcgctctttcttccctcgtgacagtggtgtgtggtgtcgtctgtgaatgctaagtccatcaccctttccggcacactgccaaataaacagctatttaagggggaaaaaaaaaaaaaaaaaaaaaaaaaaaaaaaaaaaaaaaaaaaaaaaaaa

SEQ ID NO: 3432 - DNA, 7455 bp, Homo Sapiens
  NM_194071
ctgggtcctggagcagagccgaggagccctggggtccctcaaagtttgtgtctggagccgtagcggcaagtgggcttgcggctaagggattttcctgggatgagagcgggtcttctgccttcattttggatgcacatcccgctttagccccggcagcctttggtccggctcgtgtccctggggattctcggatctccgaggacaccggacgggagcgcttggccatcctctctccggcagaggagcagacgtttgctttccaagtgcaaaactacagacacgcgcgcgcacacacgcaagcacacgcggagagagaggaaccttgccggtccgaggcagctctgcgcgtcccctcctgcgcttagcatcctcggcccagcgcggcccgcaccgccatggaggtgctggagagcggggagcagggcgtgctgcagtgggaccgcaagctgagcgagctgtcagagcccggggacggcgaggccctcatgtaccacacgcacttctcagaacttctggatgagttttcccagaacgtcttgggtcagctcctgaatgatcctttcctctcagagaagagtgtgtcaatggaggtggaaccttccccgacgtccccggcgcctctcatccaggctgagcacagctactccctgtgcgaggagcctcgggcccagtcgcccttcacccacattaccaccagtgacagcttcaatgacgatgaggtggaaagtgagaaatggtacctgtctacagacttcccttcaacatccatcaagacagagccagttacagacgaaccacccccaggactcgttccgtctgtcactctgaccatcacagccatctccaccccgttggaaaaggaggaacctcctctggaaatgaacactggggttgattcctcgtgccagaccattattcctaaaattaagctggagcctcatgaagtggatcagtttctaaacttctctcctaaagaagccccagtggaccacctgcatttgccgcccacccctccgagcagtcacggcagtgactcagagggcagcctgagtcccaacccacgcctgcaccccttcagcctgcctcagacccacagcccctccagagctgcaccccgggccccctccgccctctccagctcccctctcctcacggctcctcataaactgcagggatcaggccctctggtcctgacagaggaggagaagaggaccctgatcgctgagggctatcccatccccaccaaattgcccctgtcaaaatcagaggagaaggccctgaagaaaattcggaggaagatcaagaataagatttctgctcaggaaagtaggagaaagaagaaagaatacatggacagcctggagaaaaaagtggagtcttgttcaactgagaacttggagcttcggaagaaggtagaggttctagagaacactaataggactctccttcagcaactccagaagcttcagactttggtgatgggcaaggtttctcgaacctgcaagttagctggcacgcagactggcacctgcctcatggttgtggtgctgtgctttgccgttgcattcggcagcttctttcaaggctacgggccctatccttctgccaccaagatggctctgcccagccagcattccctgcaggagccctacacagcctccgtggtgagatccagaaacctgctgatctacgaggaacattctcccccagaggagtcatccagcccgggctcggctggggagctggggggctgggatagaggttcctccctgctcagggtgtcagggctggagtccaggccggatgtggatcttccccatttcattatctcgaatgagaccagcctggagaagtcagtgcttttggagctgcagcagcacctggtcagcgccaaactggaggggaatgaaacactaaaagttgtagaactcgacagaagagtgaacaccactttctaaagaggctgcctgcaccccctccctttcccttaactctacttttacatccccaaaccacctttgtcatcagcttttcctctttgccactggatcttcatggagacatgggcaagcattagtggcttcagattggagaccagcctgggacttccctgcagtgagagagcatctccccctggtccatgcccctcctgtgcagaagggagcctgcatccctcccttcctttctcttactgccataggaaattattttaggggttggaggtgggacaagcaggcttgtttccaccaatagtgccaaaaagatattgcctaatgtgcacctgtgaggtgtaaccccccgctttggagacgagatggctcttgttcagtcaagaccccagactctggccacaaaaatgccataatgcctgttggtatttggcaaagcactgacccgtgtcctccgttgctcgcactggggtctctggtgtgaacacccccgacagcagccctccgcccactctgccccctgggagccctcgctggatcgtctcgtctcctgcagcagcactggcaggcgagggctctcgttcatattctcaggccgcaagtgcaatgcctgaggggatcaggcttttctactccaggcaaacctgccccatcttgtcgcttttaggacctcccacaacctggttccccacacatccatagttctgcctccccagcttctcctccccagttgtaaatagtatttattagcttgccgaggcttcctgctagcaaccacactgaagagatcgatgcctcctttcaagctagccaagttttctgcgagccttcagagctaggagggcaccctaggctctgggatcccgtgtctttccagacaatgttttgtttcctttcctttgttttttcttttaactggaataattaccattgaaaaagaagttcctttgagcatgtatgtgtctgcctctaggatgagctcagagcgagagatgacacaatgcctcactcaggccccgggctccctggccacaagctttttctatcctgttttcatgacagagaaggggaagccctgttctgacaacagacatttcagacaaccttgctggctttccacacctgcctggccccctcctccctccacacttccactttgtcctcctcgtcccctacctcaacaaagcagggtggggtaggtgacatttgtgtatccacattcttacctttggtagtcaggtttggctactttgcagctcgcccaaagagatacaacctaatccccaacctacttttagtttttttgttttttttttatggttaaaagtaacttttgtagtttaaaaaaatctttcctctttcatataaataagaagtggaaattgcctttttattgtgtaatgtagaaaaccctcaagtgttttttccgagcttgggaaagattttgtgtaggaaatgtgcatagagtttgtattttatttttattagcagctgaaatgcctttggttttggcttctctctctccctctctctctctgtctctccttctctctctccccccaccacccacccccacacacgtcatctgcattgttattggagcctgtacttagagggattaagcccacaccctggcttccattccatatcaggtacaggatttgatgttattaacatttgtcgtcatacctcataagtcggtccctgccttgtctgtctaggcccatttggggctccctgtgagtgattcccctctctctgctatgctggagacggttccagcctggaaagcggccaagttcatcttctcactgtgagtggaagctggatcgggcccccgtagtcctggcagccctgttgtctggagggttcttgttgtccctcccattagccagggcggagactgtctgagctgtgcaggaggagggttgctagtaggttctgcttctgcttctctctgctccactgtctgcagcccagatcctgttgggcctggctggtgtctggtaaccatgggcctccactgacccatccctctcttttaaactgtcaggtcattatcaggcataggcagcctatagggcccaaagaaggcaaaaagataagatttactcaagtagcatttgggcaatgaggaaggaaaggtttcaaatttaggggcagaagtgagagaatgagccaacccatgtacctgctgcaactgaaccagactgggttttcaaggctcccagacgtagagtaggaaacgtgctcttctaaatgaggagggagaagataaaggaaacttctagcccctgtccttagtgctttgaggattttattttctcccttactacgcttgcttgacgtcactctctctcgacctccaaacagcaggactctttctctgggaaaccatccttccaaaacggaatctatgtagacaatgggacgttaggcagagagctcagatggcccttttaagggggctccaagaaccaacatcactgctcttttagataaacctctgccctccactccttgcttgagtgggttaaaggaactaacagttgtccctttaggaggacaaaatggggtcaagaggacacagaagagttgtatagcaccagattggttccaaatagttaatggatgtgtgcacattttctgttcagggattaagaccagaatatcagtggatttgttttccccaccaagtggcctcttagactagtcattaacttatgattagctctaaagatttcaaatagtggcagacagtgtcttctgaatgtaagttttgagaaatacgagtctgtcagagcggccataagccataaagagtcaatctcttaattatatttttcatcatgtaaacaagtttcccatttccctttcttagattgcaccagtgaaggagatgttttgcaaagattcagagaactaatttttcactggataagacctgagtaacccagaccccccaccgtggttcttttcacagccctcgactttgcacttaaaaagggatattgtaaatgaaaggctgcagtgccagttttaagaaagaatttctgtgaagtgtgaggactctggagtctagctcacataaagagagtgttatataaaaatccgacagctgaactaggttgctcttttttggcagggagtggggatgagatttgacaccaatatgggcaaaattagataaccttttggttaatataaatgattttgatttggaggcctaatttgtagattgtgaaagcagcttttagtttaacttattcacagaccccttataattaccatgtttttttttttcttcctaaatctcttggttcagcttgtgaatcttacgtgcccgtaaagttgggatgttgaattggctcttctttgttctggcagtgagtcaagtgtccagcattttttcataagtgttttttaaaattgttctccagcattttatggctcctccctcccatgtcctcagacccagcaaaagcgtagaggcagaattagaggcctctccaggccagctcctctgcccacatgtcatacaaggtgtgaatttgagcacagtccagaaatggagacatcccacccccagttgaataatggcccattcatgccaaccttgccaacacggagagggcagagatgcactagaagaccttcatcctccccttcctctgccccaagtcactacagttggttctattgaagccagtctttaagaaacctgggttaaagacaccagcacttctgcttgctgggctggctggacctgtgaagccatgggcaggtagtgccctcttgagagtcattttatttggccaccttcaggtgagactatccatagacacatgctaggataggccccgctgggagggcagttacaggagagagtaggtggtggtgacgtgagggctgtgaaggatccagagacaagacttagatgtttcgttcattcactcactcattcagttactcctaagacttttcagtttcataaggaagagtgttgcctgaggccctagggaatattggggaatagaagggattgaggaaacattaataatagttattcaaaagacccaaatgcttatacttctctctcccttcttctctctctgacacacacacacacacacacacacacacacacacacacgtgcacattcctcccttacatgctcatttgtgccttaaatgtgccttataggtaaatccaggatgactgaggaatccctcgtcactgggagattttgtatatattcttttattattagattgagttgggtgtggggaaaaatttttttctgaaggctcaaaagtggtttcctaaaagtgagccactatcagatttgcacatcaggagaaaagaaatagggttacgtccattaggaaaatcccagtttgcaggagtgcaatcacatcaaaaaaacaaccagccaggattaaaggtattataaatcctcatagcggaacatttctcagggcaaaggaacctggctcatttgaagattaatgttccatgcctttgtggtcaaagggtcagcacttaacacaggaaaaaactaggtgttgttttgttttgttattttggacaacataaaattcaggaatgttttatttagccttggtttctagaaggaagggaaataatatttcttgagcatttactagggtgttgcgtgctgtgctaagtaaattttaagtctttcagttttatagatacggaaaacaagggtgactctttaccacaggatgaataaagaactaagtaatatgggaaatgcagcaatttctggactagctgagccgattccttcctgtgagcacactgtaagctttcaagttctctgggcaggaattacagcacctgtcccctgcaatggccctgctgtgtgatgctcatcgcttcccttcgtgctggagcagtcccccaggtgtccatctcctatctttttgttccaatcttctgtgagttccagctagcaggctttacatctggggaaaggaaaaccaggggttttagctctgttctctgctcccatccttcgctcaccagctgagtgagaacatgaactttttgcaccatgtacccatggcttacactacttagaaaatcaccttttcagataaaacagtttatgagttcatagagaacaccagcactctttgacaaaactgtgagtgaccctttttaaacaatgctgagcaggccctgagctataatcaacggtgagctttaatgtctatgctgacagttaggttttgctctcttttgtaacaggttacgtagaccagcagtgtttaaatctaaatacgttgtgagtctgttatctgtcctatcgcgttttttaaatgactttttattctttatcatagctaagtaaataccaaaaaaaaaaaaaagctttgtaggacacttgtacttagtttgggaaaaaaaaataaattgaaattgttatgcttttgtatttccatttcttgcaaataaatattttttcttaaatagtaa

SEQ ID NO: 3433 - DNA, 2839 bp, Homo Sapiens
  NM_194255
gtagtcccggagtccgcgtgcgcggggccgggtccgggagccccagggcagccgccccgccgagtcgcaggcacagcgtcaccttcgtcccctccggagctgcacgtggcctgagcaggatggtgccctccagcccagcggtggagaagcaggtgcccgtggaacctgggcctgaccccgagctccggtcctggcggcacctcgtgtgctacctttgcttctacggcttcatggcgcagatacggccaggggagagcttcatcaccccctacctcctggggcccgacaagaacttcacgcgggagcaggtcacgaacgagatcacgccggtgctgtcgtactcctacctggccgtgctggtgcccgtgttcctgctcaccgactacctgcgctacacgccggtgctgctgctgcaggggctcagcttcgtgtcggtgtggctgctgctgctgctgggccactcggtggcgcacatgcagctcatggagctcttctacagcgtcaccatggccgcgcgcatcgcctattcctcctacatcttctctctcgtgcggcccgcgcgctaccagcgtgtggccggctactcgcgcgctgcggtgctgctgggcgtgttcaccagctccgtgctgggccagctgctggtcactgtgggccgagtctccttctccacgctcaactacatctcgctggccttcctcaccttcagcgtggtcctcgccctcttcctgaagcgccccaagcgcagcctcttcttcaaccgcgacgaccgggggcggtgcgaaacctcggcttcggagctggagcgcatgaatcctggcccaggcgggaagctgggacacgccctgcgggtggcctgtggggactcagtgctggcgcggatgctgcgggagctgggggacagcctgcggcggccgcagctgcgcctgtggtccctctggtgggtcttcaactcggccggctactacctggtggtctactacgtgcacatcctgtggaacgaggtggaccccaccaccaacagtgcgcgggtctacaacggcgcggcagatgctgcctccacgctgctgggcgccatcacgtccttcgccgcgggcttcgtgaagatccgctgggcgcgctggtccaagctgctcatcgcgggcgtcacggccacgcaggcggggctggtcttccttctggcgcacacgcgccacccgagcagcatctggctgtgctatgcggccttcgtgctgttccgcggctcctaccagttcctcgtgcccatcgccacctttcagattgcatcttctctgtctaaagagctctgtgccctggtcttcggggtcaacacgttctttgccaccatcgtcaagaccatcatcactttcattgtctcggacgtgcggggcctgggcctcccggtccgcaagcagttccagttatactccgtgtacttcctgatcctgtccatcatctacttcttgggggccatgctggatggcctgcggcactgccagcggggccaccacccgcggcagcccccggcccagggcctgaggagtgccgcggaggagaaggcagcacaggcactgagcgtgcaggacaagggcctcggaggcctgcagccagcccagagcccgccgctttccccagaagacagcctgggggctgtggggccagcctccctggagcagagacagagcgacccatacctggcccaggccccggccccgcaggcagctgaattcctgagcccagtgacaaccccttccccctgcactctgtgctccgcccaagcctcaggccctgaggctgcagatgagacttgtccccagctggctgtccatcctcctggtgtcagcaagctgggtttgcagtgtcttccaagcgacggtgttcagaatgtgaaccagtgactctcgggcgcccctgtggtaactttgcaggcggccctcagtgcatccccacgacccctgcctcgagggccgcctgccttagcaatgggggcctccgcttatcctgctagcaggccccctaggattccccctgccctgtgccgcactctggcggtggccacagcgtgctggcgacactcagggcagctgcctggccatgctgtccctgcactgtgccccgcgggctttgttgctggaagaggtgggtggtgggcttctgcgtccaccaggcctcactggctcatgccccttggggggcttgagacaaatcctttctgccccccagggctagtgaagtggcctcttggataccagctcaggggacactggccccacaggagttgtgagccctctagggcagggtgggagccgggaccctcaggtgtagctgagctgtgacattgctggtcatccttggtgctcttgcttttttgaaagatgctttttttttttttaactgacgtagaatgaagaactgcatgtggcttctctgtctctgtggaaaagccatctcaggttggcggcagacacattgtcatcagaggggagcagcggctctggtcctcggagctggttcctctctcccaccctaagggcagccctccatggtcctgtctgtccttctgaagtgtgtccatcctgacctgcgggtcctcagctgctcccacacttgtgccagcccggaggggactggtcccggtcaccgcggacgtgctggccttggtatgtgccaggcttgcctgggctgggcagccttgggggggctgcctttgtggtgggcgctggggaagtacgtcccagcggcctcagggtctaaggagcgctagtgccttgcccacaggtgcgggaccatctgatgtgatgtgaatactcttcccacatacattaaacacacttaagtgaga

SEQ ID NO: 3434 - DNA, 1144 bp, Homo Sapiens
  NM_194260
cagcccgaaggggagtttacagacgctccctcacatcggggacgcggctcctttaagggcggactttgaacatgtcggggatcgccctcagcagactcgcccaggagaggaaagcatggaggaaagaccacccatttggtttcgtggctgtcccaacaaaaaatcccgatggcacgatgaacctcatgaactgggagtgcgccattccaggaaagaaagggactccgtgggaaggaggcttgtttaaactacggatgcttttcaaagatgattatccatcttcgccaccaaaatgtaaattcgaaccaccattatttcacccgaatgtgtacccttcggggacagtgtgcctgtccatcttagaggaggacaaggactggaggccagccatcacaatcaaacagatcctattaggaatacaggaacttctaaatgaaccaaatatccaagacccagctcaagcagaggcctacacgatttactgccaaaacagagtggagtacgagaaaagggtccgagcacaagccaagaagtttgcgccctcataagcagcgaccttgtggcatcgtcaaaaggaagggattggtttggcaagaacttgtttacaacatttttgcaaatctaaagttgctccatacaatgactagtcacctgggggggttgggcgggcgccatcttccattgccgccgcgggtgtgcggtctcgattcgctgaattgcccgtttccatacagggtctcttccttcggtcttttgtatttttgattgttatgtaaaactcgcttttattttaatattgatgtcagtatttcaactgctgtaaaattataaacttttatacttgggtaagtcccccaggggcgagttcctcgctctgggatgcaggcatgcttctcaccgtgcagagctgcacttggcctcagctggctgtatggaaatgcaccctccctcctgccgctcctctctagaaccttctagaacctgggctgtgctgcttttgagcctcagaccccaggtcagcatctcggttctgcgccacttcctttgtgtttatatggcgttttgtctgtgttgctgtttagagtaaataaactgtttatataaaggttttggttgcattattatcattgaaagtgagaggagg

SEQ ID NO: 3435 - DNA, 8100 bp, Homo Sapiens
  NM_194278
gatgaagtggtagagctggttcctgctcgccgcggtgccgcgcgcgccggccggccgctgggcgctccgcgctcccagcctcgagttgtgcaatcctttgtagcacgccagagtcctcctcctccgctgttgcctctcgccctctctctttttttttttttcaagctgtgagctcaaccgatgagtcagagccgtgcaatcctgacactgcatcgcaggactgggggtgacacggagggaggcagagcgctcgcgaggcggacggcacgggtgcggggcgcgccgaggctcctgcatcgcaagcggggggtgacagcccgcgcgtcccgcccgggccctgccagcaaacttctcagcctcgggaggcgcgggctggcggaagccccgcgagcgccgcggggaggcgacggcgcctgtttgtttttaaaatcgggagtgcgtgcaggcggctggagtcccggaggcgaccgaaggcggcgacccgcggcggaagggggacagccgagcccggagcccggagcccgggcaagagctgggtgccagaaccctgtggagcatcatgaactgggaagagtagctgagccccagagcctctctggaagagaaaggaagagccagcagttctttctcccagtgtccgacctcactgtccagcgtcttcctctgcccctgctctgccctccctggctcctggactagagcccggcttccagcaggacgtttccccaggggatgggcgactgttgaaggggatctcaccgccagggctcagttggccacatcatgaacctccaggcccagcccaaggctcagaacaagcggaagcgttgcctcttcgggggccaggaaccagctcccaaggagcagccccctcccctgcagcccccccagcagtccatcagagtgaaggaggagcagtacctcgggcacgagggtccaggaggggcagtctccacctctcagcctgtggaactgccccctcctagcagcctggccctgctgaactctgtggtatatgggcctgagcggacctcagcagccatgctgtcccagcaggtggcctcagtaaagtggcccaactctgtgatggctccagggcggggcccggagcgtggaggaggtgggggtgtcagtgacagcagctggcagcagcagccaggccagcctccaccccattcaacatggaactgccacagtctgtccctctacagtgcaaccaaggggagcccgcatcctggagtgggagtcccgacttactataaccaccctgaggcactgaagcgggagaaagcggggggcccacagctggaccgctatgtgcgaccaatgatgccacagaaggtgcagctggaggtagggcggccccaggcacccctgaattctttccacgcagccaagaaacccccaaaccagtcactgcccctgcaacccttccagctggcattcggccaccaggtgaaccggcaggtcttccggcagggcccaccgcccccaaacccggtggctgccttccctccacagaagcagcagcagcagcagcaaccacagcagcagcagcagcagcagcaggcagccctaccccagatgccgctctttgagaacttctattccatgccgcagcaaccctcgcagcaaccccaggactttggcctgcagccagctgggccactgggacagtcccacctggctcaccacagcatggcaccctaccccttcccccccaacccagatatgaacccagaactgcgcaaggcccttctgcaggactcagccccgcagccagcgctacctcaggtccagatccccttcccccgccgctcccgccgcctctctaaggagggtatcctgcctcccagcgccctggatggggctggcacccagcctgggcaggaggccactggcaacctgttcctacatcactggcccctgcagcagccgccacctggctccctggggcagccccatcctgaagctctgggattcccgctggagctgagggagtcgcagctactgcctgatggggagagactagcacccaatggccgggagcgagaggctcctgccatgggcagcgaggagggcatgagggcagtgagcacaggggactgtgggcaggtgctacggggcggagtgatccagagcacgcgacggaggcgccgggcatcccaggaggccaatttgctgaccctggcccagaaggctgtggagctggcctcactgcagaatgcaaaggatggcagtggttctgaagagaagcggaaaagtgtattggcctcaactaccaagtgtggggtggagttttctgagccttccttagccaccaagcgagcacgagaagacagtgggatggtacccctcatcatcccagtgtctgtgcctgtgcgaactgtggacccaactgaggcagcccaggctggaggtcttgatgaggacgggaagggtcctgaacagaaccctgctgagcacaagccatcagtcatcgtcacccgcaggcggtccacccgaatccccgggacagatgctcaagctcaggcagaggacatgaatgtcaagttggagggggagccttccgtgcggaaaccaaagcagcggcccaggcccgagcccctcatcatccccaccaaggcgggcactttcatcgcccctcccgtctactccaacatcaccccataccagagccacctgcgctctcccgtgcgcctagctgaccacccctctgagcggagctttgagctacctccctacacgccgccccccatcctcagccctgtgcgggaaggctctggcctctacttcaatgccatcatatcaaccagcaccatccctgcccctcctcccatcacgcctaagagtgcccatcgcacgctgctccggactaacagtgctgaagtaaccccgcctgtcctctctgtgatgggggaggccaccccagtgagcatcgagccacggatcaacgtgggctcccggttccaggcagaaatccccttgatgagggaccgtgccctggcagctgcagatccccacaaggctgacttggtgtggcagccatgggaggacctagagagcagccgggagaagcagaggcaagtggaagacctgctgacagccgcctgctccagcattttccctggtgctggcaccaaccaggagctggccctgcactgtctgcacgaatccagaggagacatcctggaaacgctgaataagctgctgctgaagaagcccctgcggccccacaaccatccgctggcaacttatcactacacaggctctgaccagtggaagatggccgagaggaagctgttcaacaaaggcattgccatctacaagaaggatttcttcctggtgcagaagctgatccagaccaagaccgtggcccagtgcgtggagttctactacacctacaagaagcaggtgaaaatcggccgcaatgggactctaacctttggggatgtggatacgagcgatgagaagtcggcccaggaagaggttgaagtggatattaagacttcccaaaagttcccaagggtgcctcttcccagaagagagtccccaagtgaagagaggctggagcccaagagggaggtgaaggagcccaggaaggagggggaggaggaggtgccagagatccaagagaaggaggagcaggaagaggggcgagagcgcagcaggcgggcagcggcagtcaaagccacgcagacactacaggccaatgagtcggccagtgacatcctcatcctccggagccacgagtccaacgcccctgggtctgccggtggccaggcctcggagaagccaagggaagggacagggaagtcacgaagggcactacctttttcagagaagaagaaaaaaacagagacattcagtaagacccagaatcaggagaacactttcccctgtaaaaaatgtggcaggtaaggtgggcagcgctgtccccgctgggacccccgcgggctggtgcgcggagggggcgggggtggggtggaggggagggggaagaggtacaggcggtgtccgcctcgtttctggttggctcagcgggtttctagggctgtgacgtcatggggcagctttcggaaaatgacgcgagctggccggccgcggctgtgcagcgtgggggtgaaggtgaaggctggggctcctcgcgcacccgcgctgggggcccccgggtgggctaggccggttctgagcaacccccacccggctgcagggtgttttacaaggtgaagagccgcagtgcgcatatgaagagccacgcagagcaggagaagaaggctgcagcgctgaggctgaaggagaaagaggccgctgctgccgccgccgccgcccaccagcaggccctgcgggaggagagcggtgcgggcgacaagggctgagcgcgggagccaggctggcccagtcctgggcctcggcccttcccgcaccgccgccagcgcccgcagacaccctggcatctcaagagggagtgaggagaggattgcagggacttttccctgcgaaacaaatgagacaatgacataaacggctcttttatttatgaaggccctgggagcagcgttaagggctccaggatccagctctctttgcatttggtctgtcggaagctgtcctcgtgctttcctggaccgggagagtcccggtcccctcgggagggactccaccgcctctcacactccgatttctgctgctctgctgccccgcagtcttttccctttatttgcttccccctcctcccctcggcctccaggaagccaccgtggccggccaagcacaagctcacccactttggagcagcatttctcctccccagaggacctcgaaggctgcaacggccctgccccaagccccagaaaaagaaactcttggagggagtctgcgggcttctctgagaaggggcgcagcctgacacctgtgctgtccctgcagtctctaggcctgtctgagctgctcccgtgaccgtgtcctgagtggccacctcctccttgggagggaggccgcggcaggtactctccctttgctgcttgctggcggccttgctagggctagaaagttttctcagcgttgggggaggggctagcgttcttgtccaaagcactcatcctgctgcagggaagggagctgtacggaggctggaagctgcagggttaggcccgagagagcttttgacaagcctggctcttcctgcttcccacctttttggctgaatacctttgggtcctggaggctgccaagggcgcttcgccttgagcaggtcccggagaggctcagcctgcccctcctggggccagcctccttgcctctgctctgacctcagcagctacacctaaccccaccgcaccctacccagtgtcgatatccacaacccagcccccaggcctgcactttggagatttctggatccttccctgggagggagaggtctcctaactcgattggacaggagccttcattccttgactcgtgtcatttgggagctatttatttattcttagtatttaatttttaacatcctctcagggaccaggggcctcctgcttttcagaggcccgagtgcatttatcccaaaacgaggcatcttgacatcccctatccccaccccctaaattcccaaggccctaaggtccctcacctggttgctctggaagctcttgctgataggaatgatagcaacactgaaagagcgtgggaaggtggagggtgtcaccagacccacacagagcaagggagattaaggcagttcttgctgccccttctctggctgtgctttgcctgagggaagagttggcaagaggccagaattctagtttggtttatggggcctggattctggcttgaagaagccatatttggcatgggtgaagtgaaagggccaggaggttctggaggccccttcacttccagtcccatagcggggctcagctatttttctgatcttattcaactttagttgtgcaaaagaaattctaagtgaatgcgcgtatgacaggtcaacgtattaggaaggagccagaaagtattcatactgctactccttatgagatagccaagaagcatcatgtcagtaactgggagtggagagggagttttgttttgaaactatgcaggtatttttcagcatccatttgtacattagtatggttctacaggaccccagctgtggaagtaacaaatttcttctccctccagactcttggatgactacctagatccccagcttaccggttagtttcctccacaggcttccatgagctcagtgtcccaagacagcaaaaatctggtataccctgtagaagcaggggggtagcaaatttaggctctcttcgaaattacttgtacaatacgagtgccttcgcagcttagccccaaagtgctacttatgtttcccaaggtcttttctattcaaatcatatttggtttcaggcccctttatgggcatacggtaacagaaacctccatcattcatatgagacccttttgtcagtggtaacatcttgtacttggaaaaaaaatttttttttttttttttttttttttttgagacagagtctcattctgtcgcccaggctggagtgcagtggtgtgatcttggctcactgcaacctccgcctcttgggttaaaagaattctcctgcctcagcctcctgagtagctgggattataggcacacaccaccacacccagctaatctttttgtatttttttttttagtagagacagggtttcgccatgtcggccaggctggtcttgaactcctgacctcaggtggtccacccgcctcggcctcccaaagtgctggcattacaggcgtgaaccaccgtgcctggccggaagtctttaaaaaataaagtgattctactcttctaagcttacagagaccagaccaggtgaatgtaactggggaaaatcaagatggtacctctctgcattatcccgccagacactgtattttatgcattcatgtctaggatacagtgtgaaaattaaaaagtttagagggcagatgcaattgtggcaagtgacctgccaataaagcaggtgcagctatagaagctggcataggtatatccttaatggtgctttctccctgggcttgtctttttgttgtttttttccccctatattcagagctccttgagaagtgataaacacctccagctttctaacatcctccccacaccatctcaccatatccatctcccagcatccatctgcattcagctaagggcgggaaactgacctagtgcctgtgttgcagaccatttctgaggtctccaccatccaaggaggcacagccgtcattactgtcctccatgccttcagcagcccccctcacagctaaggtacataccaccccttctgccgcgcctccacccctggcaccaaggtcttctgctgcttatgtctaaagggatcacctatatttaactgcctcagtgacctaacctctttcttctcatgtgccagatgttaagatgaaggaggaatacaacacatactcaagcctcagcctgtttagttgttttcactggggctcgcttttctgggacggtatttattatcagactggcaagcctaactccataggtttacaggaagtagggatatttttataaaacaattgtgtcctccccacattttgctatgttaatatttgcttctaacaatttgcagctgtttcactttttcctcatttgtctctaagttgaaggctttgttggaggggacagagcacaggaacagccttgacagtctgtaattattgtacagatattttaatagcatataaataagtatattccttttattttgaaacaaaaatgatcagacactgccttttgtgtgtttgctgcctgtggcatccttttttaaaaagactgttacatattaaaatagtgtacatatataaatattacctcttttgctgtacagttgtgatagagactgaagattttattttttgtgtgctttttataagaaaaaaattaatacactaaagaatcttgctgatgtgattgtaatgtacctatgtaacttatttacttttgaatgttcttctgtatctttaaaccttttattaaataaggttttaaaaattca

SEQ ID NO: 3436 - DNA, 1061 bp, Homo Sapiens
  NM_194279
acgcgaggggcggagcttgtggaggaagatggctgccgcctgggggtcgtccctaacggccgcgacgcagagagcggtcactccctggccgaggggcaggctcctcacggcctccctgggaccccaggcgcgtcgggaggcgtcgtcctccagccccgaggccggcgaagggcagatccgcctcacagacagttgcgtccagaggcttttggaaatcaccgaagggtcagaattcctcaggctgcaagtggagggaggtggatgctccggattccaatacaaattttcactggatacagttatcaaccccgacgacagggtatttgaacagggtggggcaagagtggtggttgactctgatagcttggccttcgtgaaaggggcccaggtggacttcagccaagaactgatccgaagctcatttcaagtgttgaacaatcctcaagcacagcaaggctgctcctgtgggtcatctttctctatcaaactttgatgtgatgactggtgactctgggattgtcaccagttgtaccaatttgaagaacctggaattagtagaattctagaagtttacttctaatcatgtccctctcaattttatttcccgcagtccaggagtgttatgttttgccactattattttcagaatgtgaagattttactcttggcttaatttttccctccactcagtgctaaggctgagcctccagatgctgttacctcagatttaatcactggttgaaactccgtataatctgtagagcctccatggctctaaaatttggaattaacttctcttgccttaagagctgcttgtacatatgtggatagctatgtataaaagcttcattttaaagaaggttcttattgtgttgtggatcagggtcacagattgggtagcttggacaccagttattagaggatgagaaaagtaaatgaaatgttctctttttcacttcaccctgccagaatgtgccacttgacttatctttattgtctatgcaacccatttgccacttcctgtttgataggacagatacattttactctcatgctcgtgg

SEQ ID NO: 3437 - DNA, 6218 bp, Homo Sapiens
  NM_194283
gcgctcccgcttgccgcagcctgcgtcgtctgccgccaccgcgcgccttcactgacctacaccaccgccgccgccgccgccgccgccgggctcgctggctggcccggtgcgggcggcggactcccgccggagaggactgccagcgccgccgccgccgccgcttcggcccgggcccgggccccgaccccgtcccgggccccagcgccggccgcccgcccggtcgggcgatgaagtgtcactatgaggcgctgggggtgcggcgcgacgccagcgaggaggagctcaagaaggcctatcggaagctggccctgaaatggcacccggataaaaatctggataatgccgcagaagcagctgaacaatttaaattaatccaagcagcatatgatgtgttgagtgaccctcaggaaagagcatggtatgataatcatagagaggccctacttaaaggtgggtttgatggcgaatatcaagatgacagcttagatttgctacgctatttcaccgttacctgttattctggttatggagatgatgaaaagggattttacacggtgtatcgtaatgtttttgaaatgattgccaaggaagaactagaatctgtgttagaggaagaggttgatgatttcccaacttttggagactcccagagtgactatgatacggtagtccatcctttctacgcttattggcagagtttctgcactcaaaagaattttgcatggaaggaagaatatgatacacgacaggcttcaaaccgctgggaaaaacgagccatggaaaaagaaaacaaaaagattcgggacaaagcaaggaaagagaagaatgagcttgtccgtcagctggtagctttcattcgtaaaagagataaaagagtgcaggcgcatcgaaaacttgtggaagaacagaatgcagagaaggcgaggaaagccgaagagatgaggcggcagcagaagctaaagcaggccaaactggtggagcagtacagagaacagagctggatgactatggccaatttggagaaagagctccaggagatggaggcacggtacgagaaggagtttggagatggatcggatgaaaatgaaatggaagaacatgaactcaaagatgaggaggatggtaaagacagtgatgaggccgaggacgctgagctctatgatgacctttactgcccagcatgtgacaaatcgttcaagacagaaaaggccatgaagaatcacgagaagtcaaagaagcatcgggaaatggtggccttgctaaaacaacagctggaggaggaagaagaaaatttttcaagacctcaaattgatgaaaatccattagatgacaattctgaggaagaaatggaagatgcaccaaaacaaaagctttctaaaaaacagaagaaaaagaaacagaaaccagcacaggatgtacctggcaaagattcatatctgcctgcagctcactttcagatggcttggggaaaaaagtgtgtgttgggagagagaagagatggagagagcgagcacaaatgtgccaaaatgttgcttgaaaacagacagaattatgatgacaatttcaatgtaaatggacctggagaaggagtaaaggttgatccagaagatactaacttaaatcaagacagtgccaaagaattggaagatagtccccaggaaaatgtcagtgtcacagagatcattaaaccatgtgatgatccaaaaagtgaagctaaaagtgttcctaaacccaaaggaaagaaaaccaaagatatgaaaaaacctgtcagagtacctgctgaaccacaaacaatgagtgttcttatcagctgtacaacctgccatagtgaatttccatctcggaataaactttttgaccatctaaaggccacaggtcatgcaagagcaccttcatcatcgtctttaaacagcgcaacaagtagtcaaagcaagaaagagaaacgtaaaaacagatagagattctgcctgtgcttttgtttgactgtctctagattttgaaaccaaaaaactgaactgaaatcatctaaagagttaaaatttcagtgatctgcaattaattacattgtggaagattattttttatcttgtaaaaacacttttttggtttaatatatatttttaaaacatttcactagtgattgaattctacttttgccatctgaattgacttgaatgtcttaaaacaggtaaatactgtaaagtgtgtattcttgatgtttattggctcatgtggacagaaatgtacagggagaattacattattttaacacacagaagtgcaactttctgctttattttctgaatttcacattacttttacttaatgcttttgtgttttgttaatacttcataatatgtgaaaaactcggatcttttaaaaagcatcatagatcatttttccatatgacactggttccgattttaaaaattatttttaaataaccgattattgattactgtattttttttctcaagaacagtgataggtagaaactaattgaacatttggtagtctttcaagaatagtgtctcttcaaggttttacttgatttaatttgatattttactggtttaccagtaaggtgtattgttcagttttttgctccgatttgaattgtggaggtggaagcaaattagtttacatggcatgtcctccctaggcacagtgacagctgtaaagtatgacggaacaaggtagcagatggtacagaatttatactatttaagaagagatgtggtgttcttcattgagtttttttcttcactattttcagaagtttttgttcttttttttttttccatcactcagtggagaaaagctttgttaatgaaagattttgtgatagagctgatgcttatacatctattctataacagtgatgaatattaacacaaaggaaatatggagaactgttataactgagtgttagaacagtcgtgtacattgatcagtattgagtccatttttaggatggattagtcagttcttttcattggtcttgaaagtaattttggctggtcgcggtggctcacgcctgtaatcccagcactttgggaggccgaggcgggcggatcacgaggtcaggagatcgagaccatcccggctaaaacggtgaaaccccgtctctactaaaaatacaaaaaattagccgggcgtagtggcgggcgcctgtagtcccagctacttgggaggctgaggcaggagaatggcgtgaacccgggaggcggagcttgcagtgagccgagatcccgccactgcactccagcctgggcgacagagcgagactccgtctcaaaaaaaaaaaaaaaaaaaaaaagaaagtaattttaaactcactggcttgaaatgtgtgctttctgtacaatgaagttattgctttccatatatccttgaatcttcagattaacgaaatgaacaaattttcggttacagatcagctctcaaacactaaagtccttaatggcaaggtcttttctgatagcttcatggatagtattgatgatcagatttcttctgtgttattgtcttaaaaataagcatttgaaccttaatttaaattcttttcttttccatttagagatatgtttttttctttaccttcatacctttctatttcttgctaatttctatcactaattccttataattgtccctgctccccttcttgatctcttcagggggaatactaggcagttttgtatcttctgatctcgtaccctgagacttcatctgaatgtgctctgccgccttcttatctgaactagatgaattggccataattatgaataggaatattaatgaaccagaggacatactagtcacatgttattatacactaaaaaataggaagtcatcttgaaaggcagttaatgtactgcaaatgtccctatgacttctttgctttctcttataccaaacatgcaggtatttaatttgtttaatgagggttgagtggagttatgtgtcgcttttattcggattgacgaaaatcaaccataattttcaagggatcttcatgggttgtgactggaagctgaccttagtcttgcgtctcatcctttatgatgttgagaaatcatctaatttctcagaactttttcttatctctaacacagttattaccataataatattgtctccatttatcatacaggatcattatgaaagtaaaatgaagtagtatatatgaaaatgctttttaaacacaaaagctttatacaaaatattgttgaatttaaataaggtaaatcttttttagtttatatatttgcagactatacatgttggattaaatgggcaattaagttttataggaatttgcttcctaagtctacttttgaagaggaaaacaggaacgtaccatatattttgctaagggtaaaatatttttggtgaattgcagacatttaatttcacttgtctgaggtaaaacaataaactaaaatacatgggcatgcatcttacactgatcttattagaggtcagtgctaagtacccatcttgattgaagttagctcagatgtggagattcatagaatgagggtccaggagaagaaagttaggggaaatctcattttctttctgtaattcattcagtggtgccaaagctgggggttccctacaatggctatttagactttccctgcttcaaaataagagcagtatccttagctctagccaagcatttttctaattcctgcctttggtcacaaagaaggaaaagcagagctgtgaatgagttagtggaggtcaagtcacatcagagttcatgacctagtgattgctggtgaagtaatattggaattttggtaccatgagaagacttataaaggatttcatcagaagttttcattttttctaaatcctcccctacaaaattttcagattggaaattactcttgtatttgtagaagattgtctctaaaattgtggtttaactcacgcaggaagtaaaattcctatagcaagacatagtttcattttagaggacccccaaaatcccgtgaattctctggtgatgattctagcctaaccttcaacataaaataatgaagagaacttttaaacttttttatgaattcctaaacattaccatttatgtggcagaagttctgttccctataatctgcaatgctgaagtatctctattcaattcccttccttatctgttaaatttaatgtctttatactaaaaatataggctcttgggattggagaggaaaaattagaggtgattttcagatttcttgttctatggaagaggaagctgagctcagggagatatgagctccacagccacagctggttaggggcggctgccagtagaacagggcagatgcctggactcccaactcagtaggccttctgttacacctcaaaatgtgttacatgggaagaaaaagattaagaaaaagcaagataattttgaagaaggacgagaggaagaggcatgaacttgtcctaacaatgtcaaagaatattttaaaggtataccagttaaagtagtgtgtggctggtgccagtagaggtcagtcaagggatccctgacgagaataaagagcccagaaacaggtccatgtttatatgggaacttgatttttgacagatacggcaagctctatggggaaaacaatatgtactaccttatacccttccccaaaaacaaagggattaaagacctaaatatgaagacaaaacttttaaatgagaatctataaggttattttcatgattttgcaaatgggaaggatttctttaaagcaagacacaaaagcatacacaggaaaaaatgatgcataaaaacatggcttctgtagaacaatagagactgtaaaagaacaagctacagacaaggaaatgtttgcaatgcatggaactgtcaaaggattcgtatctggaatacattaaagaagcaaaagaacctcatacaaaagtcattgagtaaatgacagccatgcattagaacagcaattctcaaaacttttggtctcaagatccctttacactcttcaaaagtgagaaccccaaagagttttcatgtatgtgggttaaatctattgatattttctgttagaatttaaaaattatgttaaaaaaataagaagaatgactatttttcaaaacaaaaaatgagaagagtggtattgttttacatttttacaaatctctttaacatttagcttaataaaagatagctggcctctcaaaaaaaaaaa

SEQ ID NO: 3438 - DNA, 1972 bp, Homo Sapiens
  NM_194284
aggagggcggagcggccgggacgccaggagggaactagcctaagtggggacggtccccgtgcaggagacaaagagcgtccctggagcgatcagggctcaggagcccgacccggagcccggggcgtccgcgctgacttcgggtccccggagcctggggcacggcagggagaagacgacggcggagaaggcgacagcggagaaggaaggcaggctgcaggggcgccgtcggcgcggcgggccgggatgcggacgccggtggtgatgacgctgggcatggtgttggcgccctgcgggctcctgctcaacctgaccggcaccctggcgcccggctggcggctggtgaagggcttcctgaaccagccagtggacgtggagttgtaccagggcctgtgggacatgtgtcgcgagcagagcagccgcgagcgcgagtgcggccagacggaccagtggggctacttcgaggcccagcccgtgctggtggcgcgggcactcatggtcacctcgctggccgccacggtcctggggcttctgctggcgtcgctgggcgtgcgctgctggcaggacgagcccaacttcgtgctggcagggctctcgggcgtcgtgctcttcgtcgctggcctcctcggcctcatcccggtgtcctggtacaaccacttcttgggggaccgcgacgtgctgcccgccccggccagcccggtcacggtgcaggtcagctacagcctggtcctgggctacctgggcagctgcctcctgctgctgggcggcttctcgctggcgctcagcttcgcgccctggtgcgacgagcgttgtcgccgccgccgcaagggaccctccgccgggcctcgccgcagcagcgtcagcaccatccaagtggagtggcccgagcccgacctggcgcccgccatcaagtactacagcgacggccagcaccgaccgccgcctgcccagcaccgcaagcccaagcccaagcccaaggtcggcttccccatgccgcggccgcggcccaaggcctacaccaactcggtggacgtcctcgacggggaggggtgggagtcccaggacgctccctcgtgcagcacccacccctgcgacagctcgctgccctgcgactccgacctctagacgcttgtagagcctggggggcgccgggtggcaaaggactcacccccgcacaggcccgcctggcttcgagttggaacccggacacttgcccctcactggtgtggatggaaatctgcctttcgtgggaccaaacaggactccttggacgattagttcaggttgggtttggttttcttcttaaagagtttagttttcctctccagagggatcagggtcctcttagggagtgacgggcttttcatatatttttgctgaagaatatatggaaagggtggcatttgcgtcacgtggaccagggacagtgctgaaatcagcagtgctcagaaacaatttaacatgttgaaacgacaatattctaaaatactgatgaatcttgcatcaatataattattgggttttttttctttttcctgctgtataactccttgccatgcaaactctcaagaggccaatatattcctggccatgtttgaatgagcctcttaaaataaacttagagccatgcaaatgccagcagcttaatggatttcatggaatgaaataccgtgattaactcatagctacatatcattgcataaatgggatttatcttttttctcacttatttttgcggtgaaagtcgagggcatgcaagagtttctcttccagaagccaagaggagaacaaaggtcctaatgctgtactattccaccctttggacgcctcatccaggacgcagaggactctaggtttaacattttgtacaaaatggaacctgttaatcatattaaagcacatatgtatatatcttttatttataaataaaattttaaaacaatagtttcagtataaaaaaaaaaaaaaaaaaaaa

SEQ ID NO: 3439 - DNA, 7851 bp, Homo Sapiens
  NM_194301
agggagagagttgtgctcctgccgccgagagctccaccttcgtggctctgggtccggggccccggcctgtggcggcgagcggcggccgctggagacgagcggcggcggcaggcggccagcccgggtctgcctcgctccgtgcagggccgggagagggatccgccatattggagctggggccgaaggtgccttggagccgcggcgcgaggcgggtggaggtggcggccctggcctggatcgggaaggagtcggctctgccctggcccgcaaggctggggagctaatgagcctctctggctagtctcctccccgtccactccctccactttctgccgccgggacccggctgggagccggctgtggcagtggcagtggcagtggcagcgacaggatgttctccaagaagccgcacggggacgtgaagaagtccacccagaaggtgctagacaccaagaaggacgcactgactcgcctcaagcacctgcgcatcgtcatcgagaatgcagaatctattgatcttaaacagtttttcgaccaacatttttcacatatatactatgtgttctttgaaaattttgtgactattgaagctagtcttaaacagaaaggtcacaagtctcaaagagaggaattggatgctatactttttatttttgagaaaattttacaacttcttccagaaagaattcatcagcgatggcagtttcatagtattggattgattttaaagaagctacttcacacaggaaactccttaaagattaggcgggaaggtgttcgtcttttcttactatggttgcaagctcttcagaataactgtagcaaagaacagctctggatgttttcatgcttaatccctggattttcagcaccacagtctgaacatggacctcgaactttagataatctcattaatcctccactcaaccttcaagaaactcaagtcactatagaagaaatcactcctcttgtccccccacaatcaggagataaagggcaagaagatctcacaagctattttcttgaagcacttctaaaatacatagtcattcaggtaaaaagtttagaatggaagaacaaagaaaaccaagaaaggggattttcatttttgttttcacattttaagaaatattacttgccttatatttttccaaacatctgtaaggaaaacagtttatatcatcctatacttgacatcccgcagatgagaccaaagccacattatgtcgtgataaagaaagatgctgaaaccaatgaagcaatctattgtacaaaggagcctttcattaaggctcgtgttattgtcattcgttggctggtttctttctggctggagccaaaaccacatacaggacctcatattcctgggatggaaggtgaagtcttgccaaagaatattcagagagcagctgctagtttagtatccagagaagaaagcaaaaatgataatgctgataaaacagacagaactacagaacccgaacagtctcattccaatacaagcactctcacggagcgagaacctagctcatctagtctctgtagtattgatgaagaacatctcacagacattgaaatagttcgcagagttttttcttctaaaaggagtaatgtaaactttgtgacagagatatttcgtcaggcatttttattaccaatttgtgaagcagcagctatgagaaaagtggtaaaagtatatcaagaatggatccaacaagaggaaaaacctttgttcatgcaagagcctgaagaaattgtgatcacttcttcagacctcccttgcattgaaaatgtcacagaccatgatatttcaatggaagaaggagaaaaaagagaagaggaaaatgggaccaatactgctgatcatgttcgaaattccagttgggcaaaaaacggctcctaccaaggtgctcttcataacgcctctgaagaagccacagaacaaaacatacgagctggtacccaggcagttttgcaggtgtttattataaactcatcaaatatatttcttcttgaacctgcaaatgaaataaaaaatcttctggatgaacacacagatatgtgtaaacgcattcttaacatttatcggtacatggttgtacaagtatcaatggacaaaaagacttgggaacagatgctgcttgtgttgctcagagtcacggaatctgtactgaagatgccatcacaagcttttctacagttccaagggaaaaaaaatatgaccttggcaggtcgacttgcaggaccacttttccagacccttatagttgcctggatcaaagcaaacctaaatgtgtacatctcccgagaactttgggatgacttactgtcagtattgtcatcgctgacctattgggaagagttggccactgagtggtcactgactatggagacattaactaaagttttagctaggaatttatatagtttggatctcagtgatttaccattggataagctgagtgaacagaaacaaaaaaagcacaaagggaaaggagttggacatgaatttcagaaagtttcagttgacaagtcattttctagaggatggagtcgtgatcagcctggccaagccccaatgagacagaggagtgcaacaaccactggttctccaggaaccgaaaaggcgaggagtatagtacggcaaaaaactgtcgatattgatgatgctcaaatacttccccgctcaactagagtcagacatttttcacaaagtgaagaaactggaaatgaagtttttggtgctttgaatgaggagcagccattgcctcgaagtagcagcacttctgacatcttggaaccattcactgttgaacgagccaaagtcaataaagaggacatgagccaaaaactgcctcctcttaatagtgatattggcggcagcagtgctaatgttcctgatctgatggatgagtttatagcagaacgacttcgaagtggtaatgcctcgactatgacaagaagaggaagtagtccaggcagcctggaaattcccaaagacctccctgatattctaaacaagcagaaccagatgcgccctattgatgacccaggtgtgccctcagaatggacttctcctgccagtgcagggagcagtgatcttatcagctcagatagtcattcggattctttcagcgctttccaatatgatggccgaaaatttgacaattttggctttggaaccgacactggggttacgtcctctgctgatgtggattcaggttctggccatcatcagagtgctgaagagcaggaagtggctagtctaactactcttcatatagattctgaaacaagcagtcttaatcagcaagctttctctgctgaagttgcaactattactggttcagaaagtgcttccccagtccactcacctctgggctccaggtcacagactccttccccttctacattgaatatagatcacatggaacagaaggatctgcagctcgacgagaagctccaccactctgttcttcagacaccagatgatctagaaattagtgaatttccatcagaatgttgtagtgtgatggcaggaggtactctgactggatggcatgctgatgttgctactgtaatgtggcgaagaatgctaggcattttgggagatgtaaattcaatcatggatcctgaaatacatgctcaagtttttgattacctctgtgaactttggcagaatctagctaagattagagataaccttggcatttcaactgataacctgacctccccttctccaccagttttaattcctccactgagaattcttacaccttggctttttaaggcaaccatgttgactgataaatataaacaaggtaaattacatgcatataaacttatttgtaatacaatgaaaagaagacaagatgtttctccaaatagagattttctaacacatttctacaatataatgcattgtggattacttcatattgaccaggatattgtcaatacaatcatcaaacactgctcacctcaatttttttcacttggtttgcctggtgccacaatgcttattatggattttattgtagcagctggtagagtggcttcttcagcttttctcaatgcaccaagagtagaagcacaagttcttctgggatctttggtttgctttcccaacttatattgtgaactgccttctcttcatcccaacattcctgatgttgctgtgtctcagtttacagatgttaaggaacttataatcaaaactgtattaagctcggcaagagatgagccctctggtcctgcacgatgtgtagcactttgtagtttaggtatttggatttgtgaagaactagtccatgagtctcatcatcctcaaattaaggaagctctgaatgtgatttgtgtttccttaaagtttactaataaaacagtagcccacgtagcttgtaacatgcttcacatgctggttcattatgtacctagacttcagatttaccagcctgattctcccttgaaaattattcaaatcctaatagctaccatcacccatcttttaccaagtacagaggcttcatcttatgaaatggacaagaggttggtagtatctttacttctctgccttctggactggatcatggccttacctctaaagacactgctccaaccatttcatgctacgggagcagaaagcgataaaacagaaaaatctgttctcaattgcatttataaggttttacatgggtgtgtttatggagctcagtgttttagcaatccaaggtattttcccatgagcctctctgatttggcatctgtagattatgatccttttatgcatttggaaagtctgaaagagcctgagcctctgcactctcctgactcagaacgatcttctaaactccagccagtaacagaagtgaaaactcaaatgcagcatggattaatctctatagcagcccgcactgttattacacatctggtaaatcacctgggccattatccaatgagcggtggtcctgctatgctaacaagtcaggtgtgtgaaaatcacgacaatcattacagtgaaagtactgaactttctcctgaactctttgagagtccaaatatccagttctttgtgttaaataatacaaccttagtgtcctgtatccagatcagatcagaagagaatatgcctggaggaggtttatctgctggccttgcatcagccaattcaaatgtcagaatcatagtacgtgatctctctggaaaatattcatgggattctgctatactgtatggcccacctcctgtaagtggcttgtcagaacctacatctttcatgctttcattgtctcaccaagagaagccagaagagcctccgacatctaatgaatgcttagaagatataaccgtaaaagatggactttctctccagtttaaaagatttagagaaactgtaccaacttgggatacaataagagatgaagaagatgttcttgatgagctcttgcagtatttgggtgttactagtcctgaatgcttacagagaactggaatctcacttaatattcctgctccacaacctgtgtgcatttctgaaaaacaagaaaatgatgttattaatgctatccttaagcaacatacagaagaaaaagaatttgttgagaagcactttaatgacttaaacatgaaagctgtggaacaagatgaaccaatacctcaaaaacctcagtcagcattttattattgcagattgcttcttagtatattgggaatgaattcctgggacaaacggaggagctttcatctcctgaagaaaaatgaaaagctacttagagaacttaggaacttggattcaaggcagtgccgagagacacacaagattgcagtattttatgttgctgaaggacaagaagacaaacactccattctcaccaatacaggaggaagtcaagcatatgaagattttgtagctggtcttggttgggaggtaaatcttacaaaccattgtggttttatgggaggactacaaaaaaacaaaagcactggattgaccactccatattttgctacctctacagtagaggtaatatttcacgtgtcaacaagaatgccttctgattctgatgattctttgaccaaaaaattgagacatttgggaaatgatgaagtgcacattgtttggtcagagcatactagagactacaggagaggaattattcccacagaatttggtgatgtccttattgtaatatatccaatgaaaaatcacatgttcagtattcagataatgaaaaaaccagaggttcccttctttggtcccctttttgatggtgctattgtgaatggaaaggttctacccattatggttagagcaacagctataaatgcaagccgtgctctgaaatctctgattccattgtatcaaaacttctatgaggagagagcacgatacctgcaaacaattgtccagcaccacttagaaccaacaacatttgaagattttgcagcacaggttttttctccagctccctaccaccatttaccatctgatgccggctcctacccagagattctacccagtgaaactcccacagcaacgcaggtagatggggctgacctggcctctccaatgtctcctcgaactagcaaaagccgcatgtccatgaagctgcgtcgttcctctggctcagccaataaatcctaaggagacaagcagcccagcagtgatcagcagtagccaccttagcacgaacatagggttaaccctttcaggccttcatgtctgccataacatgcatgtttcttcctgtacatttatttgagaaaacactggatttaaataattttaaataatttgtagcttaatattaaagatttaagttatttattgtttcattttttttcccacaatccaagctgccatattttgagggcagggggagttttattctacaccctttaccttcctagataattatgtctaagtagttttatctttaatttcatggttaactgtgagccaaaatacaattggacaattagtctcattatttattgtgccccattgcaactttatggttcaataaatatataattttttacaaatgtaaaattttacatttaagcatttgtaaagttacagcaaaagatgtacctgttaatacacagaatgtgtacagattatttgttatgacaataaaacactcaaaataaatggtctttagcatctcaaattccaactgaaatcattttagtattaactcttcttcccaaagcaatgtctcatttcttggctgtgcaggtgatgccatgttatatccaataactagaaaaatcactgtgctgaacttttatgtttagcttccaagtatttttctaatgttttgcatttcaagtggtatcactgttaaatgccatttgttttcagattgtggccttttattattggctgctagatcctggtgtttctatgttcttttttaagcaccaaaaagaagatggggaagaaaagaaggaaaattttctgatataaatatgttgttcaaattatgagtattatttaaaaaagaaaaaggaacataacccaggagtctaagttaaatctaatattgttaatactgaacttgcaggtccaggttggtatacattccaccctctagaagtattttcttacagtagataagctgctcacattttgttttgaatgggcatctcctgaggaaatgtagcatgacattggtactaactgcatgtgtaaatacatcatactggcaaaccgtaaaatataaattatgtatcatcattcatgtagtatctataatttgtaacagtgggggggaaagatgacatggtatttaataatacaataaaaatattcttatcacttcctatccaaaaaaaaaaaaaaaaaaa

SEQ ID NO: 3440 - DNA, 4586 bp, Homo Sapiens
  NM_194310
aaaggaaggagggtgactgcagagaccggccctgggcagcggtaccaggggcacagggagcctggcccggcccattgtcactggaattcatgccatgcagacttctacatcaaagggaaacaaggtcgggagggccgaggggtccacggcactccgcacccacggggccaggctggcacaacgccccaacgctgcaatcctgggaagagtcacacgcgccctcccgggacccacgtgaccatcaagggagtgtggaggacacatccctcgggggtgacgcccctgcagatggagtttccccatctgtgccacccttgcaaggcctgggaaaggctgcggggccaggcggcaccgggcaagctgagtgccaggtggtggttgcaacacaccgggcaaatctgaaaccatgggacggacgagctgcacccctgggaaagagaacagaggaaggccggttatcaacgtcctcctgtgcctcagtttccagaaacaagccagactcagtgcctcagggagaccccgtgtggcctccggagagcacgggacccgccctttgtgcaggtgaggaaactgaaccccagagcagtgagggactggcctggggaccctgggctcagccctgggcgccttccctctgcccatctcagacgggcacagccagcaccgcctcaccccaacgcgcctccagactggccctccaggggcccccaggcacaatcctctcactttcttcctcaagcccctgccttcccccttcgcactgtgacccaggggctgctagcagctgggctgggctccaaagcttgaagctgcttctccaggtctctttccagggggcggcggatggctgctcactcagggacgccaacaccaacaggaagggacccatgcacggatctgacttccctcccaggctctgccttcactcaatgtccctgtggggcagctggggctcccggccgccctcccctgcccacagccgtgaggttgcttcctagggttctgttttccccacagtcggaactgaggtgctgggaggctccagaagagggatggggtggagcaagtggcctggagccccccagggcagaccccaaagagaagggtcagaagtgccctctggggcctgggcagctggggggagcccacaagcctgagaccctgtgggagggaagcgcccccaccccgtggtaagaaaggggctggtagaggctcctatgtggctccctctgtcccctcccgacctctggccaggcttgggataatccctgagtggacacaggcgccacgatggggtctcgggggtgagggctgaggaggctgagcctccaaggaccccagggtgcctgttcccactgcacacccaccagggcacagggtagggatagtgccaggagggccacagctgcagggtccatcccaggccgtggtacacaggtagaggtgggtgccagccttcgtgaagcacctgcagaagctccactcagggagagaacgaggcactcgcccaaacagatcctgggtcacacggggcagcaagagagggtggagcaagtggcctggagcaaagggttggaggccccggggcggcgcgttctcccccaagcccattccagggccatgggcaccccccagaggcagctggtgggactgcagccatgcaggtcctagagggcaggtgacaggggacgtgacagaaggggacaaagggccggcaacatccctgggggaggcacagagagggccagactgccctcggtggactgcggaacccagaacccaacggccaatcctccccctactcctcacccacagtaaggggccagggctccatgcaatgagaacccacgggtgatgccacacgggggagaagccacgcgggggagaggccatgcaggggagaggttacaagggggagaggctgcggggtgagaggtcacatggggcagaggccacgcgggggagaggccacgcaggggagaggtcacatgggggaggccacgcaggggagaggtcacatgggggagaggccacacaagggagaggccatgcaggggagaggtcacaatggggagaggccgcaggggggagaggtcacatggggcagaggccacgcgggggagaggccacgcaggggagaggtcacatgggggaggacacgcaggggagaggtcacaagggggagaggccgcagggggagaggtcacatgggggagaggctacacaggggagaggccgcacgctggggagatggtccctgcgggaagactccgaggcagtctcctgcagctccttccggcgaatccggttcaggaagtaaaaccagccctgtgtagaggtaagtgatgcttgtggggataatctccgagcagctcaccgcggcgctggccattgccgttctcttcacggtagaagagtccatttggggaaaaggtccccatcagagatggagatgttccctttcagactccaggctatggctgtggggccggctccctaccacgtgggctgggggctgggcacatgcatgcccactcctgggccctcttcctggtaggccacagcaccacacacactgcaaaccaggcctcttcttcatccaccaccaccgtccaggcctcaacatcaccgcgtggggtcttgtgccctctgggggaacttccgggctaatgaggggggacagtccccattaccggtctatctttataaggcagtatatgcaacagtggaagttctgtgagacatgttccaaccccggggctgctggcagaactgtccccaaacccaccctcgatcccacggccaggaagtgggtccaaaattgcctggccaggtcacacccctgcgtgaaccgccccacaacacccagggcgctgcctgacttgccgtccacctctcagcccctcccctcacccctgccgcagctgcagggcctaccctcgccgggggctgctccctgcttacctccctcgcccgtgcaatgcctccacttcccgcaaggcctaccgggagatgttacaggtcacggtcatatttgagcatgagaagctcacgcagagaacattctggctgagggagaggtcttggggttcaaggctgtttcttggctctgctcagccatgccaggcaggaaaatgggcacctctagtgacccaggctggctgagagcctgcagggaagagcctttggaacgtgagccactgtgggctggcaggactgcaactggcgtctccatctactggtaccgaggcgaggaggaaaaagcaggggggcccggagacggcccctctaagtctgtaactccagagctgctgctcagtccccagaacgtcacctccgagcagagcctgtgacaactgtcaactgtgaagctgtggcgtgggttgctactgaagctctgaagtcagcgaggacacagcatgtttgttctagaccgtttggctgcgggaggaagctgtacatgcacacactcgcctcaccaccctgcgagtccacaggcccctccccggagtcacctccaggtaaagggggccctgcgtcgggacttgctctctggggcgctgagatgctctacaatgagctgtgctgcagtgcacggccgcccgactgtgcacccgcaacggggaactgaacgctgcatgaagtacatctccaagttgttctttaagaaggcttagggtccctggaagaccctcgcccacacccagcgtggagcgttgttgctcacgtggccacacctctcgggatggccgtgggtctccgtgatgggcaggcgagtggaaccacaggtgcttcccgtcctggtcacaaagtcagagtggctgggccaagtgtcctgagaagagtcacctcctgggatcccatcagcctggccatagcagaacacccagacaggggcccatccccgaggctcaactcaacgcatgcagccaccgtagaaaagtctggaaagtagttcttcaaccgactagacatggtgagcccaaaacccagccatgacactcctaggcatctgccccagaggaatgaaagcatccatcccctgcaaactcatccttacacagcagcgtgactcaagacggccaaaggcggaaacaccccaaacgtccatcagtggacaaacgggcagatgcaatgcactgtctgtaccgtgggatgtcactcagccatatgaaggaaagactccagtgtggatgagccctggaaccacggtgctgcgtgatcccgtaacacatggccagaacagacacggcccggaacctgaggccgggaggatgcgtgcaggtggcggggagacagaggggcgatggcccagtttcttttgggctgaaaatggtctaaagttgactgtggtgatggctgtacaactctgaatatgctgaaaactcgaattacacacttcagttgggcgaactgtactccatgtgaattacctctcgatggttctctcctgggctcaggcgcttctcccaccttggcctcctgagtagctggaactaccattcatgtgcggaaataaaacaactcggtctcaaaaaaactcaactcaaaactcagtctcaaaaaaataaaaaagtaaaagaggc

SEQ ID NO: 3441 - DNA, 3556 bp, Homo Sapiens
  NM_194320
gcagtccggctcgcgtacttccgcgttccggcatcgtcgcctggtgcgtgatttgcctctgcaacttgactctcctctaggaagagtactccagagagcagggatatgtcaccaggactcctgacaaccaggaaggaggcattgatggccttccgggatgtggctgtggccttcacccagaaggagtggaagctattgagttctgctcagaggaccctgtacagggaggtgatgctggagaactacagccatctggtctccctgggaattgcattttccaaaccaaaactcatcgaacagctggagcaaggcgacgaaccttggagagaggagaacgaacatcttctggacctttgtccagagcctagaacagaattccagccaagttttccccacctggtggccttttctagctcgcagctcctcagacaatatgcgctaagtggccatcccacacagatcttcccaagctcatctgcaggaggtgacttccaactagaagctccaagatgctctagtgaaaaaggagaaagtggagagacagaaggccccgacagctcattaagaaagaggccaagcagaatttctaggacattcttcagcccacatcaaggtgacccagtagaatgggtagaagggaacagagaaggaggaacagaccttcgcctggcccaaaggatgagtcttggggggtcagacacaatgttgaagggagcagacacttcagaatctggagcagtcatacgtggaaactatagactgggacttagcaaaaagtcaagcctgttcagccaccagaagcatcatgtgtgccctgaatgcgggagaggcttttgccagagatcagaccttatcaagcaccagaggacacacaccggggagaagccatacctgtgtcctgagtgtgggcgtcggtttagccagaaggcctccctctccatacaccagaggaagcactcgggggagaagccgtatgtgtgcagggaatgtgggcgacacttcaggtatacatcctctctcactaatcacaagaggattcactccggggagaggccctttgtatgtcaggagtgtgggcgaggctttcgccagaagatagccctccttctacaccagaggacgcacttggaggagaagcccttcgtgtgtcctgagtgtgggagaggcttttgccagaaggcatcactcctccagcaccagagctcacacacaggggagaggcccttcctgtgccttgagtgtgggcgtagcttcaggcagcagtcactcctccttagtcaccaggtcacacactcaggagagaagccttatgtctgtgctgagtgtgggcacagctttcgccaaaaggtcactctcatcaggcaccagaggacacacacaggggagaagccttacctgtgcccccagtgtgggcggggttttagccagaaggtcaccctcattggacaccagaggacacacacaggggagaagccctacctgtgccctgattgtgggcgtggctttggtcagaaggtcaccctcatcagacaccagaggacacacacaggggagaagccttatctgtgccccaagtgtgggcgtgcatttggctttaagtcgctcctcacccgacaccagaggacacactcagaggaggagctttacgtagacagggtgtgtggacaaggacttggccagaagtcacaccttatctctgaccaaaggacacactcaggagagaagccctgcatttgcgatgaatgtgggcgcggctttggctttaagtctgccctcatccgacatcagcggacccattctggggagaagccgtatgtctgcagggagtgtgggcgtggctttagccagaagtctcacttgcatagacacaggaggaccaagtctggtcatcagctcctaccccaagaggtcttctgacctttcctttccccgtgagtgtgaagctggcagaaatcactagtaaatgcttcagtttcctgaaatggaatggaaaaaaaaaaatgttgctttctttcatcgatcatgagatagttgatttttggtttactttctatattcacaatttgtcttggcttgctaggggttccataacaaagtaccccaggctgggtgattttgacaacggaaatatattttcatatttatggaggctggaagtcccagatgaacgtattggtaggtttggctgctgcttaagcctctctgtttggcttgcggatggctgctttctggccacgtcctcacgtgggcttttttctgtgtgtatgctttcctggtgtggcttcctcctcttctagggacaccagtcattttggatagagccacagccacatggcctcgtttaaccttaataaccttcctaaaggccttatctctagatacagtcacactacacagttaggacttcaacatatgaatttctgggaaacccaatttagtctataacactccactaccaaagttcaggtccctcagacattcaaaatacattcacatgatcccaacagtcccaaaattctttacccatttcaacttcacctctagatccaaaatctcatttaaatatcatctaaatcaagtgtgaatgagactttaggtacaattcatccttaggcaaaattctccaggtgtgatcctgtgaaaccagacagatatctgcttccacaatattctacaatggtgggacaagcagaggctggacttccccattccaaaggaaagacatgagaaagaaatgaagaatgatggatcccaagcaagtctcaaacctggcaaggcaacttccattagattttaagtctcgagaataatcccctttggctcagtgctctgccttctgggccaactggattggcagccctgctttttaggctcacgggagctgcagtgtcgctcccttggcccttggcagcggctcctggcccactgaaattgaggaggagacacacttgccctctagacctgtactctctgggcccattagaacctttgagaatcacattcttcccttttcttgaagattaacgtgcgtttgcaactggatagctctattgtaccttcccgtagaatcccagaagtctaacagcctgccttcatttttgtcctgtctctttctctattcagttcaagctggcagcatttctggtgagatggttaattggttccattcagacctatactaatctctttatcacatggttgtccagccacaccctagtgttctttcaagaacatactttctcattttttgcaatgcggacaggctgagaattttccaaatctttaagtactggttcttttttgcttaacagttccttcaatttatctttctcctctaatattttactataagcagcaaggagaaaacagactccacttgcatcactttgtgtagaaatatcacctgaatattctgcactgcctcactcacaatttctgtactccacaaaacactagaacgcaatttgggcaagtcctttgcaaggattccagtttcccattacccattcctcatttctgtctgagacttaaccacaatcaccttaaaattaaaaac

SEQ ID NO: 3442 - DNA, 3469 bp, Homo Sapiens
  NM_194356
gcagagcgcgcggggcgcggttgccgtggcagcgccggctccagggagggctgctggcgccgggccgggaccgcggggcctgaggcggagaccggagagcccgaggcccggccggaggcagctcgggacaggcttgagcggcggggcgcgctgcccggccggcggggatgcgggaccggctgccagacctgacggcgtgtaggaagaatgatgatggagacacagttgttgtggttgagaaagatcatttcatggatgatttcttccatcaggtggaggagattagaaacagtattgataaaataactcaatatgttgaagaagtaaagaaaaaccacagcatcattctttctgcaccaaacccggaaggaaaaataaaagaagagcttgaagatctgaacaaagaaatcaagaaaactgcgaataaaattcgagccaagttaaaggctattgaacaaagttttgatcaggatgagagtgggaaccggacttcagtggatcttcggatacgaagaacccagcattcggtgctgtctcggaagtttgtggaagccatggcggagtacaatgaggcacagactctgtttcgggagcggagcaaaggccgcatccagcgccagctggagataactgggagaaccaccacagacgacgagctagaagagatgctggagagcgggaagccatccatcttcacttccgacattatatcagattcacaaattactagacaagctctcaatgaaatcgagtcacgtcacaaggacatcatgaagctggagaccagcatccgagagttgcatgagatgttcatggacatggctatgtttgtggagactcagggtgaaatgatcaacaacatagaaagaaatgttatgaatgccacagactatgtagaacacgctaaagaagaaacaaaaaaagctatcaaatatcagagcaaggcaagaaggaaaaagtggataattattgctgtgtcagtggttctggttgccataatcgctctaattattggcttgtcagttggcaaatgatggtgtggataacgtcagtgtgcatgcctctctgccagggtgggaaaattgatgttcattattatttgtgtaattgttttgcttgtgatccttggaattatcctagcaacaacattgtcctagcaaccatatcccaagagccatttatccttgagactcagaccacatctgcaaccaaatcagcatcctgtcatttcgtgaatgaatctcagacgctgtaacccggcatcgagtgctgaccttgtaatgtatgagttcacggaagaagcacaaccgaacgtcttgttcagtgacagcgccgtaagcacagtgggtgtgatgcgtgaccctgaatgacacactacagaatgtgagcagtgtgagacttctctcactggccttgaaataagaaaatattgaacattttaatattaaaaatatttcagtgttaacaaatgtgcatgaagtttaattaggaaggaatgctttatgttatgaaggcttttttttttttttttgagacggagtctcgctttgtcatccaggctggagtgcagtggtgcgatctcagctcactgcaacctcggcctcccgggttcaagcaattctcctgcctcagcctcccgagtagctgggattacaggcatgggccaccacacccagctaattttttgtgttttctttttagtagagacggggttttaccatgctggccaggctggcctcaaactcctgaccttgtgatccacccacctcagcctcccaaagtgctgggattacaggcgtgagtcaccgggcaggctgttctgaagcttttagatctcaggtctaaggcttcctttccctccctctcccagctagtttgtgctaattaagagaccttttatactgttttattgcctgtttgaagaaataatttttatcacgtttttgtaagatatctataattttaaatgtttataaattgtttaatttattagcatcttaatgtaccccatttttatatactgaatgtggccttttgagtgaaataggaagcttcatggtgttggagccacctttgtacagttgtttaaagtttcccattgtcacggaaaacattggctgcaaagcccctcaaagccctcaagtgccttctgtgagtttaaatgtgctggtgccctccagaaaagcctcggcctcagctccgtttccgcctgttccctcccccaggataatgaatggttactgcactgtaaagaccgtggtctcttttcactaaataggagattcgagtttcccagtttacatgaatgaagtctgaatttaagacggtgatgaaactgaggttcagtactctcgggactcgaggaaattattcctgagacatggagtaattcttacaaatttaaactattgtacagatccacatacatgttgttaagtacctaatgttttgctgaacttttaaaagttaatttccaaaatgtatagggattcatgataattaaacctttttattgctcatttttttagtagaagaatatcacttatttttagacttgtaaaatgtatgaactggtgagcggacatctgttaagagagtcactagtcagaatgttaaaggagtgcatgcaggatgccccaaatgtcgtgaactcttgttactcctgtatgtagtagtgtaagcatgtgacttttaacaccatttggtttgaaactaatgtagagatgcctgattccaaacaggtgtggagaatattgaatggctcagaagccgcgtcccttacttaacacaattccgaatctccctcatccatgatgcgtccattggatcactcgctggtggtcactgtgtggcagttactaggggaattctgcctctgactgttctttttcttttggtctttaaacaccctgtcgtgggatgtgctcactgatttgtggctatgttgaaggtatcacttgtcttgagggttttcaatatttcaggatcatgctggtggcaaaaggactccacgcctctgtggaatcatgtccacagggggacctgcctcccgtgatgtcccacctttccttcaaggtctgtcatatgagtcctccccttttacaacacttattatggtatttttcaagttattcttcttagatttgcagtacctactgaaatttgtgtttttatagttgaagttaggaaaatgctatttgatttgtatttagatatttaagtcacttgtccaatgatgtgtatgtctaagcctcatgtaccgatttgaagtcagacttaaaaatgtatttacagattcacttgagactttttaatcggttcttcaaatatttcatgtttacattaaaaatttccagagaagcataaaagtattcactttcctgccttgtcatttctggaaagattttggggagatattttattgcatattaattaataaattgttctactaggaaaaaaaaaaaaaaaa

SEQ ID NO: 3443 - DNA, 4461 bp, Homo Sapiens
  NM_194428
gctgtgtgcgcaggcgcaagactagcgctcttgggaccggaagttaaggcgttcgcggcgtgtgaatccagggcctgaaaacccagaatgaacttgtgtccatcccagagatcactgcagatgtcatgaggtaccctttgtgtcaccagctcaagcaggcctctggccactttatcatctgtggtggtcctgtgccgtgaccaggaggaaaaattagctctttgaagagaaagtagttctctattgcaggcactggcctcttaaattgttgcaggtggggaatggatgagaatatttgttttgggtgatcagaactgagactcctattgtggattagtaacatgcctcctcctagaacaagggagggcagggatcgccgagaccaccaccgggctcccagcgaggaagaggccttggagaaatgggactggaattgtccagagacgcgtcgcctcttggaagatgccttcttccgtgaagaggattacatccgtcagggttctgaggaatgtcagaagttttggaccttctttgaacgcctgcagagattccagaatctcaagacctccaggaaggaggagaaagaccctggacagcccaagcacagcatcccagcgctggccgacctacctcgcacttacgacccacgttaccgcatcaacctctctgttcttggccctgccacgcggggctctcagggactgggcaggcacttgcccgcggagagagtggctgagttccgccgagccctgttgcactacctggactttggccagaagcaggcatttgggcgtctggccaagctgcagcgtgagcgggcagccctccccatcgcccagtatgggaaccgcatcctgcagacgctgaaggagcaccaggtggtggtagtggccggtgacaccggctgtggcaagtccactcaggtgccccagtacctgctggctgctggcttcagtcatgtggcgtgcacccagccccggcggatcgcctgcatctcactggccaagcgtgtgggctttgagagcctcagtcagtatggctcacaggtcggctaccagatccgctttgagagcacacgttcggcggccaccaagattgtattcctgacagtggggctgctcctgcgacaaatccagcgggaacccagcctgccccagtatgaggtcctgattgtggatgaagtccatgagcggcatctccacaacgatttcctcctgggcgtcctccagcgcctgttgcccacgcggcctgacctcaaggtcatcctcatgtcggccaccatcaacatctcgctcttctccagctatttcagcaatgcccctgtggtacaggtgcctgggaggctgttccccatcacggttgtgtaccagccgcaggaggcggagccgaccacgtccaagtcagagaagctggacccgcggcctttcctgagggtgctggagtccattgaccacaagtacccgcctgaggagcggggtgacctcctcgtcttcctcagcggcatggcggagatcagcgccgtgctggaggctgcccagacctatgccagccacacccagcgctgggtggtactgccactgcacagcgccctgtctgtggccgaccaggacaaggtatttgatgtggcaccccctggagtccggaaatgcatcctctccaccaacattgctgagacctcagtcaccattgacgggatccgcttcgtagtagattccggaaaggtgaaggagatgagctacgatccgcaggccaagctgcaacggctgcaggagttctggattagtcaggccagcgcagagcagcggaagggccgggcgggccgcacgggccccggagtctgcttccgcctctatgccgaatcggactatgatgccttcgccccctaccccgtcccagaaattcggagggtggccctggactcgttggtgctgcagatgaagagcatgagtgtgggggacccccgaaccttccccttcatcgagcccccaccaccagccagcctggaaaccgccatcctctacctccgggaccagggggccctggacagctcagaggccctcacacccattgggtccctgctagcccagctgcctgtggacgttgtgattgggaagatgctgatcctgggctccatgttcagcctggtggagcctgtgctcaccatcgcagccgcacttagcgtccagtcgcccttcacccgcagcgcccagagcagcccagagtgcgcggcagcacggcggccgctggagagcgaccagggtgaccccttcacgctcttcaacgtcttcaacgcctgggtgcaggtgaaatctgaacggagcagaaactctcgcaagtggtgccgccgccggggcatagaggagcatcgactgtacgaaatggccaaccttcggcgccagttcaaggagctgttggaggaccacgggctgctggctggggcccaggccgcgcaggtaggggacagctacagtcggttgcagcagcgccgggagcgccgggccctgcaccagctgaaacgccagcacgaggagggcgcggggcgcaggcgcaaggtgctgcggctgcaggaggagcaggacggcggctccagtgacgaggacagggctggcccagcccccccaggggccagtgatggcgtggacatccaggatgtgaagttcaagcttcggcatgacctggcgcagctgcaggccgctgccagctcagcccaggacctgagccgcgagcagctggctctgctgaagctggtgctgggccggggcctgtacccacagctggccgtccccgacgccttcaacagcagccgaaaggactcagaccagattttccacacgcaggccaagcagggcgccgtgctgcaccccacctgcgtcttcgctggcagccccgaggtgctgcacgcacaggagctggaggccagcaactgcgacggaagccgaggcatggctgcgtgctgggagtcacattcagatttggctgaccttcttgtctgagccaggccaccaaagccatgccacgacaaggacaagatgagcagcaaacaccagctcctcagcttcgtgtccctgctggagaccaacaagccgtacctggtgaactgcgtccgcatccctgccctccagtccctcctgctttttagccggtctttggacaccaatggtgactgctcccgcctggtggccgatggctggctggagctgcagctagcagacagtgaaagtgccatccgactcctggcggcttccctgcggctccgtgcccgctgggaaagtgccctggaccggcagctggcgcaccaggcccagcagcagctggaggaggaggaggaggatacgccagtcagccccaaggaggtggccaccctgagcaaggaactcctgcaattcacggcatccaagattccttacagcctccggcggctcacagggctagaagtccagaacatgtatgtgggaccccagaccatcccagccaccccccatcttcctggcctctttggcagctccaccctgtccccccaccccacaaaggggggctacgcagtcactgacttcctcacctacaactgcctcacgaatgacacagacctgtacagcgactgtctccgaaccttctggacctgcccccactgtggcctgcatgcgcccctcacgcccctggagcgcatcgcccatgagaacacctgcccccaggccccacaggatgggcccccaggggctgaggaagctgccctcgaaaccctccagaagacatctgtcctgcagaggccctaccactgcgaggcctgcgggaaggacttcctctttacacccacagaggtgctgcgccaccggaagcagcacgtgtgagctgggccaggagccctgcccacctccgtgcagctgacctgccctccagcccaggactaggggcaggactcttgcctgaacccccagcctgggcttagccctgtggtcctgtcccagtgcagagggcctggagcacggattgtgaataaagcctcacatgctgatacacactgttgttaggcctgcacctgcccatccagaaagcagcagctgccttgttagtcctccccagggtctagctttccttcttcctgctgcagggtgctgcctgaggggtcctgggtaggaggggcgttagagccagcagggacctcccatgtctccagattccaggtgcaggttcttagcacctccgcagccgctctctcttgagtccatcctcagtctctcctaccccttgaagtagggggaccctgaatttgcccatccacctgggtcactttgagagttgtgcaggggggctgggagcactggtgttcacgtgggaccacaggctgcaccataagacccactcacaataaaaaaataaaaggccgagccgggcatggttgctcactcccgtaataaaaaaataaaagaacaggctgagccgggaaaaaaaaaaaaaaaaaaa

SEQ ID NO: 3444 - DNA, 1167 bp, Homo Sapiens
  NM_194447
ctgtgattctcactatactggtcctgaggaaagggcttctgtgaactgcggtttttagtttttattgtggttcttagttctcatgagacccctcttgaggatatgtgcctatctggtgcctctgctctccactagttgagtgaaaggaaggaggtaatttaccaccatgtttggttcctgtttataagatgttttaagaaagatctgaaacagattttctgaagaaagcagaagctctcttcccattatgacttcggaaatcacttatgctgaagtgaggttcaaaaatgaattcaagtcctcaggcatcaacacagcctcttctgcagttttctttcaaaaatattctcagcttcttgaaaaaaagactacaaaagagctggttcatacaacattggagtgtgtgaaaaaaaatatgcccgtggaagagacagcctggagctgttgcccaaagaattggaagtcatttagttccaactgctactttatttctactgaatcagcatcttggcaagacagtgagaaggactgtgctagaatggaggctcacctgctggtgataaacactcaagaagagcaggatttcatcttccagaatctgcaagaagaatctgcttattttgtggggctctcagatccagaaggtcagcgacattggcaatgggttgatcagacaccatacaatgaaagttccacattctggcatccacgtgagcccagtgatcccaatgagcgctgcgttgtgctaaattttcgtaaatcacccaaaagatggggctggaatgatgttaattgtcttggtcctcaaaggtcagtttgtgagatgatgaagatccacttatgaactgaacattctccatgaacaggtggttggattggtatctgtcattgtagggatagataataagctcttcttattcatgtgtaagggaggtccatagaatttaggtggtctgtcaactattctacttatgagagaattggtctgtacattgactgattcactttttcataaagtgagcatttattgagcattttttcatgtgccagagcctgtactggaggcccccattgtgcacacatggagagaacatgagtctctcttaatttttatctggttgctaaagaattatttaccaataaaattatatgatgtggtgtctcaaa

SEQ ID NO: 3445 - DNA, 1631 bp, Homo Sapiens
  NM_194451
gtaatttcgacctgtcctttcccgggagttagcgatccctcaacccctgcactgcgctagtcctaaagaggaaatgtctctacgctgcggggatgcagcccgcaccctggggccccgggtatttgggagatatttttgcagcccagtcagaccgttaagctccttgccagataaaaaaaaggaactcctacagaatggaccagaccttcaagattttgtatctggtgatcttgcagacaggagcacctgggatgaatataaaggaaacctaaaacgccagaaaggagaaaggttaagactacctccatggctaaagacagagattcccatggggaaaaattacaataaactgaaaaatactttgcggaatttaaatctccatacagtatgtgaggaagctcgatgtcccaatattggagagtgttggggaggtggagaatatgccaccgccacagccacgatcatgttgatgggtgacacatgtacaagaggttgcagattttgttctgttaagactgcaagaaatcctcctccactggatgccagtgagccctacaatactgcaaaggcaattgcagaatggggtctggattatgttgtcctgacatctgtggatcgagatgatatgcctgatgggggagctgaacacattgcaaagaccgtatcatatttaaaggaaaggaatccaaaaatccttgtggagtgtcttactcctgattttcgaggtgatctcaaagcaatagaaaaagttgctctgtcaggattagatgtgtatgcacataatgtagaaacagtcccggaattacagagtaaggttcgtgatcctcgggccaattttgatcagtccctacgtgtactgaaacatgccaagaaggttcagcctgatgttatttctaaaacatctataatgttgggtttaggcgagaatgatgagcaagtatatgcaacaatgaaagcacttcgtgaggcagatgtagactgcttgactttaggacaatatatgcagccaacaaggcgtcaccttaaggtgaatttttcctgaaaaatctagtggctaaaagaaaaacaaaagacctctaaaacttcaacaagaccttcaagatcacagaaatttttaaaatttgattccagttaataacagaggtggtgccagaatgcctggactgcagtggatgtgccccacctctttgcttaaaaaaaaaaatgtcaatagccaggcatagtggctcacgcctgtaatcccagcactttaggaggccaaggcgggtggatcacctgaggtcaggagttcgagaccagcctggccaacatggtgaaatcctgtctccactaaaaacacaaaaattagtcaggcgtggtagtgggtgcctgtaatcccagctactcgggaggctaaggcaggagaatcacttgaacctgggagggggaggttgcagtgagccaagatcgctccattgccctccagcctgggtgacaagagcaaaactccatctcaaataaataaaaaggaaaaaaaagtcaataaactgtacaaatttaattacagtaattcatttggcttttagtgtatcttctttgtcccaattaaacagttgcttgctgtgatgtaatcttaaaaaaaaaaaaaaaaa

SEQ ID NO: 3446 - DNA, 4523 bp, Homo Sapiens
  NM_194454
atagccacggtaacggcggggtggaaagctaaggcctttgaagacctgggaccccgtagtttcgggagagggtgaggggtgaatggtgctgaggtgcgaggagagggaaggacagtaaagagcaggtttttggctttcatcgctttttctacatgtttttagcctcaccagaagtctttcatctcggtggtccaactcaggatctcagcctcattattttcttacccttctggagtgcatatgtgcctttacagtttctgtttgcaaacgctgtctagcatactaagaggatgttagcaaacctgttccatggacactaaatggcagttgtacatctcccctcatcagtcatagtgacaaccagaaatgccctccatattttccagtgatcccagtcttcaatgcgtctgtctcataatttgtaaacgtttattatcttgaagtcattgttaatctgtggtgaaaagtaattgctaaatagaaattctgagaagaaaaaggcctcatccttttcacatgatgtaggaaggtctgttgcatgagcaatgggaaatccagaaaacatagaagatgcatatgttgctgttattcgtccaaagaatactgccagtctcaattctcgggaatacagagctaagtcatatgaaattttgttgcatgaagttcccattgaaggacagaaaaaaaagagaaagaaagttttattggaaacgaaacttcaaggcaacagtgaaataacacaaggcatattggattacgtagtagaaaccaccaaaccaatttctcctgcaaaccagggtatcagaggaaaacgagttgtactaatgaaaaaatttcctctggatggagagaagatgggcagagaagcatcattatttattgttccatcagttgtcaaagataatactaaatacacatataccccaggatgcccaattttttactgcttacaagatattatgcgagtctgtagtgaatccagtactcattttgctacacttacagcaaggatgttaatagccttggataagtggttagatgaacgtcatgcacaatctcactttattccagctttattccgaccttctcctcttgagcggataaaaactaatgtcataaatcctgcatatgctactgaatcaggtcagacagaaaactcactacatatgggctatagtgcactagaaataaagagtaaaatgttagccctagagaaagcagatacctgtatttacaaccctttgtttggatcagatcttcagtatacaaatcgggtagataaagtggtaataaatccatactttggtctaggagctccagactactcaaaaatccaaatacctaaacaggaaaaatggcagagaagcatgagcagtgtcacagaagacaaggaacgacagtgggtagatgattttcctctccaccgaagcgcctgtgaaggagattcagaattactaagccgtcttctcagtgaaagattttcagtcaaccagttagatagtgaccactgggcacccattcattatgcatgctggtatggaaaagttgaggccactcgcatattgttagagaaaggaaagtgcaatccaaaccttttaaatggacaacttagttctcctcttcattttgctgctggaggaggacatgctgaaatagtacagattctcctaaaccacccagaaacggatagacatataacagaccaacaaggaagatctccattaaatatttgtgaagaaaacaaacaaaacaactgggaagaagctgcaaaattgttgaaggaagcaattaacaaaccatatgaaaaagttcgaatatacagaatggatgggtcatatcgttctgttgaattgaagcatggaaataataccacagtgcagcagataatggaaggaatgcgtctctctcaagaaactcagcaatatttcactatatggatttgttcagaaaacctcagccttcaactcaaaccatatcataaacccttgcaacatgttcgtgactggccagaaatacttgctgaattgactaatctggatcctcaaagggaaacacctcagctttttctaagaagagatgtgagacttcccttggaagttgaaaaacagattgaagacccactagctattcttattctctttgatgaagccagatataatttattgaagggcttttatacagctcctgatgctaagctgataacattggcaagtctgcttttgcaaatagtctatggaaattatgagagtaaaaaacacaagcaaggtttcctaaatgaagaaaatctaaaatccatcgtacctgttaccaaactgaaaagtaaggcacctcactggacaaatcgcatacttcatgaatacaagaatctcagtacaagtgaaggtgtcagtaaagaaatgcatcaccttcagcgcatgttcttacagaattgctgggaaattcctacttatggagcagcatttttcacaggacagatatttacaaaggcaagccccagcaatcataaagtcatccctgtgtatgtaggagtgaatataaaaggacttcatctcctcaacatggaaactaaggctttactcatcagtcttaagtatggttgttttatgtggcaattgggagatactgatacttgttttcagatccatagcatggaaaataaaatgagctttatagtacatacaaaacaggctggtctcgtggtaaaactgttaatgaagctaaatggacagttaatgcccactgaaagaaattcatgaaagagaagtaactgttactcaagccaccacattttgtaatgcagagttttttttccgtgaaagatttcttaaaatattacttttggccgagcatggtggctcacccctgtaattccagcactttgggaggctggggcaggcggatcacctgaagtcagagttcaagaccagcctggccaacatggtgaaaccctgtctctacaaaaatacaaaaattagctgggtgtggtggcgggcgcctataatcctagctactagggaggccaaggtgggagatcgcttaaacccaggaggtggaggttgtagtgagccaagattgcaccacggcacgctagcctgggtgacacagcaagactccatctcaaaaaaaaaaaaaaattactttcaacaaggcatatagtctcttgtaatatatatgtatactattacattgtacagaatctgtacttatgtttggtgtgtaatataccaattagttttatataatatcctcataagctattctaatttttgagagaaacacaaaaagttatagattgatagtctgtataatattagacaaaatagtaagctttataaaaagttatttttggtaaatggtaaggaatttggggtggaatgtgatgagattaaaatgtagctttggtataacttcatgtgtatttcaaaatatactgaacgtcaacatgatttgaataaagaaaatgtattttctacttgaaccacataacactgttatttaaaacagttttctgcagtctataaacatttctcaacatttttttaaaagtcttagttaaaatgtaaatctgatatacagtagtgtttctcaaagtatagttcatgaactccttgcatcataattacctagatgcctcttaaaaatgaagatttcagagacccattctaaacaagggcattcactctctggaagtagcatggccttgtgaacttaaatttggttttgttttttcttttttgctgttagaataatttcagacccaataaggaatttcgattattaaagttgagaaatttcacaaaactgcctggcacacaagcacacacatacatagacacattttaagtgataatctcttgatattagaagttgcatttgttaaatacatgctgtattttttatgagttgacttaatagtttatgtatattgactttgctttgtaggaagtaaatcaccagatatcttattgtttcatttaggaaagtagtgatatagatgaagagccaacttgatgaatgtgctattcataagctagaaactacagtttttccaaactaataaactgatgaattctaaataagttcagagatatagtcatatttaaagttgtcctacagtttgcagataatttttatattactattcttcacattaacttctgcttatttttaatggtactatatgtaggccttattaaaattaagattgtatggttaagtaaagttaacaagaaagcctgatttatctttaattctgtgctaggtacttttgattctacatgaacaatacccttttcagttcccttcattctaatgtcctcaactgttaccaaataccctgttgactcccaaacctaagattttagcctcaacttcttttctgaacttcaaatcttaatttccaagttatacttgttctaggtccatctaaatggtctacagagaacttcagttgaatcatagctggaaacagaatttatttcctctatttgcttcattctgtccttccactatattccctattt

SEQ ID NO: 3447 - DNA, 1665 bp, Homo Sapiens
  NM_194460
gtgcgtgccgtgcgtgagcgtgcgcgggcgcgtcggccggcgagggagcagcaaacggccggcggcgggtgccgcgcggggggcgggcggcgcggagtaggtggcggcggccatggccgaggcgtcgccgcatcccggacggtacttctgccactgctgctccgtggagatcgtcccgcgcctgccggattatatctgtccaagatgcgagtctggttttatcgaggagcttccggaagagaccaggagcacagaaaatggttctgccccctccacagctcccacagaccagagccggccaccgttggagcacgtggaccagcacctgttcacgctgccgcagggctacggacagtttgctttcggcatcttcgatgacagcttcgagatccccacgttccctcctggggcgcaggctgacgacggcagggaccctgagagccggcgggagagagaccatccgtcccggcaccggtacggcgcccgacagccccgcgcccgcctcaccacgcggcgggccaccggccggcacgaaggcgtccccacgctggaagggatcatccagcagctcgtcaacggcatcatcacgcccgccaccatccccagcctgggcccctggggagtcctgcactcaaaccctatggactacgcctggggggccaacggcctggatgccatcatcacacagctcctcaatcagtttgaaaacacaggccccccaccggcagataaagagaaaatccaggccctccccaccgtccccgtcactgaggagcacgtaggctccgggctcgagtgccctgtgtgcaaggacgactacgcgctgggtgagcgtgtgcggcagctgccctgcaaccacctgttccacgacggctgcatcgtgccctggctggagcagcacgacagctgccccgtctgccgaaaaagcctcacgggacagaacacggccacgaacccccctggcctcactggggtgagcttctcctcctcgtcgtcatcgtcctcctccagctcgcccagcaacgagaacgccacaagcaactcgtgagcccacgtcggccgtcgggaaagcacggggcctttcccacccaccctcagccagcgccacacggcacccacagactgggtgccccggcggcgccacgcttggctggtcagcgctgcaggtcccgcctgttccagggcaggacccgggcccggcccaccggccccctggcttgggaaggcgtgggccacatggtcccctctggggcgtccccagcctccccgtcctctgtctaacctcaccctctaaacgttcagcggtggaaagatttttataattttaaattattactgctttgaaataaacggacgtttgagctcacgtggcggccatgcatggtttgtggcggaagacggggcccagcggctcccccagcgctgaagcacggggttcagcggctcccccagtgctgcaggtgccgccaggacgggccacgtgggcccccagcctccccctcggccgcctccacgacccggagtaggggggctcgggaccatgaggatgaccagcaaaattcaagaacaaaactgctccaacagacttttttaaaggaaaaaatatgtgtatcttgaaagctatttaaaatacactacttacaaagagaaaaaaaaaaaaaaaaa

SEQ ID NO: 3448 - DNA, 2032 bp, Homo Sapiens
  NM_197939
gggtggcgccaaggaaggaggagaaaaggcggccgagaaaaggaggagggcaaggggaagaggaagggcgagggaggagcctgaggagactcgcccggctcaaccccgacgtccgcgccccggccgcctgttggccatggcgggcctgggcctgggctccgccgttcccgtgtggctggccgaggacgacctcggctgcatcatctgccaggggctgctggactggcccgccacgctgccctgcggccacagcttctgccgccactgcctggaggccctgtggggcgcccgcgacgcccgccgctgggcctgccccacttgccgccagggcgccgcgcagcagccgcacctgcggaagaacacgctactgcaggacctggccgacaagtaccgccgcgccgcacgcgagatacaggcgggctccgaccctgcccactgcccctgcccgggctccagttccctctccagcgcggccgcgaggccccggcgccgcccggaactgcagcgggtggcagtagagaagagcatcacagaagttgctcaggagctgacagagctggtggaacatcttgtagacattgtcagaagcctgcagaatcagaggcccctatcagaatctggaccagacaacgaactgagcatcctgggcaaggagaactcctggaagccccgtcttcctcctcatgcccattgcctgaccagagccaccctgcactcaggagagcttctcggtttgctcagtgggccatccatccaacctttaacttgaagagcctttcctgcagcctggaggtgtccaaggattcccgtacagtgactgtgtctcaccgcccacaaccctatcgctggagctgtgagaggttttctaccagccaggtcttatgttcccaggccctgtcttctggaaagcattactgggaagtggacactaggaattgcagccactgggcagttggggtggcttcctgggagatgagccgcgaccaggtcctgggaaggactatggactcttgttgtgtggaatggaaggggactagccagctctctgcatggcacatggtcaaggaaactgtccttggctcagacagacctggggtggtgggcatctggctgaaccttgaggagggaaagcttgccttctattcagtggacaatcaggagaagcttctgtatgagtgtaccatctctgcctcctctcctttgtaccctgccttctggctgtatggcttacatcctggaaattacctgataataaagcaagtaaaggtgtaaggtttcctaagggattacaacacagtggtttcctggtctctctccctgtcatcaatcagggtagtaacttgacttaagaataccactttttagaaaaattacgatagagatgggatctcactaggttgcccaggctggtgtcgaattcctggtctcaagcagtcctcccacctcagcctcccaaggtgctgggattacaggtgtgagccaccacacctggccaagaataccacttttgaagttaatccttttgtgtgatacaggatgaacttgggatgtttgaaccctggacattccaaataaagaataggcccctgcctggctcctgggagataacctctaagccattagaatatcttgcctgataagagtgtttttgtttacctgtgggccttgggccatgcagtatcagcttgaccttgcaaggtcaagctgaggagactaagttagccatgtgggcagtgaagcatgccaatgtgatcaatccctagtaaaagccctggacacctaggcatgggtgagctactctggttggtaatactctgtgcacacatcattgtagccacacatcattgctgggagaattaagcattatcctgaagactctgccaggagaggataattggaagttctcttggaccttaccttatgtgcctttcttcattgctgattttaatctgtatcctttcactgtaataaactgtaactatgagtgcaaaaaaaaaaaaaaaaaaaaaaaaaaaaaaaaaaaaaaaaaaaa

SEQ ID NO: 3449 - DNA, 2503 bp, Homo Sapiens
  NM_197948
agcatagtttcatttcctgctcttgaatatctggttgaactacttaagcttaatttgttaaactccggtaagtacctagcccacatgatttgactcagagattctcttttgtccacagacagtcatctcaggagcagaaagaaaagagctcccaaatgctatatctattcaggggctctcaagaacaatggaatatcatcctgatttagaaaatttggatgaagatggatatactcaattacacttcgactctcaaagcaataccaggatagctgttgtttcagagaaaggatcgtgtgctgcatctcctccttggcgcctcattgctgtaattttgggaatcctatgcttggtaatactggtgatagctgtggtcctgggtaccatggctatttggagatccaattcaggaagcaacacattggagaatggctactttctatcaagaaataaagagaaccacagtcaacccacacaatcatctttagaagacagtgtgactcctaccaaagctgtcaaaaccacaggggttctttccagcccttgtcctcctaattggattatatatgagaagagctgttatctattcagcatgtcactaaattcctgggatggaagtaaaagacaatgctggcaactgggctctaatctcctaaagatagacagctcaaatgaattgatttcagatcagaaccacagctacccaagaaaacccatctccaaattgtgtatggattcacgtgtcagtcatttatgaccaactgtgtagtgtgccctcatatagtatttgtgagaagaagttttcaatgtaagaggaagggtggagaaggagagagaaatatgtgaggtagtaaggaggacagaaaacagaacagaaaagagtaacagctgaggtcaagataaatgcagaaaatgtttagagagcttggccaactgtaatcttaaccaagaaattgaagggagaggctgtgatttctgtatttgtcgacctacaggtaggctagtattatttttctagttagtagatccctagacatggaatcagggcagccaagcttgagtttttattttttatttatttatttttttgagatagggtctcactttgttacccaggctggagtgcagtggcacaatctcgactcactgcagctatctctcgcctcagcccctcaagtagctgggactacaggtgcatgccaccatgccaggctaatttttggtgttttttgtagagactgggttttgccatgttgaccaagctggtctctaactcctgggcttaagtgatctgcccgccttggcctcccaaagtgctgggattacagatgtgagccaccacacctggccccaagcttgaattttcattctgccattgacttggcatttaccttgggtaagccataagcgaatcttaatttctggctctatcagagttgtttcatgctcaacaatgccattgaagtgcacggtgtgttgccacgatttgaccctcaacttctagcagtatatcagttatgaactgagggtgaaatatatttctgaatagctaaatgaagaaatgggaaaaaatcttcaccacagtcagagcaattttattattttcatcagtatgatcataattatgattatcatcttagtaaaaagcaggaactcctactttttctttatcaattaaatagctcagagagtacatctgccatatctctaatagaatctttttttttttttttttttttgagacagagtttcgctcttgttgcccaggctggagtgcaacggcacgatctcggctcaccgcaacctccgccccctgggttcaagcaattctcctgcctcagcctcccaagtagctgggattacagtcaggcaccaccacacccggctaattttgtatttttttagtagagacagggtttctccatgtcggtcagggtagtcccgaactcctgacctcaagtgatctgcctgcctcggcctcccaagtgctgggattacaggcgtgagccactgcacccagcctagaatcttgtataatatgtaattgtagggaaactgctctcataggaaagttttctgctttttaaatacaaaaatacataaaaatacataaaatctgatgatgaatataaaaaagtaaccaacctcattggaacaagtattaacattttggaatatgttttattagttttgtgatgtactgttttacaatttttaccatttttttcagtaattactgtaaaatggtattattggaatgaaactatatttcctcatgtgctgatttgtcttatttttttcatactttcccactggtgctatttttatttccaatggatatttctgtattactagggaggcatttacagtcctctaatgttgattaatatgtgaaaagaaattgtaccaattttactaaattatgcagtttaaaatggatgattttatgttatgtggatttcatttcaataaaaaaaaactcttatcaaaaaaaaaaaaaaaa

SEQ ID NO: 3450 - DNA, 2385 bp, Homo Sapiens
  NM_197950
agcatagtttcatttcctgctcttgaatatctggttgaactacttaagcttaatttgttaaactccggtaagtacctagcccacatgatttgactcagagattctcttttgtccacagacagtcatctcaggagcagaaagaaaagagctcccaaatgctatatctattcaggggctctcaagaacaatggaatatcatcctgatttagaaaatttggatgaagatggatatactcaattacacttcgactctcaaagcaataccaggatagctgttgtttcagagaaaggggttctttccagcccttgtcctcctaattggattatatatgagaagagctgttatctattcagcatgtcactaaattcctgggatggaagtaaaagacaatgctggcaactgggctctaatctcctaaagatagacagctcaaatgaattgggatttatagtaaaacaagtgtcttcccaacctgataattcattttggataggcctttctcggccccagactgaggtaccatggctctgggaggatggatcaacattctcttctaacttatttcagatcagaaccacagctacccaagaaaacccatctccaaattgtgtatggattcacgtgtcagtcatttatgaccaactgtgtagtgtgccctcatatagtatttgtgagaagaagttttcaatgtaagaggaagggtggagaaggagagagaaatatgtgaggtagtaaggaggacagaaaacagaacagaaaagagtaacagctgaggtcaagataaatgcagaaaatgtttagagagcttggccaactgtaatcttaaccaagaaattgaagggagaggctgtgatttctgtatttgtcgacctacaggtaggctagtattatttttctagttagtagatccctagacatggaatcagggcagccaagcttgagtttttattttttatttatttatttttttgagatagggtctcactttgttacccaggctggagtgcagtggcacaatctcgactcactgcagctatctctcgcctcagcccctcaagtagctgggactacaggtgcatgccaccatgccaggctaatttttggtgttttttgtagagactgggttttgccatgttgaccaagctggtctctaactcctgggcttaagtgatctgcccgccttggcctcccaaagtgctgggattacagatgtgagccaccacacctggccccaagcttgaattttcattctgccattgacttggcatttaccttgggtaagccataagcgaatcttaatttctggctctatcagagttgtttcatgctcaacaatgccattgaagtgcacggtgtgttgccacgatttgaccctcaacttctagcagtatatcagttatgaactgagggtgaaatatatttctgaatagctaaatgaagaaatgggaaaaaatcttcaccacagtcagagcaattttattattttcatcagtatgatcataattatgattatcatcttagtaaaaagcaggaactcctactttttctttatcaattaaatagctcagagagtacatctgccatatctctaatagaatctttttttttttttttttttttgagacagagtttcgctcttgttgcccaggctggagtgcaacggcacgatctcggctcaccgcaacctccgccccctgggttcaagcaattctcctgcctcagcctcccaagtagctgggattacagtcaggcaccaccacacccggctaattttgtatttttttagtagagacagggtttctccatgtcggtcagggtagtcccgaactcctgacctcaagtgatctgcctgcctcggcctcccaagtgctgggattacaggcgtgagccactgcacccagcctagaatcttgtataatatgtaattgtagggaaactgctctcataggaaagttttctgctttttaaatacaaaaatacataaaaatacataaaatctgatgatgaatataaaaaagtaaccaacctcattggaacaagtattaacattttggaatatgttttattagttttgtgatgtactgttttacaatttttaccatttttttcagtaattactgtaaaatggtattattggaatgaaactatatttcctcatgtgctgatttgtcttatttttttcatactttcccactggtgctatttttatttccaatggatatttctgtattactagggaggcatttacagtcctctaatgttgattaatatgtgaaaagaaattgtaccaattttactaaattatgcagtttaaaatggatgattttatgttatgtggatttcatttcaataaaaaaaaactcttatcaaaaaaaaaaaaaaaa

SEQ ID NO: 3451 - DNA, 3408 bp, Homo Sapiens
  NM_197956
attacgctgctggctggcagcggccgggccggtcggggctgggccctacgcactttgcgtagcgaggggggttaccaaaggcctagtgcttggcctcgagcaagcctggcctatcccctgtagggggtgggtgaggggcgaggctgaggaagaagagaaggggaattggggcgcttgaggggattataatttctttaaaaagaggggaggggagaggccatggccgtcccagccaagaaaaggaagatgaacttctcagagcgggaggtggagatcatcgtggaggagctggagctgaagaagcacctgctggtgaaccacttcaacgccggggtacccctggccgccaagagtgcggcctggcacggcatcctgagaagggtcaacgccgtggccacctgccgcagagagctgcctgaggtcaagaagaagtggtctgacctcaagaccgaggtccgtcgcaaggttgcccaggtccgggccgccgtggagggtggtgaggcgccggggcccactgaggaggacggagctggggggcctgggacaggcggtggcagtggcggcggtggcccagctgtagccccagtgctgctgacccccatgcaacaacgtatctgcaacctgctgggcgaggccaccatcatcagcctgcccagcaccacagagatccaccctgtggccctcggaccctcggccaccgcagccgcagccacggtcaccctgacacagatccccacagagaccacctatcacacgctggaggagggcgtggtggagtactgcacggctgaggcgcccccacctctgccaccagagacccctgtggacatgatggcccagcatgcagacacgtcggtcaagccgcaagcgctcaagagccgcattgctctcaactccgccaagctgatacaggagcagcgggtcaccaacctgcatgtgaaggagatcgcacagcacctggaacagcagaacgacctactgcagatgatccgccgctcccaggaagtgcaggcctgtgcccaggagcgccaggcccaggccatggagggcacacaggctgccctgagcgtcctcatccaggtcctccggcctatgatcaaagatttccgccgctacctgcagagcaacacagctaacccggcccccgcctctgaccctgggcaggtggcccagaatgggcagccagacagcatcatccagtgagggcaggggtcaggccagccttctgccatgatgggatgaaaactccatggacttgtaagtgggtcctgtgattggccttggccttagaccggccacgtgcacagctccctctttaataaacgcttaggggttgcactgtttttgagaagaggaatttgttgggctcctgggacccaaactcatactccccctacttgagctgccttgctaagatccagaagattggttagcagggggtcacgtgtgcatgtgatgggacatgtgttgtcatgaccccgggcttgtgacatgacccagccttggtcttggacaactgtaaggaacaacacaacgggctgtcactgggggccgtcacccagcctgggtctctactgagctgcccaaccccaggtgccatcctttcgagtagggtaatgtcactgatgctggcagttgagcaataatatcttcctcctttgggaggtagtgtgactgaggaggaaaccccacccttttctcctcactgtgcctcagttctcaggggactccaatgactgttgtgctctcccccgaccccaccccaggcacagcgcaggcccttgttaggtagtgtgctgggacgcctccgtaatacatgcagtgtgcagccagtctggctcaggaatgctgtgtatggtggggacggtttggccactctctggttttcaacagcatctctgggcagccctttggtggtttgtccctagagcttttgactcaggtcaagctttggatgctgtaaatttttgagaaagccaactagtgtggaagcttgctgccccactgcagtgggtctgagtgacctgttggctttgtgcggaggcttgcatccagccagttgtatttattctgtgtgtgaacccctcctaggaaggcctccaggaaggctgccctgtggccacacccatcctcctttcctctctgctgactccacatttccaaaattcagtgcaaaaaaagccctgctgagcatcacatgctggactcttcccctgccacaccgctcagtgccttctgttctcttgagactccctctgagtagctgagtgaatccaaagccataattgaccctgaacgtaggaggaggaaaaggcgaagctgacctaagaagtgggaccctggccgggcgaggtggctcaagtctgtaatcccagcgctttgggaggccgaggcgggtggatcacgaggtcaagagatcaagaccatcctggccaacatgatgaaaccccgtctctactaaaaacacaaaaattagctgggcgtggtggcacacgcctgtagtcccagctacccgggaggctgaggcaggagaatcgcttgaacccaggaggcggagattgcagtgagccgagattgcaccgctgcactccagcctggcgacagagcgagactctgtctcaaaaaaaaaacaaagaaaaaaccaaaaaaacaaatgggaccctttggattctatgctcagggaagagcaggcagagccttggagtgctgaaggaggtgctgttccctgttccatctttacactttctcttctgagatgtctgtaaggattttacccagatgccatttgtctgtttcattttcagactcaccatcaattaccaaggcccttgcatctccccagatcgtttcccaagtttggcgatttgctgtcggtgcctcagccacatatgaccaatggttacaactcagggctccagacctcagctaaaaagagaagacgctgccctcctgggcacgaacgtttagaatgctcaactcctctattgtgaccacaggaaggtggccctgaagatgcaccgaagacagctgggaggtgactgctgtactgtcagcctctctgtggaggcattcgtgcagtgccagctaaaagggaggtgaagggggatatcggacccagcgagggagttgctggtagaaggaaagctcttctcagtgtggctggattaagagcagcctagcagcttgggcacctccactctgtgcggtctgatggccccagcaaggtcgctgcagggacttcctgaggacttggtttggtttttttctggggttggaaatctgagccaatattgtgtctgttccatttgggtatgaagaggaagtctggatcacttaaactgactagttatttccgggtcataattttaaattaaagacatatcacttttttatacacaaaaaaaaaaa

SEQ ID NO: 3452 - DNA, 2144 bp, Homo Sapiens
  NM_197967
ggaggaagcgcgcggggcgccataaggaggaagcgggtagtcgaccgtgtccgcgcgcctgggagacgctgcctcggcccggacgcgcccgcgcccccgcggctggagggtggtcaacaacggttccagcctcagggatgagtgcatcacaaacctactggtgtttggcttcctccaaagctgttctgacaacagcttccgcagagagctggacgcactgggccacgagctgccagtgctggctccccagtgggagggctacgatgagctgcagactgatggcaaccgcagcagccactcccgcttgggaagaatagaggcagattctgaaagtcaagaagacatcatccggaatattgccaggcacctcgcccaggtcggggacagcatggaccgtagcatccctccgggcctggtgaacggcctggccctgcagctcaggaacaccagccggtcggaggaggaccggaacagggacctggccactgccctggagcagctgctgcaggcctaccctagagacatggagaaggagaagaccatgctggtgctggccctgctgctggccaagaaggtggccagtcacacgccgtccttgctccgtgatgtctttcacacaacagtgaattttattaaccagaacctacgcacctacgtgaggagcttagccagaaatgggatggactgaacggacagttccagaagtgtgactggctaaagctcgatgtggtcacagctgtatagctgcttccagtgtagacggagccctggcatgtcaacagcgttcctagagaagacaggctggaagatagctgtgacttctattttaaagacaatgttaaacttataacccactttaaaatatctacattaatatacttgaatgaaaatgtccatttacacgtatttgaatggccttcatatcatccacacatgaatctgcacatctgtaaatctacacacggtgcctttatttccactgtgcaggttcccacttaaaaattaaattggaaagcaggtttcaaggaagtagaaacaaaatacaatttttttggtaaaaaaaaattactgtttattaaagtacaaccatagaggatggtcttacagcaggcagtatcctgtttgaggaaagcaagaatcagagaaggaacataccccttacaaatgaaaaattccactcaaaatagggactatctatcttaatactaaggaaccaacaatcttcctgtttaaaaaaccacatggcacagagattctgaactaaagtgctgcactcaaatgatgggaagtccggccccagtacacaggggcttgactttttcaacttcgtttcctttgttggagtcaaaaagaaccacttgtggttctaaaaggtgtgaaggtgatttaagggcccaggtcagccactgtttgtttacaaaatcaggtaactaactgcatacactttttctctttccatgacatcaagactttgctaaagacatgaagccacgggtgccagaagctactgcgatgccccgggagttagccccctggtaatagctgtaaacttccaatttctagccatacgctcagctcatccatgcctcagaagtgcatctggagagaacaggtttctaagcataaaagatgaaagagcagttggactttttaaaaattcagcaaagtggttccctctcttagggacagtcaaaaccaagtcacttaggtagtaccaaaataaataaggaaaagcttagctttagaaacagtgcaacactggtctgctgttccagtggtaagctatgtcccaggaatcagtttaaaagcacgacagtggatgctgggtccatatcacacacattgctgtgaacaggaaactcctgtgaccacaacatgaggccactggagacgcatatgagtaagggcactgacggactcatgatttcttcttaccagatgctttcctgttctttaagagtttaaaatcatcagaaaggaaaaacaaactctatattgttcagcatgcaatacataccacgctagggctggctcaattgaaagtgggcaaaagcttacaaatactaaaaagaagtgctgccgcgcagtgtggaggccactgtttggaaataaatcttcctaacactacaaaaaaaaaaaaaaaa

SEQ ID NO: 3453 - DNA, 2927 bp, Homo Sapiens
  NM_197974
aatcaaaaaactaattcttccaaaaagagattgttattattcctcacaataaccagatagcctctgctttctttttcctttcttcggaatgagagactcaaccataatagaaagaatggagaactattaaccaccattcttcagtgggctgtgattttcagaggggaatactaagaaatggttttccatactggaacccaaaggtaaagacactcaaggacagacatttttggcagagctgctcactccttgctcagctcagttttctgtgcttggaccctctgggcccatcctggccatggtgggtgaagacgctgatctgccctgtcacctgttcccgaccatgagtgcagagaccatggagctgaggtgggtgagttccagcctaaggcaggtggtgaacgtgtatgcagatggaaaggaagtggaagacaggcagagtgcaccgtatcgagggagaacttcgattctgcgggatggcatcactgcagggaaggctgctctccgaatacacaacgtcacagcctctgacagtggaaagtacttgtgttatttccaagatggtgacttctacgaaaaagccctggtggagctgaaggttgcagcattgggttctgatcttcacattgaagtgaagggttatgaggatggagggatccatctggagtgcaggtccactggctggtacccccaaccccaaataaagtggagcgacaccaagggagagaacatcccggctgtggaagcacctgtggttgcagatggagtgggcctgtatgcagtagcagcatctgtgatcatgagaggcagctctggtgggggtgtatcctgcatcatcagaaattccctcctcggcctggaaaagacagccagcatatccatcgcagaccccttcttcaggagcgcccagccctggatcgcggccctggcagggaccctgcctatctcgttgctgcttctcgcaggagccagttacttcttgtggagacaacagaaggaaaaaattgctctgtccagggagacagaaagagagcgagagatgaaagaaatgggatacgctgcaacagagcaagaaataagcctaagagagtggaggaaaatccagtacatggctcgtggagagaagtctttggcctatcatgaatggaaaatggccctcttcaaacctgcggatgtgattctggatccagacacggcaaacgccatcctccttgtttctgaggaccagaggagtgtgcagcgtgctgaagagccgcgggatctgccagacaaccctgagagatttgaatggcgttactgtgtccttggctgtgaaaacttcacatcagggagacattactgggaggtggaagtgggggacagaaaagagtggcatattggggtatgtagtaagaacgtggagaggaaaaaaggttgggtcaaaatgacaccggagaacggatactggactatgggcctgactgatgggaataagtatcgggctctcactgagcccagaaccaacctgaaacttcctgagcctcctaggaaagtggggatcttcctggactatgagactggagagatctcgttctataatgccacagatggatctcatatctacacctttccgcacgcctctttctctgagcctctatatcctgttttcagaattttgaccttggagcccactgccctgaccatttgcccaataccaaaagaagtagagagttcccccgatcctgacctagtgcctgatcattccctggagacaccactgaccccgggcttagctaatgaaagtggggagcctcaggctgaagtaacatctctgcttctccctgcccaccctggagctgaggtctccccttctgcaacaaccaatcagaaccataagctacaggcacgcactgaagcactttactgatattcattccattattccatatgacagttgttttgagtttcgtaccaccttattgtccccttatacagataaggaaactggggtgcagaaaggtgaattaactttacaaagtagacatgacaagtgaacagcagagctgggatctaaacagcaataactaacattaacagagaatttaaaatgttcttagtgctgtgttataagctttggtggatgtcactcctttaatcctcacaacaccctgtcgggtagtcatattttgcaagtatggaagctgaggcagggcaacatgaagtaacttacataactcatacagtaatttgtgcagttgggagatgttcagccttagtccctggctaattgcctgttcttttccagcctgattttttttcccacaggaagagcccacatgtagccctgaggtttccttcccaggacagctgcagggtagagatcattttaagtgcttgtggagttgacatccctattgactctttcccagctgatatcagagacttagacccagcactccttggattagctctgcagagtgtcttggttgagagaataacctcatagtaccaacatgacatgtgacttggaaagagactagaggccacacttgataaatcatggggcacagatatgttcccacccaacaaatgtgataagtgattgtgcagccagagccagccttccttcaatcaaggtttccaggcagagcaaataccctagagattctctgtgatataggaaatttggatcaaggaagctaaaagaattacagggatgtttttaatcccactatggactcagtctcctggaaataggtctgtccactcctggtcattggtggatgttaaacccatattcctttcaactgctgcctgctagggaaaactgctcctcattatcatcactattattgctcaccactgtatcccctctacttggcaagtggttgtcaagttctagttgttcaataaatgtgttaataatgcttaaaaaaaaaaaaaaaaaa

SEQ ID NO: 3454 - DNA, 1379 bp, Homo Sapiens
  NM_198038
cgtaaagcgccattacgcagagagaaagttacgaggttcgtggccgcggtttccccaggcagctggcgctggaggcttcggcgtcacgtgctgaaactcgttttcatcttcttggtttcatcttaataccaacgtcatgtctggttctaatggttccaaagaaaattctcacaataaggctcggacgtctccttacccaggttcaaaagttgaacgaagccaggttcctaatgagaaagtgggctggcttgttgagtggcaagactataagcctgtggaatacactgcagtctctgtcttggctggacccaggtgggcagatcctcagatcagtgaaagtaatttttctcccaagtttaacgaaaaggatgggcatgttgagagaaagagcaagaatggcctgtatgagattgaaaatggaagaccgagaaatcctgcaggacggactggactggtgggccgggggcttttggggcgatggggcccaaatcacgctgcagatcccattataaccagatggaaaagggatagcagtggaaataaaatcatgcatcctgtttctgggaagcatatcttacaatttgttgcaataaaaaggaaagactgtggagaatgggcaatcccaggggggatggtggatccaggagagaagattagtgccacactgaaaagagaatttggtgaggaagctctcaactccttacagaaaaccagtgctgagaagagagaaatagaggaaaagttgcacaaactcttcagccaagaccacctagtgatatataagggatatgttgatgatcctcgaaacactgataatgcatggatggagacagaagctgtgaactaccatgacgaaacaggtgagataatggataatcttatgctagaagctggagatgatgctggaaaagtgaaatgggtggacatcaatgataaactgaagctttatgccagtcactctcaattcatcaaacttgtggctgagaaacgagatgcacactggagcgaggactctgaagctgactgccatgcgttgtagctgatggtctccgtgtaagccaaaggcccacagaggagcatatactgaaaagaaggcagtatcacagaatttatactataaaaagggcagggtaggccacttggcctatttactttcaaaacaatttgcatttagagtgtttcgcatcagaataacatgagtaagatgaactggaacacaaaattttcagctctttggtcaaaaggaatataagtaatcatattttgtatgtattcgatttaagcatggcttaaattaaatttaaacaactaatgctctttgaagaatcataatcagaataaagataaattcttgatcagctataaaaaaaaaaaaaaaa

SEQ ID NO: 3455 - DNA, 1690 bp, Homo Sapiens
  NM_198053
tgctttctcaaaggccccacagtcctccacttcctggggaggtagctgcagaataaaaccagcagagactccttttctcctaaccgtcccggccaccgctgcctcagcctctgcctcccagcctctttctgagggaaaggacaagatgaagtggaaggcgcttttcaccgcggccatcctgcaggcacagttgccgattacagaggcacagagctttggcctgctggatcccaaactctgctacctgctggatggaatcctcttcatctatggtgtcattctcactgccttgttcctgagagtgaagttcagcaggagcgcagacgcccccgcgtaccagcagggccagaaccagctctataacgagctcaatctaggacgaagagaggagtacgatgttttggacaagagacgtggccgggaccctgagatggggggaaagccgcagagaaggaagaaccctcaggaaggcctgtacaatgaactgcagaaagataagatggcggaggcctacagtgagattgggatgaaaggcgagcgccggaggggcaaggggcacgatggcctttaccagggtctcagtacagccaccaaggacacctacgacgcccttcacatgcaggccctgccccctcgctaacagccaggggatttcaccactcaaaggccagacctgcagacgcccagattatgagacacaggatgaagcatttacaacccggttcactcttctcagccactgaagtattcccctttatgtacaggatgctttggttatatttagctccaaaccttcacacacagactgttgtccctgcactctttaagggagtgtactcccagggcttacggccctggccttgggccctctggtttgccggtggtgcaggtagacctgtctcctggcggttcctcgttctccctgggaggcgggcgcactgcctctcacagctgagttgttgagtctgttttgtaaagtccccagagaaagcgcagatgctagcacatgccctaatgtctgtatcactctgtgtctgagtggcttcactcctgctgtaaatttggcttctgttgtcaccttcacctcctttcaaggtaactgtactgggccatgttgtgcctccctggtgagagggccgggcagaggggcagatggaaaggagcctaggccaggtgcaaccagggagctgcaggggcatgggaaggtgggcgggcaggggagggtcagccagggcctgcgagggcagcgggagcctccctgcctcaggcctctgtgccgcaccattgaactgtaccatgtgctacaggggccagaagatgaacagactgaccttgatgagctgtgcacaaagtggcataaaaaacatgtggttacacagtgtgaataaagtgctgcggagcaagaggaggccgttgattcacttcacgctttcagcgaatgacaaaatcatctttgtgaaggcctcgcaggaagacccaacacatgggacctataactgcccagcggacagtggcaggacaggaaaaacccgtcaatgtactaggatactgctgcgtcattacagggcacaggccatggatggaaaacgctctctgctctgctttttttctactgttttaatttatactggcatgctaaagccttcctattttgcataataaatgcttcagtgaaaatgcaaaaaaaaaa

SEQ ID NO: 3456 - DNA, 2938 bp, Homo Sapiens
  NM_198055
gcgcacgtacacacgaagggcctgctgactacatctgccggaaagcatcgggccaagcctttctccattttgcggtctaggaagtagcagaggccccttcctgtagggagttgccatggagacgcggtggggcaccgacggagttctaatgacggccgtgattggtgcaggatcctgctaatctcaggaaggcccgtagagaagtgaggaaaacgtggtggggggcatgcgcgatctggtaggcggtgctgccgtctgttgtacctgagaggcttgcgcatgccgacgcacggattcgaggcggggagcatgggaagaagcggccaggagtatgacctgatcattgcgaccaccgctaggggaagggaggagagggtgtagaaacggggacgagggtgggggaagggcaaggaggcgctcgagctggtgcgcggagcatcctgggagacgtagtccagcgggagggggaagtcgaagactgcgcgtgctcaggagcgcggagcggcccgctgagcgcagaggggcagacactggcctcagatacctgacctggtaccctctatgaggcctgcggtgctgggctccccagaccgagcacccccagaagatgaggggcctgtcatggtgaagctagaggactctgaggaggagggtgaggctgccttatgggacccaggccctgaagctgcacgcctgcgtttccggtgcttccgctatgaggaggccacagggccccaagaggccctggcccagctccgagagctgtgtcgccagtggctgcgtccagaggtacgctccaaggagcagatgctggagctgttggtgctggagcagttcctgggcgcactgccccctgagatccaggcccgtgtgcaggggcagcggccaggcagccccgaggaggctgctgccctagtagatgggctgcgccgggagccgggcggaccccggagatgggtcacagtccaggtgcagggccaggaggtcctatcagagaagatggagccctccagtttccagcccctacctgaaactgagcctccaactccagagcctgggcccaagacacctcctaggactatgcaggaatcaccactgggcctgcaggtgaaagaggagtcagaggttacagaggactcagatttcctggagtctgggcctctagctgccacccaggagtctgtacccaccctcctgcctgaggaggcccagagatgtgggaccgtgctggaccagatctttccccacagcaagactgggcctgagggtccctcatggagggagcaccccagggccctgtggcatgaggaagctgggggcatcttctccccagggttcgcgctgcagctaggcagcatctccgcaggtccaggtagtgtaagccctcacctccacgtcccctgggacctcggcatggctggcctttctggccagatccaatcaccctcccgcgaaggtggctttgcgcatgcgcttctgctccccagcgatctgaggagtgaacaggaccccacggacgaggatccctgccggggtgtgggccctgctctgatcaccacccgctggcgctcccccaggggccggagccggggccgccccagcactgggggcggggtggttaggggcggccgttgcgatgtatgtggcaaggtgttcagccaacgcagcaacctgctgaggcaccagaagatccacacgggtgagcgaccattcgtgtgcagcgagtgcggccgcagcttcagccgcagctcgcacctgctgcgccaccagcttacgcacaccgaggagcggccgttcgtgtgcggcgactgtggccagggcttcgtgcgcagcgcgcgcctggaagagcatcggagagtgcacacgggcgaacagcctttccgttgcgctgagtgcggccagagcttccggcagcgctccaatctgctgcagcaccagcgcatccacggcgatcccccgggccctggcgctaagcccccggcccctcctggtgcgcccgagcctcccggcccctttccgtgcagcgagtgccgcgagagcttcgcgcggcgcgccgtgctgctggagcaccaggcggtacacacgggcgacaagtcctttggctgcgtcgagtgcggcgagcgcttcggccgccgctcagtgctgctgcagcaccggcgcgtgcacagtggcgagcggcccttcgcctgtgccgagtgcggccagagcttccggcagcgctccaacctgacgcagcaccggcgcatccacaccggggagcggcccttcgcctgcgccgagtgtggcaaggccttccgccagcggcctacgctcacgcagcatctccgcgtacacacgggcgagaaaccctttgcctgccccgagtgtggccagcgcttcagccagcgcctcaagctcacgcgtcatcagaggacacacaccggcgaaaagccctaccactgcggtgagtgcggcctgggcttcacgcaggtctcgcggctcaccgagcaccagcgcatccacacgggcgaacggcccttcgcctgccccgagtgcggccagagctttcggcagcacgccaacctcacccagcaccggcgcatccacacgggtgaacggccctacgcatgccctgagtgtggcaaggccttccgccagcggcccacgctcacgcagcatctgcgcacccaccgacgagagaagcccttcgcctgccaggactgtggccgccgcttccaccagagcaccaagctcattcagcaccagcgcgtccacagcgccgagtagctccagccgggacgcactgtgtccgccatggtcagaacacctacctcccctggttattgtgaggctggcgattacataagtataagcaggtccgcccagggcttggctactgtaggtgtccaataaacagtagatggaaactgggtctccacccaaaaaaaaaaaaaaaaaa

SEQ ID NO: 3457 - DNA, 2789 bp, Homo Sapiens
  NM_198075
agcctggagtaggagacagcgcctggaggtggagggcgcccagggccgagctgccagggccggacacctaggctgagccctcagccggccaactcgcctggcacaggggcagctctagacgggatggagaggatgcatcttcagtgtccacacgtggtcaacagataaaagccatggccagaacgttctaagtggctacatgtgcatctgcctgttcacggattccttcgacaaatatttgagcatcccctcctgcgactgtggacagcagaggagcacgcaggccacgtgcaggccacgtgcagcccacagctctggggcgaggcaggccctcaaccgaacacgtatagagacagggtttcaccgtgttagccaggatggtctcaatctcctgacctcgtgatctgcccgccgcggcctcccaaagtgctgggattacaggcgtgagccactgcgccccgccagacgtctgcatctttaaggggcaacaccaggtgacatgtgaatggatctgggctgggacagatcccgtgggcctcggcggagcacctccagcgtccgggtgcgggagctgagctggcaaggcctgcacaacccctgcccacagagcaagggccctggcagtcagagggacagacttggagagcagctggtggaagagtacctgtcccctgcccggctgcaggccctggcccgggtggatgaccttcggctggtgaggacgctggagatgtgtgtggacactcgtgagggcagcctggggaactttggggtgcacctgcccaacctggaccaactgaagctgaacggcagccacctgggctccctgagggacttgggcacgtctctgggccacctgcaggtgctgtggctggctcgctgtggcctcgctgacctggatggcatcgcctctttgccagcacttaaggaactctacgcctcctacaacaacatctcggacctgagcccactgtgcctgctggaacaattggaggtgctggacctggagggcaacagcgtggaggacctggggcaggtgcgctacttgcagctgtgcccacgcctggccatgctcaccctggagggcaacctggtgtgcctacagccggcccctggccccaccaacaaggtgcccaggggctacaactacagggcagaggtgaggaagctcattccccagctgcaggtcctggacgaagtgccggccgcacacacaggcccaccggcccccccgcggctgagccaggactggcttgcggtgaaggaggccatcaagaagggcaacggccttcccccgctggactgtccccgtggagcccccatccggagacttgaccccgagctgtccctgcctgagacgcagtcccgggcctccaggccctggcccttctccctgctggtccgtgggggccccctgcctgaaggcctgctttctgaggacctggccccagaagataacaccagcagcctcacccatggtgctggccaagtcctctgtgggaaccccaccaagggcctgcgggagcgtaggcaccagtgccaggccagggagccccccgagcagctgccccaacacaggccaggagatccggccgccagcacttccaccccagagcctgaccctgcagacagctctgacttcctggccttggctgggctcagggcctggagggaacatggcgtgcgccccctcccctataggcacccggagtcccaacaggaaggggctgtagccccctggggcccacggagggtccctgaagagcaagtgcaccaggcagagcccaagactccctccagccccccaagcctggcctcagagccctccgggacctcgagccagcacctggtcccttcacctcccaagcacccaaggccacgagattctggcagcagctccccgcggtggtcgacagacctgcagtccagggggcgtcggctccgagtcctgggcagctgggggcctggcctgggtgatggggtggctgcagtgcctgtcctgagagccctggaggtggcctcacgcctgagccctcgagcccagggatgtcctggcccaaagccagcaccagatgcagcagctagacctcccagggcagctgaactctctcaccccagccccgtccccacttaatatagcccccactgccaggcttccctgtgctggggccacgacttgcccacatatgtggtcacagagcacagaatacctgggcgggtgtgttggggggtggaaggagtgcctggccctggggaggaccctcttggtggaggggagtgggggactgggaccagccagggaggcagcagaggctggaacccagtttaggcccccaactgggtttggcctggggagggagggtccggctccccagcccttccttagggccaggctttcccgcgggcacgggggtggggggtggtcacccgagcaggcctgtgagaggcctctcctgctagaattgggcatggccgaggggcaggggctggagctgcgagtccaccactcccttgccggccccagggtaagagccacctcctaggccgcagtggcccaaggtcccagctgctcgcctgaggccgccgggggtgcggtccaggcctcccgtctccgggggatctgtagggttcccgcactgcgatagggcggcccgttccctcctcttggcgcaggacgccccggaacccaaaccaacatttccagctctcaggtgtacagaaatgcggtttactttgtaggccacgttggttcaataaatgatgcagcggacacaaaaaaaaaaaaaaaa

SEQ ID NO: 3458 - DNA, 2632 bp, Homo Sapiens
  NM_198076
agaaatggcggttggggcggagcagggggctggcgcgggaagcggggctgtctggctcggttacgcccccacctcgccaggaatctaggagtcggtttgttttccgaacccatctccttccgctctcccgcccctgcaggctgtgtgccgagcttggaagaaagtgtgacccgttcgacggaacaaaggacatgacagcccggccccgtgcggccactgcggagcgttaggaacattccctaaaatggcggccggcgcgtcggaacagggcgggaggcggcggcgcgtgggggcgggacggggaggggcgcggccagccgggcttctgcttccgcgaccccggcggtgcagggcgggtggagtcgcggagtagtcctcatggccgccccgccggagcccggtgagcccgaggagaggaagtcccttaagctcctaggatttttagatgttgaaaatactccctgcgcccggcattcaatattgtatggttcattaggatctgttgtggctggctttggacattttttgttcactagtagaattagaagatcatgtgatgttggagtaggagggtttatcttggtgactttgggatgctggtttcattgtaggtataattatgcaaagcaaagaatccaggaaagaattgccagagaagaaattaaaaagaagatattatatgaaggtacccacctcgatcctgaaagaaaacacaacggcagcagcagcaattgaacaatcttgagcatagaagtcaatgtaaacgaagttaagatcaaccacataaaacatttcatgtgcaataagctctcaatcaagtaaataaagtttaagttgtagtcatttttttcccacacttgtgtggaatgaaaacttgccagtttattctggccctgtgtctactgccaggatagcattcttacgtgttacatatagtggacttgtcatccttaaaatgtgaacagaatttattggcagtgtggcaaagaattataaaacatagtgtttaatgtacttggagtttccttgtagtagtaagtatagagtttgatgataagtaaacgtcccttaacaaaaacctcaaccttattactatcccattaaaaaacagcaaatacttactgagttcttgtaagagctaatgtcattgtaagatttaaaactaagggcttttatcactttgcaaattattttttaaatgcattcatcatttgacagtgttctctcatttcttaaaatgcgagtcatcttccaaaagagttgtttttaactgccctaaacatttttggggaagtatgcagggtttaaatttttaagtataattagttctgaattaaaatatgcacatggaacttgtctggcagactgatgcaatagtaaaacaactgcagaattactattaatgtaaacaatccatttgaaagtcaatcagctgctcccattaaaatattatttaaaatacaatacccacagcatctaactaaatcctcaggatttattctccgggagaaattatccctttctaggaaaatgaagttatttctggttttaattcatacaatactttaagaaaatctgttaaatataacaaaacacaagctagatgcttaagaaatgcttaaagaaatattggggcgaaggtaacagcagtcaacaggattgtggccattactggtcctattattttgatgtaccatggaaggcacagaaatcgagcaaggaagaaaatattagttattttgatctacatctttttctaaagaaaagtggagcttgcctccagttcaattcacaagagcattttccctcccatgcccaccttttcttgtggctgtcgctaggaaggatgcagaggctgtgtggtttaccaaatgccttaacttagcagtgaatgacaactgtcaaacacatgttgagggaaaatttttactgattcacaaaaaggaagacagtttgcccactcttagtggcacaaatcaaagctgcatgcactacattatccaaattagtcgtaaccaaatagttaaaaaattctgctgggcacggtggctcatacctgtaatcccagcactttgggaggccgaggcagttggatcacctgaggttaggagtttgagaccagcctggccaacagggtgaaaccctgtctcgtctaaaaatacaaaaattagccgggcgtggtggtgcatgcctgtagtcccaggtactcaggaggctgaggcaggagaatcacttgaacccgaggtggggcaggcggaggttgcagtaagccaagatcgcgccattgcactctagcctaggtgacagagtgagactccatctcaaaaaaaaaaaaaaattccataggatgttcaaccatgttttcagaggccgcactgcatgaatgcgggaaaatgttgatgatcactaatcaataatctgatatttaacaaaatatggacaggccacttatgctcagttttaccttagttattccttggtatccacaggcccaagtccctttaaataaaataccctcatatttccatataatctacatacattctcccatatactttaaatcatctctagattacttataatgtctaatacaaaataaatgctatgtaaatgtaaaaaaaaaaaaaaaaaa

SEQ ID NO: 3459 - DNA, 4307 bp, Homo Sapiens
  NM_198080
atatttggactcggctgcccgtgcccaggaatttcccgtcatgcctcccgccgccccgtccgtcgcccggagccggggagggagggagcgaggttcggacaccggcggcggctgcctggcctttccatgagcccgcggcggaccctcccgcgccccctctcgctctgcctctccctctgcctctgcctctgcctggccgcggctctgggaagtgcgcagtccgggtcgtgtagggataaaaagaactgtaaggtggtcttttcccagcaggaactgaggaagcggctaacacccctgcagtaccatgtcactcaggagaaagggaccgaaagtgcctttgaaggagaatacacacatcacaaagatcctggaatatataaatgtgttgtttgtggaactccattgtttaagtcagaaaccaaatttgactccggttcaggttggccttcattccacgatgtgatcaattctgaggcaatcacattcacagatgacttttcctatgggatgcacagggtggaaacaagctgctctcagtgtggtgctcaccttgggcacatttttgatgatgggcctcgtccaactgggaaaagatactgcataaattcggctgccttgtcttttacacctgcggatagcagtggcaccgccgagggaggcagtggggtcgccagcccggcccaggcagacaaagcggagctctagagtaatggagagtgatggaaacaaagtgtacttaatgcacagcttattaaaaaaatcaaaattgttatcttaatagatatattttttcaaaaactataagggcagttttgtgctattgatattttttcttcttttgcttaaacagaagccctggccatccatgtattttgcaattgactagatcaagaactgtttatagctttagcaaatggagacagctttgtgaaacttcttcacaagccacttataccctttggcattcttttctttgagcacatggcttcttttgcagtttttccccctttgattcagaagcagagggttcatggtcttcaaacatgaaaatagagatctcctctgcagtgtagagaccagagctgggcagtgcagggcatggagacctgcaagacacatggccttgaggcctttgcacagacccacctaagataaggttggagtgatgttttaatgagactgttcagctttgtggaaagtttgagctaaggtcatttttttttttctcactgaaagggtgtgaaggtctaaagtctttccttatgttaaattgttgccagatccaaaggggcatactgagtgttgtggcagagaagtaaacattaccacactgttaggcctttattttattttattttccatcgaaagcattggaggcccagtgcaatggctcacgcctgtgatcccagcactttgggaggccaaggcgggtggatcacgaggtcaggagatggagaccatcctggctaacatggtgaaaccccgtctctactaaaaatacgaaaaattagccaggcgtggtggtgggcacctgtagtcccagctactcaggaggctgaggcaggagaatggcgtgaacccggaaggcggagcttgcagttagccgagatcatgccactgcactccagcctacatgacaatgtgacactccatctcaaaaaataataataataacaatataagaactagctgggcatggtggcgcatgcatgtagtcccagctactcctgaggctcagtcaggagaatcgcttgaacttgggaggcggaggttgcagtgagctgagctcataccactgcactccagcctgaacagagtgagatcctgtcaaaaaagaaaagaaaaagaaagcagcattcaaatgtaagacaactgtaaaatattgagccccacttggtctaaaattcaaaaagaagaacgcctgtccatcgcctttttataagtccttctctccacacctaaaagcagctgcagctggaagggcacaaattccactgtgtaaaataaaatattaggggcaacacacttcatcaaggcagcaggaatgagagagagcagagaagatcaaggatgaagtcttgggtactgaaaaattcagtgctgggcagaaaaactgacagggcagtacaagtaacaaacagaatccaagtggggtggcccttgtgcacagagctccaggtgacctctggagagacatgggcattcacatggaaagctaaaacggaagctcaagtttcatactcaacataatcttctgtgtgacaaaggacaagccatgtagcctctctgtgcctatttcttcatgcataaactgggactcataatatttgtaaaatgtattgatactctcagggcaaattcactatattgctatacagttgagatcagtgttgtaaaattaaactgatctggttctaattgcctcaaaggccaaagcccaggcatttgaaatggaaagaagcagagaggaggctgacttagctgattggtatggaaacagttgggccaagagccagaatttccctttgtagcaacacggctagttttactttgagaagctctgctcagctgctttataacattaagtctggcggaatggatgtcactgtgcacaataaagttttcacaagtataaacaatggtgatgtaagtcaacattgctgtagccaggtgtgaaggttgtatggtgtgtgacgaatgtacatcatgtttgtaggtttggatgctaatcttgaattgtagtttaaaaaatacgtatttttgtaactctttgaaagtttatgaagactgacagctttccttgtaagcactaagagaaaaaaaagaaagagggacatttgacaattttaaagaaacaacaagaaattagaatgaaaatctgtgacaaacagcgtcagtgtggccatgtccacattcctacatgtctctctctacaagcacctctctaagaagcctgacatcccggtggactctttatagtcatgtacacttgattccagatgagctctggtcttatctggatgctcagataagaggtttctatctgagcatccagatgttccctcaggttccaagacatttcaccccaggccctgggttcactctggaattcgtaggcttcacgtctctctagaaatgacgtgtaaaatttaagaccagacctcagccatcagcgtccagaccatcctagaagtctttcccaatctcacagagaaagccctagtatttcccagtgaccccaggattccacgttggggtggccaaagaaataggtctctcagggctttgccacagcctccagcccatccttcagaggcacacacagcacctctcggctgctccagctctgtaggatagcctcccctggggtccgtgggacgcgggccacagtgttgaggtagacaaggaggatcagtgagaggcctcttccctctccacagagactggattgtcattgttccttcatttatatcgtagggcttaacatttcactcaaaaaaaagcccctctttttctaatccttagtctttgtttcaaggaaagccagtttttcttctaccacattttccaggatcgactttaagaaaaatgcaacatctattgaaaaaaagtggggtgtatgcatgtggtttaattccagattgcttttgggtttaagtggtatcaaatttcagtatatttctgtcttatgtgaaagaaatatattactaaaacgtcagtgagcaataatgtcagctgtcaagcactagatttatttttgcaggatatggagtgcaatgaactgagtcaatatggcaaggtgtatgtgatctgtgggagttatgccatttaacataggaagtgcatgggactttccctctctgcactccagctcttactgtaccattagaagatgcagaattctgttggtgtgcaaaaagtatagccttacattcaagcagaatggatctgaagaaagcagcaatatctgttactagagaacattcccatgtgtttaaactcttcacttcttagatgcatttaaattcttaatgcaaatgacgtagcaatttgaaaacttctccgtattacttgtgtttaaaatgtcttgctttaaatacaaaacaaatggtaaaggggattatcttttgtttagatggttaaatattatttttgccttagatagctttgtaataatttttctccagacagttcaacacttttgaaaaatgacatgaattttcattaaaaacccttttcctatgtttattgtatacaagaattatgcaataaaatttctttataaaaataaaaaaaaaaaaaaaaaa

SEQ ID NO: 3460 - DNA, 4540 bp, Homo Sapiens
  NM_198081
gaatgcattagtctaatgagatgtttgcagctggagcgcagggctgctggagactaactgtgagctactaacacgggtggaagatagcttttgcaatactcggtttgcatgtgctgaaagtcatctgtcttctgagtcaacactcccgacctggtaaacaacctgctcagggctctggtgaacaagctgtagcacctcttctgcctgtgagcgatttgtcacctcattctgtaagactggcaccagcagaaatgcagtctcaaaggatcccggggagaaagcgaggccgaccctcacttcactccacgcctatgaagatggcagttcataacctttattctgcttcagctggctctttaccagcagtgaagatcccaaagaaaagagggcggaaacccgggtacaagatcaagtctcgggttctcatgactcccttagccctctcacctccgcggagtaccccagagcccgacctcagctccatccctcaggacgcagccacggtccccagcttggcggccccacaggctctcacagtctgcctctacatcaacaagcaggccaatgcggggccctatctggagaggaagaaggtgcagcagctcccggagcattttgggcccgagcggccatcggcggtgctgcagcaggccgtccaagcctgcatcgactgcgcccaccagcagaagctggtcttctccctggtcaagcagggctatggtggtgagatggtgtcagtctcggcttcctttgatggcaaacagcacctgcggagcctgcctgtggtgaacagcatcggctatgtcctccgcttcctcgccaagctgtgccgaagcctcctgtgcgatgacctcttcagccaccagcccttccccaggggctgcagtgcctctgagaaagtccaggagaaagaggaagggaggatggaatcagtcaagacagtcaccaccgaagagtacctggtgaaccctgtgggcatgaaccgctacagcgtggacacctccgcctccacctttaaccacaggggctccttgcacccctcctcctcgctgtactgcaagaggcagaactctggagacagccaccttgggggtggtcctgctgccaccgctggtggtccccgcactagccccatgtcttctggtggcccctcggcacctgggctgaggcctccagcctccagccccaagagaaacacgacctctcttgaaggaaacagatgtgcctcaagcccttctcaggatgcgcaggatgccaggcggccacggagcaggaacccctccgcctggactgtggaggacgtggtgtggtttgtgaaggacgccgacccacaggctctggggcctcacgtggagctcttcagaaagcacgagattgatggcaacgctctgctgttgctgaagagtgacatggtcatgaagtacctgggcctgaagctgggacctgcactgaaactctgctaccacattgacaaactgaagcaagccaagttctgacttttttaaaaagacagaagcgaaacccaaaacaacagatcccaagattatcttctgccttaccaatatcccgccaacatcacaaactagactctcctcttaaaattaacagccacagagacgtggtctttttataaaacttgtgaatctttgccttttgaagaatttaacatggaccttttcgagaggctcctctgtgttcataatttgccaaaaaattacaaaagcctgtgatttttaacatccctgttatgctggtttctcttaaagtgggtcctatttgcataacgagagagtggggaactgaatgcttatgcccaaggagagttctggagggttcaaaggatgaaagaaggacctttgtccctgcggtctctgcagggacaaccccctcagcaccatctgcctctaactctgacctggggacctatccatgtgagccttgtttgcctcagctctggaagctgacttctgaagatgactgcctcaccttgcactgtctggaaaacttgaattattttacgccgtgaaagaaaaaggaaaaaaaaaaaaatcttttctgttcctagaaaatctgaagtactgtgtttctccgctagagggcagactgctaatgaaatttcaggaccctcactgactgcagtagcaggattgttcagtactgagtggatgggttagggtgtctgtgaacaagatctagcccacacagaaacaggggatttattccacagttagcaccacagattgcgacttgggaagaaaccatcagctagaggggtctagttcgtatccaatcattattgactgactgactgatactcaactagcaaaggcaagaatttggaagcacgctctacccagatgggactttggagttccttcccttccagagtccttattgaggtgttgaagtgttggcatgccgaagaatcttagtgacatttagccatgggtgtttctttaaaaaaggaaaagaaaatgtctcaacgaagctttgaaatgggagagtgttgatttctagttacattgctgggttatgtagttgtatctgtggctaatttttctagtcctcaacaaatacacagacatgctattatggggtttaattcaatttacaaataggttttccttcctcacagtggagtaatagaaaaaattgattttctgctcctttgcagctgtgtccagagacggacaatgaatccacaatttattaggcagaggcacaacttctccaccattcgttttatccttctcttttctctgtttccctccacctctcttcttcttctttcacactgagcagaaaacatatcttcaaaatgaattcgcctttgccatgtgcatattctcttccttaaaaggacatcaacagtgttggagatgaggagatgaacattagattttggaatttctgggagggagagggttagggatgactcagggcctcccttcgcccaaaggtgaatcagaaaaggcacccctttctctgggatacaacctgagcaggggtctcagctggcaagtggagcagggtgggggctcaacctcctcaccgcttgatcagctgccgttgtacagagcatgacctgtataaccttgagggcagccctgggtagatctgcagagtgaccctctatatagttagaatccagatgaaggccataagaaatagtccatgccatgccgttaggcccactttcatgtgcagtacttgagaaagcacatcgtagcctccttttcagacacacaaatggcggctggactgagagcatggcagagaaggggaggaggagaatgtactaaacttgctcactgaattgagcttgagttattagattgtagaagagcttgatgtctggtgattttgttacaggaagggggtcccgatccagaccccaagagagggctcttggatctcatgcaagaaagaattcagggtgagtccataaagtaaagtgaaagcaagtttattaagaaagtaaaggaaggaaagaatggctaccccatagtcaaagcagctctgagggctgctggttgcccatttttatgtttatttcttgatatgctaaacaaggggtggattattcatgcctcccccttttagatcatatagggtaacttcctgatgttgccatggcatttgtaaaccgtcatggcactggtggtagtatagcagcgaggacaaccagaggtcactctcgttgccatcttggttttggtgggttttagccaacttctttactgcaacctgttttatcagaaggtctttatgacctatatcttgtgctgacctcctgtctcatcctgtgactcagaatgctttagccatctgggaatgcagcccagtaggtctcagcctcattttacccagctcccattcaagatggagttgctctggttcaaatgcctctgacaggttcagcacctgagaaaagtaccttgaatcaggccttggggcagagtcttcaagattttaaggtgatagggcctgtctcttaagaatttattaatcgtaagtgctcactgctggtttagagttagatacatttccctcaaaacagccatgggcaggttatgtactcagaactgccagggtgaaaacaatgagatccagaaaaatcccacaacaatccaggtttttcactcctcttttttttctcaatcttccgatacttgtggtacctcttccatcaacagatacctcatgtagtgacttccagtatcaagttttcaaaacttcctacccaccctcatcagtgcctccttcactacagagtcacaaacattggtgctctcaaataaaaatcagccccaaacaatgtcaaagagatcccttgagtagttttcaggcgagagatatgttctcatttcaagtcttggagaaaactggatccatgttcacgtggaacttctctcgcggaggtgctatctcattttgcattaaactttaagcaggacagattgctgaagccatgatatttaaggtttgactttttaaaaatctcattactcttaaaataaatgctgccacatcagaaaaa

SEQ ID NO: 3461 - DNA, 1384 bp, Homo Sapiens
  NM_198083
agacgactcccagctggccgagggcgggaagggggcaggcagggaagcggcccgcccttcgtcctgccccttcgccctactctgtcacctccgctggaaggagtggaacccagacttgctggtctgatccatgcagatggccaggctgctaggcctctgtgcctgggcacggaagtcggtgcggatggccagctccaggatgacccgccgggacccgctcacaaataaggtggccctggtaacggcctccaccgacgggatcggcttcgccatcgcccggcgtttggcccaggacagggcccacgtggtcgtcagcagccggaagcagcagaatgtggaccaggcggtggccacgctgcagggggaggggctgagcgtgacgggcactgtgtgccatgtggggaaggcggaggaccgggagcggctggtggccatggctgtgaagcttcatggaggtatcgatatcctagtctccaatgctgctgtcaaccctttctttggaagcctaatggatgtcaccgaggaggtgtgggacaagactctggacattaatgtgaaggccccagccctgatgacaaaggcagtggtgccagaaatggagaaacgaggaggcggctcagtggtgatcgtgtcttccatagcagccttcagtccatctcctggcttcagtccttacaatgtcagtaaaacagccttgctgggcctcaacaataccctggccatagagctggccccaaggaacattagggtgaactgcctgcacctggacttatcaagactagcttcagcaggatgctctggatggacaaggaaaaagaggaaagcatgaaagaaaccctgcggataagaaggttaggcgagccagaggattgtgctggcatcgtgtctttcctgtgctctgaagatgccagctacatcactggggaaacagtggtggtgggtggaggaaccccgtcccgcctctgaggaccgggagacagcccacaggccagagttgggctctagctcctggtgctgttcctgcattcacccactggcctttcccacctctgctcaccttactgttcacctcatcaaatcagttctgccctgtgaaaagatccagccttccctgccgtcaaggtggcgtcttactcgggattcctgctgttgttgtggccttgggtaaaggcctcccctgagaacacaggacaggcctgctgacaaggctgagtctaccttggcaaagaccaagatattttttcctgggccactggggaatctgaggggtgatgggagagaaggaacctggagtggaaggagcagagttgcaaattaacaacttgcaaatgaggtgcaaataaaatgcagatgattgcgcggctttgaatccaaaaaaaaaaaa

SEQ ID NO: 3462 - DNA, 1328 bp, Homo Sapiens
  NM_198085
gtaccaatcacaagtcttgttattttgtttcattatgagaaagataatctactaaatattaaaatactggaaggagcaagatagctttgatccagggagaccttttccatttatgtgctttagtaatctgccgccaacaagctatcttctttatgttcttctacaactgatgttgttttgttttctcatgtttgtctcttaatagacaaatggaggcatgagcttccttagaattaccccttcgacgcatagttctgtttcatctggacttttgaggcttagtatctttctactacttagctttcctgactcaaacggaaaagccatttggacagctcacctgaatataacatttcaggttggaaatgagatcacatcggaattaggagagagtggagtgttcgggaatcattctcctctggaaagggtgtctggtgtggtggcacttcctgaaggatggaatcagaatgcctgtcatcctttgaccaatttcagcaggcccaaacaggcagactcatggctggccctcatcgaacgtggaggctgtacttttacacataaaatcaacgtggcagcagagaagggagcaaatggggtgatcatctacaactatcaaggtacgggcagtaaagtatttcccatgtctcaccaggggacggaaaatatagtcgcggtgatgataagcaacctgaaaggcatggaaattttgcactcgattcagaaaggagtctatgtgacagtcatcattgaagtggggagaatgcacatgcagtgggtgagccattacatcatgtatctatttaccttcctggctgccacaattgcctacttttacttagattgcgtctggagacttacacctagagtgcccaattctttcaccaggaggcgaagtcaaataaagacagatgtgaagaaagctattgaccagcttcaactgcgagttctcaaagaaggggatgaggaattagacctaaatgaagacaactgtgttgtttgctttgacacatacaaaccccaagatgtagtacgcattttaacttgcaaacattttttccataaggcatgcattgacccctggcttttagcccataggacatgtcccatgtgcaagtgtgacatcctgaaaacttaagaaatctggagaattttctgaagatgtaaccagatctttccaaatacaaagattagataaattgtcttattgtactttatgtagagagaaaatttcagcttctctacccaagtatgaacaagggtgaaatttgtgttttaaaaataaaactccttatcatgcccagcaaaaaaaaaaaaaaaaaaaaaaaaaa

SEQ ID NO: 3463 - DNA, 1854 bp, Homo Sapiens
  NM_198097
ggggcggtggcgacggaggcggaagtgcggtgttttagccggtggctgctgtctctgggcgggccgtgggaggctcccgaggtgggggccggggcgggatggctgcagcggcggccggggccgggagcgggccctgggcggcccaggagaagcagttcccgccggcgctgctgagtttcttcatctacaacccgcgcttcgggccgcgcgaaggacaggaggaaaataagattttattttatcatccaaatgaggtagaaaagaatgagaagattagaaatgtcggattgtgtgaagctattgtacagtttacaaggacatttagcccatcaaaacctgcaaaatctttacatacacagaagaacagacagttcttcaatgaaccagaagaaaatttctggatggtcatggttgttcggaatcctataattgaaaaacagagtaaagatggaaaaccagttattgaatatcaagaggaggagttgttggacaaggtttatagctcggtgctgcggcagtgctacagcatgtacaagctttttaatggtacatttctgaaagccatggaagacggaggcgtcaagcttctgaaagaaagattagagaaattcttccatcggtatttgcaaacgctacatttgcagtcatgtgacctacttgacatttttggtggaatcagcttcttcccgttggataaaatgacttatttgaaaatccagtcctttattaatagaatggaggaaagcctgaatatagtcaaatacactgcttttctctataacgatcagctcatctggagtggattagaacaagatgacatgagaattttatacaaataccttaccacctcccttttcccaaggcacatcgaacctgagttagcaggaagggattctccaataagagcagaaatgccaggaaatcttcaacactatggaagatttcttaccggacccttgaacctcaatgatccagatgcaaaatgcagattccccaaaatttttgtaaatacagatgacacttatgaagagctccatttaatcgtttataaggccatgagtgcggctgtgtgctttatgatcgacgcctctgtccacccaacgttggatttttgccgaagactggacagcatcgttgggccccagctcacagtgctggcctctgacatctgtgaacagtttaacatcaacaagaggatgtctgggtctgagaaagaaccccagtttaagtttatctacttcaaccacatgaatctcgccgagaagagcacagttcacatgaggaaaacgcccagcgtgtcgctcacttccgtgcacccggatttaatgaagattctcggtgacatcaacagtgactttaccagagtggatgaagatgaggagatcattgtgaaggccatgagtgattactgggttgttggaaagaagtctgatcggcgggagctctatgttattttgaatcaaaaaaatgcaaacctgattgaagtaaatgaagaggtcaagaaactttgtgcaacgcagttcaacaacatcttcttcttggattgacggatgacggctcaccgagagcatatctaaaaaacactctgcaaacatttggtcacatgcaagttagtggtcatatgacggactgcattcaggacaagggtaaagcaatacttgctttgaagaatcagatttcgactcggtctgctgatctgaggtttttagattttaaatatttatgtggaattaattaaaggtagttggctatatcgctatcatttcattcttttgacattatttgaatattttactggaaaataagactaataaattgttaaaagtttttaaaattaaaaaaaaaaaaaaaaaa

SEQ ID NO: 3464 - DNA, 1494 bp, Homo Sapiens
  NM_198120
gcgggtttcccgatgaaggggcggccatggcagctgcgcagaggcaacgcaggctgctacggagcgcgcgcccggctttgaatgagcggggctgggagtgagcgggcggagcgcgagctcgaggaagagacaggcagcgcgcgtgagcgcgccttgtgtgcgcgcgcggcccgcggcagctcggagcctccgccgggcgggcggggagggggaggggcaggttttgattcccaccatggccatcacccagtttcggttatttaaattttgtacctgcctagcaacagtattctcattcctaaagagattaatatgcagatctggcagaggacggaaattaagtggagaccaaataactttgccaactacagttgattattcatcagttcctaagcagacagatgttgaagagtggacttcctgggatgaagatgcacccaccagtgtaaagatcgaaggagggaatgggaatgtggcaacacaacaaaattctttggaacaactggaacctgactattttaaggacatgacaccaactattaggaaaactcagaaaattgttattaagaagagagaaccattgaattttggcatcccagatgggagcacaggtttctctagtagattagcagctacacaagatctgccttttattcatcagtcttctgaattaggtgacttagatacctggcaggaaaataccaatgcatgggaagaagaagaagatgcagcctggcaagcagaagaagttctgagacagcagaaactagcagacagagaaaagagagcagccgaacaacaaaggaagaaaatggaaaaggaagcacaacggctaatgaagaaggaacaaaacaaaattggtgtgaaactttcataacacatgttcaaattttatcatgccagtaggagaaatctcagctccacaacccaagcaacatttgtatggatttaagagtattttaagaagacatactgcttgattttaatacattgatcaggccatccaggacaccacgattctcccaaagtaccttgaactcttagtgattgagactcaaaaaaacaaaaaagacttgagacaatgttttcttcaacatgctccaaatataagacatttgtttgctgtacagaaagtatcacaaatggaatatatcagtacctctcaagctagtgtttctagctaaataaatgggtgtatataattttatggtggaaaagaactgtactgtctgttatgatttccttcaatgtgcataatgataaaataaataattttaatattcttttgtttccatggttacctgacctaaattagataaattgtagggctttagctttcttatttttgtcaaaagttggtgttgacatacattccctctaatttgaactggtattgtttacgtttgatacaacattaaggaatttgatgattttcatttcatgaaaatgacattaaatgcaataattttacttatcataaaaaaaaaaaaaaaa

SEQ ID NO: 3465 - DNA, 1469 bp, Homo Sapiens
  NM_198139
agacaaggttttccaagcaagatgaagcccaacatcatctttgtactttccctgctcctcatcttggagaagcaagcagctgtgatgggacaaaaaggtggatcaaaaggccgattaccaagtgaattttcccaatttccacacggacaaaagggccagcactattctggacaaaaaggcaagcaacaaactgaatccaaaggcagtttttctattcaatacacatatcatgtagatgccaatgatcatgaccagtcccgaaaaagtcagcaatatgatttgaatgccctacataagacgacaaaatcacaacgacatctaggtggaagtcaacaactgctccataataaacaagaaggcagagaccatgataaatcaaaaggtcattttcacagggtagttatacaccataaaggaggcaaagctcatcgtgggacacaaaatccttctcaagatcaggggaatagcccatctggaaagggaatatccagtcaatattcaaacacagaagaaaggctgtgggttcatggactaagtaaagaacaaacttccgtctctggtgcacaaaaaggtagaaaacaaggcggatcccaaagcagttatgttctccaaactgaagagctagtagctaacaaacaacaacgtgagactaaaaattctcatcaaaataaagggcattaccaaaatgtggttgaagtgagagaggaacattcaagtaaagtacaaacctcactctgtcctgcgcaccaagacaaactccaacatggatccaaagacattttttctacccaagatgagctcctagtatataacaagaatcaacaccagacaaaaaatctcaatcaagatcaacagcatggccgaaaggcaaataaaatatcataccaatcttcaagtacagaagaaagacgactccactatggagaaaatggtgtgcagaaagatgtatcccaaagcagtatttatagccaaactgaagagaaagcacagggcaagtctcaaatccaggcaccaaatcctaagcaagagccatggcatggtgaaaatgcaaaaggagagtctggccaatctacaaatagagaacaagacctactcagtcatgaacaaaaaggcagacaccaacatggatctcatgggggattggatattgtaattatagagcaggaagatgacagtgatcgtcatttggcacaacatcttaacaacgaccgaaacccattatttacataaacctaccattcggtaaccatgtgaaaggatggaccaatatcaaggtgtcagttgacctcagtgaattctgtgatgtttctgagatgcagactcccgtgtagtttcagattcttggtccatggatgacaccacctgcccatgcttccttgaattaggctttcctaacctgaagcgccttcaaacttccaataaagagatcattttctgcttcaaaaaaaaaaaaaaaaaaaaaaaaaaaa

SEQ ID NO: 3466 - DNA, 3365 bp, Homo Sapiens
  NM_198147
agctcgccgagtagacggccccgccgcccgctgcccgccggggctctccagcttcgccatgccgccgtggggcgccgccctcgcgctcatcttggccgtgctcgcccttctcggcctgctcggcccgcggctccggggaccctgggggcgcgccgtcggagagaggaccctgccgggggcccaagaccgagacgacggggaggaggcggacggcggaggcccggcggaccagttcagcgacgggcgcgagccactgccgggagggtgcagccttgtttgcaagccgtcggccctggcccagtgcctgctgcgcgccctgcggcgctcagaggcgctggaggccggcccgcgctcctggttctccgggccccacctgcagaccctctgccacttcgtcctgcccgtagcgcctgggcctgagctggcccgggagtacctgcagttggcggacgatgggctagtggccctggactgggtggtaggaccttgtgttcggggccgccggatcaccagcgccgggggccttcctgcggtgcttctggtgatccccaatgcgtggggtcgcctcacccgcaacgtgctcggcctttgcttgctcgccctggagcgcggctactacccggtcatcttccatcgccgcggccaccacggttgcccactggtcagcccccggctgcagcctttcggggacccgtccgacctcaaggaggcggtcacatacatccgcttccgacacccggcggcgccgctgttcgcggtgagcgaaggctcgggctcggcgctgctcctgtcctacctgggcgagtgcggctcctccagctacgtgacaggcgccgcctgcatctcgcccgtgctgcgctgccgagagtggttcgaggccggcctgccctggccctacgagcggggctttctgctccaccagaagatcgccctcagcaggtatgccacagccctggaggacactgtggacaccagcagactgttcaggagccgttcccttcgagagtttgaggaggctctcttctgccacaccaaaagcttccccatcagctgggatacctactgggaccgcaacgacccgctccgggatgtcgatgaggcagccgtgcctgtgctgtgtatctgcagtgctgacgaccccgtgtgtggacccccagaccacactctgacaactgaactcttccacagcaacccctacttcttcctcctgctcagtcgccacggaggccactgtggcttcctgcgccaggagcccttgccagcctggagccatgaggtcatcttggagtccttccgggccttgactgagttcttccgaacggaggagaggattaaagggctgagcaggcacagagcttccttccttgggggccgtcgtcgtgggggagccttgcagaggcgggaagtctcttcctcttccaacctggaggagatctttaactggaagcgatcatacacaaggtgaaagacctggcctgagaacccccaagtcctgcaaagaaaaacagagctgggcaagggggagtcctggaaagatggggcggactgaacagagggagctccagctctgtgctcctcattcagtccctctctcttaaattggtgccttgaaagagaaggaacgtcctgcgagcctgcactcacttcatcctcagcagaactcctgcctggcctctgctcaacatatccctactcatccggtcagcagcggcgcgttccagtcactgtcacctgtcactgacatcacaagccaaaggatagcactttttcaatccatggactcaggagaaaatgccctcttactggcagtggctagagggatgagacgtttgtgtatgtcactgggcagtgaccccgattctcaagctggagccatttgatgtcatgaggacaggatgtttgtgtctcggccccacttccctcatttgctctgtggttgtggcgccctgctttgaccgaatgctctggcaactgcggcagcaggcttgtgtgtgtgagaagggcggcagaggcagtggggctggctcgctgagggctgagcaggtagagaatgtgaatgtccatctcaaggaatgcgaagttccaatctctcagaggagctctgcaagtctcagctaggaatggggctgatctggcccccaagcctcactggagagatcccaagggtattttacaaataggaagcgctctcatgcaggatctgagggctttgctagaccatggttcaaggagtcagaatcttggctaccctacatgctccctctggcaccatttcaggggattactccagagagctgcagccagaactgtttatctcctgagatatggactttctctaagtcaggaaaagcacaaacctcataacttaggtgttttctggttggttgctcccttttctgatcctactactggcctctccctttccagagccaggagacacatctgggaccagaggaaacaaaagcaccaagaggttgactagagctgaccagtgatttacaaatatttcatattccaatgcttcgtctgctcaattattcaaaaggccatccctgtaaaggcagaaaagcttcctcttagatctggccactcagcaaataagtgggtatttggttttatgaagaataatgctgaggactagagatatagtatatcagagataatatatagtatacaggttgatctaaatattctggtttggattaggcaattaaaatttttttggcaacaggacatatgtttccatgtgttgctaagattcaaaaactttgccctgaagttttattttaatcgtcattgagaaagagggctcctgttctgacctcaaaaacagcaaagctgttgtaaagaagagagctgcttatacgaaaacccacattccaagacttggtataaggtattcctgaggccttgatttcaggtttggataatcttgccccagattctagatcttgttcttctagatcaaatcagaagaaactttgaaataactccaagaatctgcactgaaatgtagacagcactcgataatctaagggacattatcttgttgtgaaaaattatctccctcctggctgggagcggtggcacacacctataatctcagcactttgggaggccgaggtgggtggatcacgaggtcaggagatcgagaccatcctggctaacacagtgaaacctcatctctactaaaaatacaaaaaattagccgggcgtggtagcgggtgcctgtaatcccagttactcaggaggctgaggcaggagaatggcgtgaacccgggaggcggagcttgcagtgagctgagatcgcaccactgcactccagcctgggcgacagagtaagactgtgtttcaaaaaaaaaaaa

SEQ ID NO: 3467 - DNA, 3345 bp, Homo Sapiens
  NM_198150
aggagttgtagttctgcgggtgaagctcggcgttactatcaagcaaccaaactgcaagctttgggagttgttcgctgtccctgccctgctctgctagggagagaacgccagagggaggcggctggcccggcggcaggctctcagaaccgctaccggcgatgctactgctgtgggtgtcggtggtcgcagccttggcgctggcggtactggcccccggagcaggggagcagaggcggagagcagccaaagcgcccaatgtggtgctggtcgtgagcgactccttcgatggaaggttaacatttcatccaggaagtcaggtagtgaaacttccttttatcaactttatgaagacacgtgggacttcctttctgaatgcctacacaaactctccaatttgttgcccatcacgcgcagcaatgtggagtggcctcttcactcacttaacagaatcttggaataattttaagggtctagatccaaattatacaacatggatggatgtcatggagaggcatggctaccgaacacagaaatttgggaaactggactatacttcaggacatcactccattagtaatcgtgtggaagcgtggacaagagatgttgctttcttactcagacaagaaggcaggcccatggttaatcttatccgtaacaggactaaagtcagagtgatggaaagggattggcagaatacagacaaagcagtaaactggttaagaaaggaagcaattaattacactgaaccatttgttatttacttgggattaaatttaccacacccttacccttcaccatcttctggagaaaattttggatcttcaacatttcacacatctctttattggcttgaaaaagtgtctcatgatgccatcaaaatcccaaagtggtcacctttgtcagaaatgcaccctgtagattattactcttcttatacaaaaaactgcactggaagatttacaaaaaaagaaattaagaatattagagcattttattatgctatgtgtgctgagacagatgccatgcttggtgaaattattttggcccttcatcaattagatcttcttcagaaaactattgtcatatactcctcagaccatggagagctggccatggaacatcgacagttttataaaatgagcatgtacgaggctagtgcacatgttccgcttttgatgatgggaccaggaattaaagccggcctacaagtatcaaatgtggtttctcttgtggatatttaccctaccatgcttgatattgctggaattcctctgcctcagaacctgagtggatactctttgttgccgttatcatcagaaacatttaagaatgaacataaagtcaaaaacctgcatccaccctggattctgagtgaattccatggatgtaatgtgaatgcctccacctacatgcttcgaactaaccactggaaatatatagcctattcggatggtgcatcaatattgcctcaactctttgatctttcctcggatccagatgaattaacaaatgttgctgtaaaatttccagaaattacttattctttggatcagaagcttcattccattataaactaccctaaagtttctgcttctgtccaccagtataataaagagcagtttatcaagtggaaacaaagtataggacagaattattcaaacgttatagcaaatcttaggtggcaccaagactggcagaaggaaccaaggaagtatgaaaatgcaattgatcagtggcttaaaacccatatgaatccaagagcagtttgaacaaaaagtttaaaaatagtgttctagagatacatataaatatattacaagatcataattatgtattttaaatgaaacagttttaataattaccaagttttggccgggcacagtggctcacacctgtaatcccaggactttgggaggctgaggaaagcagatcacaaggtcaagagattgagaccatcctggccaacatggtgaaaccctgtctctactaaaaatacaaaaattagctgggcgcggtggtgcacacctatagtctcagctactcagaggctgaggcaggaggatcgcttgaacccgggaggcagcagttgcagtgagctgagattgcgccactgtactccagcctggcaacagagtgagactgtgtcgcaaaaaaataaaaataaaataataataattaccaatttttcattattttgtaagaatgtagtgtattttaagataaaatgccaatgattataaaatcacatattttcaaaaatggttattatttaggcctttgtacaatttctaacaatttagtggaagtatcaaaagaattgaagcaaatactgtaacagttatgttcctttaaataatagagaatataaaatattgtaataatatgtatcataaaatagttgtatgtgagcatttgatggtgctcgatgagttacttgtatttgatgggattgtttggatgtatttaatgggagtatttggagtatttaacgggatgtaaaccctggatgtacctgattttgttactgttttattttaataggtaatatatatacagggtaaaagcttcaaatggtacaaaagggttaacagtgatcgtgaagtctctgtcctttccctcttccctgccatccagttccccctccaagaagcaagtaccgaaaccacctgcttacgcatttttagagattggccacaaatttataaacaaatgtatatattcctttccccctacacaaacggtaacatactgcacacattgttctgcatgttgcttctttttccttttttttttcacttaacagtagatatctagaggtgaaattactgagtcaagactatatttagcaaaattacactagatactacaaattacctctaaagaaggtatactaactgataatctcaccatcaatgcatgtcttcttatcctttgccaacctaacagataaaaatgttctatttttatttttctttttatgagtaacgtagagcatattttcatgtatttaacagccactggaatctgctttaccatggcctttcctatttctattctttgcctatttttctgttggttgttggtctttgttttgtattacaggtgtgctttagatattagctttttgtaagagatcctgcaaatatcttctttccagtttgtcattgtcatttgtcttttgactttgttctggtattttttgatatgtagaaatttttattttcatgtaagcaaatttatgaatctttgtacaccataagtatatacaattatgatttgtcaattaaaaatattagtacaaaatttacagatctttgcttttgtggcttttgggattttgtatca

SEQ ID NO: 3468 - DNA, 2110 bp, Homo Sapiens
  NM_198151
cttctttgaaaaggattatcacctgatcaggttctctctgcatttgcccctttagattgtgaaatgtggctcaaggtcttcacaactttcctttcctttgcaacaggtgcttgctcggggctgaaggtgacagtgccatcacacactgtccatggcgtcagaggtcaggccctctacctacccgtccactatggcttccacactccagcatcagacatccagatcatatggctatttgagagaccccacacaatgcccaaatacttactgggctctgtgaataagtctgtggttcctgacttggaataccaacacaagttcaccatgatgccacccaatgcatctctgcttatcaacccactgcagttccctgatgaaggcaattacatcgtgaaggtcaacattcagggaaatggaactctatctgccagtcagaagatacaagtcacggttgatgatcctgtcacaaagccagtggtgcagattcatcctccctctggggctgtggagtatgtggggaacatgaccctgacatgccatgtggaagggggcactcggctagcttaccaatggctaaaaaatgggagacctgtccacaccagctccacctactccttttctccccaaaacaatacccttcatattgctccagtaaccaaggaagacattgggaattacagctgcctggtgaggaaccctgtcagtgaaatggaaagtgatatcattatgcccatcatatattatggaccttatggacttcaagtgaattctgataaagggctaaaagtaggggaagtgtttactgttgaccttggagaggccatcctatttgattgttctgctgattctcatccccccaacacctactcctggattaggaggactgacaatactacatatatcattaagcatgggcctcgcttagaagttgcatctgagaaagtagcccagaagacaatggactatgtgtgctgtgcttacaacaacataaccggcaggcaagatgaaactcatttcacagttatcatcacttccgtaggactggagaagcttgcacagaaaggaaaatcattgtcacctttagcaagtataactggaatatcactatttttgattatatccatgtgtcttctcttcctatggaaaaaatatcaaccctacaaagttataaaacagaaactagaaggcaggccagaaacagaatacaggaaagctcaaacattttcaggccatgaagatgctctggatgacttcggaatatatgaatttgttgcttttccagatgtttctggtgtttccaggattccaagcaggtctgttccagcctctgattgtgtatcggggcaagatttgcacagtacagtgtatgaagttattcagcacatccctgcccagcagcaagaccatccagagtgaactttcatgggctaaacagtacattcgagtgaaattctgaagaaacattttaaggaaaaacagtggaaaagtatattaatctggaatcagtgaagaaaccaggaccaacacctcttactcattattcctttacatgcagaatagaggcatttatgcaaattgaactgcaggtttttcagcatatacacaatgtcttgtgcaacagaaaaacatgttggggaaatattcctcagtggagagtcgttctcatgctgacggggagaacgaaagtgacaggggtttcctcataagttttgtatgaaatatctctacaaacctcaattagttctactctacactttcactatcatcaacactgagactatcctgtctcacctacaaatgtggaaactttacattgttcgatttttcagcagactttgttttattaaatttttattagtgttaagaatgctaaatttatgtttcaattttatttccaaatttctatcttgttatttgtacaacaaagtaataaggatggttgtcacaaaaacaaaactatgccttctcttttttttcaatcaccagtagtatttttgagaagacttgtgaacacttaaggaaatgactattaaagtcttatttttatttttttcaaggaaagatggattcaaataaattattctgtttttgcttttaaaaaaaaaaaaaa

SEQ ID NO: 3469 - DNA, 1575 bp, Homo Sapiens
  NM_198155
agtcccgacgagcaacgcgtttgtagaggggtgggtgcgcacgctctgtccctgcgtgaccttccgaccccgctgtcctcaccgcaatggcggctgtgagggccctggtggcctcgaggctcgctgcggcatctgcattcacgtccctgtcccccggcggtcggacgccttcccagcgcgcagcccttcacctctccgtgccgcgccccgcggccagggtcgcgctggtgctgtctggatgcggagtctacgatgggaccgagatccacgaggcctcggcgatcctggtgcacctgagccgtggaggggctgaagtccagatctttgctcctgacgtccctcagatgcacgtgattgaccacaccaaggggcagccgtccgaaggcgagagcaggaatgttttgaccgagtctgcgaggatcgcccgtggcaaaatcacagacctggccaacctcagtgcagccaaccatgatgctgccatctttccaggaggctttggagcggctaaaaacctcttgtgctgcattgcacctgtcctcgcggccaaggtgctcagaggcgtcgaggtgactgtgggccacgagcaggaggaaggtggcaagtggccttatgccgggaccgcagaggccatcaaggccctgggtgccaagcactgcgtgaaggaagtggtcgaagctcacgtggaccagaaaaacaaggtggtcacgaccccagccttcatgtgcgagacggcactccactacatccatgatgggatcggagccatggtgaggaaggtgctggaactcactggaaagtgacgcgcatggacggggcccagctaggcgccaggacttggcctcaccctctggctgaggagctgtcggctgctttccatccagctgggagtctggcaggcccttttttttttttctttgccgaaacctgcaggcgttctctctctaaggaggatgtgctgcagtgcatgggggatgtttcttcctgggtgtggctgggctgctctcacatacagaggccgaggggccaattcgttctctgccacagggacttgcctcactgtgtcccaaaaacaaatcgcagccagcttttccagaaatagaaaattctgccgtctgaggttttatacttcaggttagttagtttttggaaggaagaacatttttaggtttgcaagcctcctgatcaggaaaccagaaataccacatttatggaccatgaaaggttggttcttgactctgaagggacttttgagttaatcagcgtaaggggatttctaaagcaggcaatccctgtagccgcagagaataaacgccttcccaaaatggcaacttcccacagccacatttcagacctgctgagactgctgagtgaggaatggcagtgaggtttcttcaattagtctcagttctcttaattttcaggaagaaagggaaattgcagcccctcagcccccaggattgacctctggggagtgatggtagcgttggtgccaggccgtgggttcaggtgtggcagaagcttgcagatgcgtccgaagggaaataaagtgtgttggcgttagactttgtgctgcaa

SEQ ID NO: 3470 - DNA, 4437 bp, Homo Sapiens
  NM_198156
cctcgcctccgttacaacggcctacggtgctggaggatccttctgcgcacgcgcacagcctccggccggctatttccgcgagcgcgttccatcctctaccgagcgcgcgcgaagactacggaggtcgactcgggagcgcgcacgcagctccgccccgcgtccgacccgcggatcccgcggcgtccggcccgggtggtctggatcgcggagggaatgccccggagggcggagaactgggacgaggccgaggtaggcgcggaggaggcaggcgtcgaagagtacggccctgaagaagacggcggggaggagtcgggcgccgaggagtccggcccggaagagtccggcccggaggaactgggcgccgaggaggagatggaggccgggcggccgcggcccgtgctgcgctcggtgaactcgcgcgagccctcccaggtcatcttctgcaatcgcagtccgcgcgtcgtgctgcccgtatggctcaacttcgacggcgagccgcagccctacccaacgctgccgcctggcacgggccgccgcatccacagctaccgagtgtatactctgaaagagcgatgcctccaggttgtccggagcctagtcaagcctgagaattacaggagactggacatcgtcaggtcgctctacgaagatctggaagaccacccaaatgtgcagaaagacctggagcggctgacacaggagcgcattgcacatcaacggatgggagattgaagatttctgttgaaacttacactgtttcatctcagcttttgatggtactgatgagtcttgatctagatacaggactggttccttccttagtttcaaagtgtctcattctcagagtaaaataggcaccattgcttaaaagaaagttaactgacttcactaggcattgtgatgtttaggggcaaacatcacaaaatgtaatttaatgcctgcccattagagaagtatttatcaggagaaggtggtggcatttttgcttcctagtaagtcaggacagcttgtatgtaaggaggtttgtataagtaattcagtgggaattgcagcatatcgtttaattttaagaaggcattggcatctgcttttaatggatgtataatacatccattctacatccgtagcggttggtgacttgtctgcctcctgctttgggaagactgaggcatccgtgaggcagggacaagtctttctcctctttgagaccccagtgcctgcacatcatgagccttcagtcagggtttgtcagaggaacaaaccaggggacactttgttagaaagtgcttagaggttctgcctctatttttgttggggggtgggagaggggaccttaaaatgtgtacagtgaacaaatgtcttaaagggaatcatttttgtaggaagcattttttataattttctaagtcgtgcactttctcggtccactcttgttgaagtgctgttttattactgtttctaaactaggattgacattctacagttgtgataatagcatttttgtaacttgccatccgcacagaaaatacgagaaaatctgcatgtttgattatagtattaatggacaaataagtttttgctaaatgtgagtatttctgttcctttttgtaaatatgtgacattcctgattgatttgggtttttttgttgttgttgttttgttttgttttgtttttttgagatggagtctcactcttgtcacccaggctggagtgcagtggcgccatctcggctcactgcaacctctgcctcctgggttcacgtaatcctcctgagtagctgggattacaggcgcctgccaccacgctggccaatttttgtacttttagtagagacagtgtttcgccatgttggccaggctggtttcaaactcctgacctcaggtgatccgcccacctcagcctcccaaaatggtgggattacaggtgtgtgggccaccgtgcctggctgattcagcattttttatcaggcaggaccaggtggcacttccacctccagcctctggtcctaccaatggattcatggagtagcctggactgtttcatagttttctaaatgtacaaattcttataggctagacttagattcattaactcaaattcaatgcttctatcagactcagttttttgtaactaatagatttttttttccacttttgttctactccttccctaatagctttttaaaaaaatctccccagtagagaaacatttggaaaagacagaaaactaaaaaggaagaaaaaagatccctattagatacacttcttaaatacaatcacattaacattttgagctatttccttccagcctttttagggcagattttggttggtttttacatagttgagattgtactgttcatacagttttataccctttttcatttaactttataacttaaatattgctctatgttagtataagcttttcacaaacattagtatagtctcccttttataattaatgtttgtgggtatttcttggcatgcatctttaattccttatcctagcctttgggcacaattcctgtgctcaaaaatgagagtgacggctggcatggtggctcccgcctgtaatcccagtactttggaaagccaaggtaagaggattgcttgagcccagaacttcaagatgagcctgggctcatagtgagaacccatctatacaaaaaatttttaaaaattagcatggcggcacacatctgtaatcctagctacttggcaggctgaggtgagaagatcattggagtttaggaattggaggctgcagtgagccatgagtatgccactgcactccagcctgggggacagagcaagaccctgcctcaaaaaaaaaaaaaaaaaaaaaatcaggccgggcatggtggctcacgcctgtaatcccagcactttgggaggtcgaggtgggcagatcacctgaggtcaggagttcgagaccagcctggccaacatggtaaaaccccatttctactaaaaaatacaagaattagctgggtgtggtggcgcatgcctgtaatcctagctactcaggaggctgaggcaggagaatcacttgaacccaggaggcgaagattgcagtgagctgatatcgcaccattgtactccagcctgtgtgacagagcaatactcttgtctcaaaaaaaaaaaaaaattcaaatcagagtgaagtgaatgagacactccagttttccttctactccgaatttcaactgattttagctcctcctttcaacattcaacaaatagtctttttttttttttttttttttttttttttgagatggagtctcactctgttgcccaggctggagtgcagtggtgcgatctctgctcactacaagctctgcctcccgagttcaagtgattctcctggctcaccctcctgagtagctgggattacaggcgcctgccaccatgcctggctaattttgtgtttttagtggagacggggtttcaccatgttgtccaggatggtcttgatctcctgaccttgtgatccacccacctcagcctcccaaagtgctgggattacaggtgtgagccaccgcgtccagccagctttattattttttttaagctgtctttgtgtcaaaatgatagttcatgctcctcttgttaaaacctgcaggccgagcacagtggctcatgcctgtaatcccagcattttgggagaccaaggcggatggatcacctgaggtcaggagctgaagaccagcctggctaacatggtgaaacctcatctccacttaaaatacaaaaattgccggccgcggcggctcatgcctgtaatcccagcactttgggaggcctaggcgggtggatcacgaggtcaggaaatcgagaccatcctggctaacacgggtgaaaccccgtctctattaaaaaatagaaaaaattaggcgggcgtggtggtgagcgcctgtagtcccagctactcgagagcctgaggcaggagaatggcatgaacctggaaggcggagcttgcagtgagctgagatggtgccactgcactctaacctgggcgacagagtgagacaccgtctcaaaaaaaaaaacaaaaaacaaaaattatccaggtgtggcggtgggcgcctgtgaggcaggcgaatctcttgaacccgggaggcggaggttgcagtgagccaagatcacaccattgcactccagcctgggcaacaagagtgaaattccatctcaaaaagaaaccaaaaaaacaaaaaaaaaacatgccgtttgagtactgtgtttttggtgttgtccaaggaaaattaaaaacctgtagcatgaataatgtttgtttttcatttcgaatcttgtgaatgtattaaatatatcgctcttaagagacggtgaagttcctatttcaagtttttttttttttttttttttttaaagctgttttttaatacattaaatggtgctgagtaaaggaaatag

SEQ ID NO: 3471 - DNA, 3016 bp, Homo Sapiens
  NM_198157
gctccaggaagtgcgggggctccagccgcccggccggccgcgatgcattctggggaaggagcagcaccaaatccaagatggcggccagcaggaggctgatgaaggagcttgaagaaatccgcaaatgtgggatgaaaaacttccgtaacatccaggttgatgaagctaatttattgacttggcaagggcttattgttcctgacaaccctccatatgataagggagccttcagaatcgaaatcaactttccagcagagtacccattcaaaccaccgaagatcacatttaaaacaaagatctatcacccaaacatcgacgaaaaggggcaggtctgtctgccagtaattagtgccgaaaactggaagccagcaaccaaaaccgaccaagaaacttcagcgttcccaattatggcttctctcagatccagccttgaagttctttgacctcctcaattcacaacctgtagctgactttagccacccacaagtacagaaaataatccagtccctcatagcactggtgaatgacccccagcctgagcacccgcttcgggctgacctagctgaagaatactctaaggaccgtaaaaaattctgtaagaatgctgaagagtttacaaagaaatatggggaaaagcgacctgtggactaaaatctgccacgattggttccagcaagtgtgagcagagaccccgtgcagtgcattcagacaccccgcaaagcaggactctgtggaaattgacacgtgccaccgcctggcgttcgcttgtggcagttactaactttctacagttttcttaatcaaaagtggtctaggtaacctgtaaagaaaggattaaaaatttaagatgttctagttctgctctctttgttttaaaaatcactgcttcaatctacttcaaaagaatggtgtttcttttcttgtccaattttatccaaaatcttcaagttacatttaacccataaggtttaaaaaaaaggaaaaaaaacggttgtggttccctttcttccctacccttgccactcccactttctggcaccgagtttatttttcacttacttacttccccagaccccgggctcgcctccacaaaggagaagagactgccctggcggtcctggtggcttttcttagcatgtgtggcactgttgcccagtgtgggagttggtttaaattctcctgactccagtttataacatccttttaaaaaatttaaaaacaaacagccacacccctcctccagtccttctcctcagttcttgtgtgaaactccagctgatgttaccacagtaacatcagttaattgggcaagccctgatgtcagtgtgtgtaactgacctctggcctggcctgcacagagaagccctataatcacaggtctgtggtggccccgaaatggggggcctgctagtcaggaggatgctgtgcacactgtgtgtgatgaatctcgccagaaaggctcctgaggtcccaggttggcacttctccctgcagccattgtagaagatctgctggtccttgcaggcaaagctacagccagaatgtccgtttgaaactcctagctcatctgtcaccgagcttcatccgaatgtgccacggagcttgctctccacttcctccgtgcagtggccctgccacagccctccctcggcacactttgaccctttgtaggattggaattagcaggactcggctatttaaagcaccagtctggggtcgcctgggcccctgctgaccccctcctccagagcagccagcccagcccgggaacaagacggacttcctctcccttcggactcacagcctttgcagagtcaagctccacttgaagctcactcagtaatatcctttcaatgtgttttatattgttttgactgcctttttttgtagaaataaaaattgaccttagaatttatcgtcagataaacttgtaaagatttgaatattaatgtcttttcaaggcaaatgggattgtccccgcactagtagagaatccatgtcgctctgacaccccaaggaagccgacgatccaaatgccgtgtgtcaccaaccccgcttctgccactggcggcttcccttcttggctcttgggggggactagatcctgtggagaagatgacttaaactttgctttttgttttaattttaattctataacttgagatctttccggggcctacaggcgtgtaagacagcttggtctggtctgtgcagaagtggggagtgatgggcaggttcggcagcctaacattgttcaggcgcatggcccctgcggtgtgtacacgaactcggcttcttttgtcctaggtacgccaagggcaggtttctggagactcccttgtgcccgggatggcaagggcaccgggctggcgtttccacatctgtcttcattagcagaaaagtgatgatggattttatttcactcacactccagtttgtaataaaatgccaaattctgtcagctatccaaacaagccaccatttgttcttgttgcttctctggatccagaaatgttgccattcttggaaactgtcccattgcttcgtatttctgccaacgtagctctgcctgcctgtcaacccctcactgcactctgctcatcacgggaggatacctgtgtgccggcagcccctcagggactctcagccctggcactggcaccccagggttggccccgtcagcagaggcttggctttcgagccagtgggtgtctctcctttgggcctgggcggcttgctcctgccagccatgccttcagggtaggctctgagcaagctggcgaacagccctggctgctccaaaaccaaaaagctgggtcctctggaggaggggcgagctgtggagcagccacccactgctgccccaagctcactcaggaattcacacccgcctggtttcttgaagtgtgctgggtccttccctctgctccctactccccaccacggcagagaataggctttctaagatgctgcgatcccgttctgctgcccgtaataaaaatgctctcagacactg

SEQ ID NO: 3472 - DNA, 4815 bp, Homo Sapiens
  NM_198159
gtaaactccccgcgctggggcgggcggccgcgagccggcgagcgggcagagctcggcactgcgccggggcgcacggctcgggggacccaggcccagctaccttccctccgcccccgggctctgttctcactttccagcagtggaaggacgggaagcgggagccatgcagtccgaatcggggatcgtgccggatttcgaagtcggggaggagtttcatgaagagcccaaaacctattacgaactcaaaagtcaaccgctgaagagcagcagttccgccgagcatcctggggcctccaagcctccgataagctcctccagtatgacatcacgcatcttgctacgccagcaactcatgcgtgagcagatgcaggagcaggagcgcagggagcagcagcagaagctgcaggcggcccagttcatgcaacagagagtgcccgtgagtcagacaccagccataaacgtcagtgtgcccaccacccttccctctgccacgcaggtgccgatggaagtccttaaggtgcagacccacctcgaaaaccccaccaagtaccacatacagcaagcccaacggcagcaggtaaagcagtacctttctaccactttagcaaataaacatgccaaccaagtcctgagcttgccatgtccaaaccagcctggcgatcatgtcatgccaccggtgccggggagcagcgcacccaacagccccatggctatgcttacgcttaactccaactgtgaaaaagagggattttataagtttgaagagcaaaacagggcagagagcgagtgcccaggcatgaacacacattcacgagcgtcctgtatgcagatggatgatgtaatcgatgacatcattagcctagaatcaagttataatgaggaaatcttgggcttgatggatcctgctttgcaaatggcaaatacgttgcctgtctcgggaaacttgattgatctttatggaaaccaaggtctgcccccaccaggcctcaccatcagcaactcctgtccagccaaccttcccaacataaaaagggagctcacagagtctgaagcaagagcactggccaaagagaggcagaaaaaggacaatcacaacctgattgaacgaagaagaagatttaacataaatgaccgcattaaagaactaggtactttgattcccaagtcaaatgatccagacatgcgctggaacaagggaaccatcttaaaagcatccgtggactatatccgaaagttgcaacgagaacagcaacgcgcaaaagaacttgaaaaccgacagaagaaactggagcacgccaaccggcatttgttgctcagaatacaggaacttgaaatgcaggctcgagctcatggactttcccttattccatccacgggtctctgctctccagatttggtgaatcggatcatcaagcaagaacccgttcttgagaactgcagccaagacctccttcagcatcatgcagacctaacctgtacaacaactctcgatctcacggatggcaccatcaccttcaacaacaacctcggaactgggactgaggccaaccaagcctatagtgtccccacaaaaatgggatccaaactggaagacatcctgatggacgacaccctttctcccgtcggtgtcactgatccactcctttcctcagtgtcccccggagcttccaaaacaagcagccggaggagcagtatgagcatggaagagacggagcacacttgttagcgaatcctccctgcactgcattcgcacaaactgcttcctttcttgattcgtagatttaataacttacctgaaggggttttcttgataattttcctttaatatgaaattttttttcatgctttatcaatagcccaggatatattttatttttagaattttgtgaaacagacttgtatattctattttacaactacaaatgcctccaaagtattgtacaaataagtgtgcagtatctgtgaactgaattcaccacagactttagctttctgagcaagaggattttgcgtcagagaaatgtctgtccatttttattcaggggaaacttgatttgagatttttatgcctgtgacttccttggaaatcaaatgtaaagtttaattgaaagaatgtaaagcaaccaaaaagaaaaaaaaaaagaaagaaagaggaaaagaaatccatactaacccttttccattttataaatgtattgattcattggtactgccttaaagatacagtacccctctagctttgtttagtctttatactgcaaactatttaaagaaatatgtattctgtaaaagaaaaaaaaaatgcggccttttcatgaggatcgtctggttagaaaacataactgataccaaccgaaactgaagggagttagaccaaggctctgaaatataaagtctaatcttgctctcttttattctgtgctgttacagttttcttcatcaatgagtgtgatccagtttttcataagatattttattttgaaatggaaattaatgtcctctcaaagtaaaatattgaggagcactgaaagtatgttttactttttttttattttatttttgcttttgataagaaaaccgaactgggcatatttctaattggctttactatttttatttttaaattatgttttactgttcatttgatttgtacagattctttattatcattgttcttttcaatatatttgtattaatttgtaagaatatgcatcttaaaatggcaagttttccatatttttacaactcactggtggttttccgcattctttgtacacccatgaaagaaaacttttatgcaaggtcttgcatttaaaagacagctttgcgaatattttgtaaattacagtctcactcagaactgtttttggacacatttaaggtgtagtattaataggttaaaaccaggctttctagaaagaataaacttacatatttatttttaggacatgaaaatagcaatattcttggagattgataaccatagcattaatacgcccattatggtcatttaaattggggtttatttcagcaaacttgttgaatttatttttaagaaagaaatactgtattgggaagttactgttacttgataacaatgttttaacaagaagcaatgttataaagttagtttcagtgcattatctacttgtgtagtcctatgcaataacagtagtgttacatgtatcaagcctagatgttttatacagatgccatatagtgttatgagccaggctgttgaatggaatttctcagtagcagcctacaactgaatagcaagtggcataaagcatatccattcagaatgaagtgccttaaatatagcagtagtcttttttggactagcactgactgaactgtaatgtaggggaaagtttcatgatggtatctatagtcaagacgaacatgtagcatggtgcctatgtagacaatataagagcttccaattttccttcagatatttttaatattaaatatattttagtgacagagtgccaacttctttcatcaggaaaccttattcaggagggtttttaaaaagtgtttaaatgtcaaatgtgaattggtgatgggtgatggagggttcagagaggagtgatcgtcagatgtgtgaatggacggtttaggtgaaaataatcaactgcatagttcccatgcacgctgggcaatgagaatccttggaaacattggtgatgctatcagttttatagctttatttcttaagggggtagggaaaattagttcccattctttcaacccccttaactgtatagctcttttcctagaatagtgacgcaaatctgcatgaacagctaattgtaccatagtgttcattgatacaatcatagcattgtctatttttctcttcatatttatatgggggggagggcgctggatgcaaaagttgaagatcgtgatgctatgatgttagttttccttagctgattttgagggtttttaaaaataaagcaaggttgactaacctacggccacgggaacaggaccatggttaagcaaccatatagaaagctttgttgaaagaaagtatggcatcttgtaccactgccctgactgtcacaactcctaaccttgccattgcctgcctccccctccccttctccttaagagacaatttctgcaggtggcaggtgagcaagcccaggagaatgctgcaatcttgggggtggttttatttatttcttttttgccaaatagagtgtggattcatttcaggggctagctaagccaagaggcagtggtttgggcttgttgtttgtaacaagaaaatgatccacaccactcccccgattcccgggtgcagaattgtaactcggggttgggcctctatatggagtgaccaaaatgccaaaattgtccatctgcctctgagtagggcaatggaaataccaaaccttctgactttgccaaaaagcatacaagcaacctggtcatacataggatgacaaaattctttctggttgtttttaaacaataaagcaataagaacaaatacaatacataggaagttaaaagcacaaaggaatgaacttattaatatttttgaaaaatgcactgggaaaaagttgatgtcaataacagtataaaacagccctatttcttgataaaaaatgacaaatgactgtctcttgcggatgcttggtactgtaatgttaataatagtcacctgctgttggatgcagcaataatttctgtatggtccatagcactgtatattatggatcgatattaatgtatccaatgaaataatcgacttgttcttgatagcctcattaaagcatttggtttttcacatag

SEQ ID NO: 3473 - DNA, 2094 bp, Homo Sapiens
  NM_198195
gggaagaggcggagaacaatatggcggatggcgaggagccaatggctgttgatggtgggtgtggggacactggagactgggaaggtcgctggaaccatgtaaagaagttcctcgagcgatctggacccttcacacaccctgatttcgaaccgagcactgaatctctccagttcttgttagatacatgtaaagttctagtcattggagctggcggcttaggatgtgagctcctgaaaaatctggccttgtctggttttagacagattcatgttatagatatggacactatagatgtttccaatctaaataggcagtttttatttaggcctaaagatattggaagacctaaggctgaagttgctgcagaatttctaaatgacagagttcctaattgcaatgtagttccacatttcaacaagattcaagattttaacgacactttctatcgacaatttcatattattgtatgtggactggactctatcatcgccagaagatggataaatggcatgctgatatctcttctaaattatgaagatggtgtcttagatccaagctccattgtccctttgatagatggggggacagaaggttttaaaggaaatgcccgggtgattctgcctggaatgactgcttgtatcgaatgcacgctggaactttatccaccacaggttaattttcccatgtgcaccattgcatctatgcccaggctaccagaacactgtattgagtatgtaaggatgttgcagtggcctaaggagcagccttttggagaaggggttccattagatggagatgatcctgaacatatacaatggattttccaaaaatccctagagagagcatcacaatataatattaggggtgttacgtataggctcactcaaggggtagtaaaaagaatcattcctgcagtagcttccacaaatgcagtcattgcagctgtgtgtgccactgaggtttttaaaatagccacaagtgcatacattcccttgaataattacttggtgtttaatgatgtagatgggctgtatacatacacatttgaagcagaaagaaaggaaaactgcccagcttgtagccagcttcctcaaaatattcagttttctccatcagctaaactacaggaggttttggattatctaaccaatagtgcttctctgcaaatgaaatctccagccatcacagccaccctagagggaaaaaatagaacactttacttacagtcggtaacctctattgaagaacgaacaaggccaaatctctccaaaacattgaaagaattggggcttgttgatggacaagaactggcggttgctgatgtcaccaccccacagactgtactattcaaacttcattttacttcttaaggaaaatctccacataatagaaaactcatggaaataatatactttgtggatgctaagaagttgaatcgatgtcatttttagcaatagtgttgccacgatttgtctttttttatataatgaaccactcttttttaactttgtaaccttcccttgaagacagaattttggtgttggtgcttgtaagcattttcattaataatatgagaaatgatacctggagagagagattatgagcaaatgtattgcttcttttagaggaggaagcatacaacctcttttgtgtgaattttgttattatggtcaaagaatgcattcctaagttttcatttgagtacccaaatacacaaaaggtgtccctttaaggaaaataaagaattaagttttaaataacattacattttacaatctgacatctggagtatattgaacataggctatttcttgatataacactcatttaattgtggccatccaaatgaatattattgcagaatttatcttgttcataatgatttgtaaatggtgttatagctgaatacctgtgcatgaaaatgggcaatattttcatctgtttacttgtagtgccatagaggccaatatgcacaatattaactaatgccaagacatggctgtttaaaaaatttaatgttcaaacagttatcactgatgcttttgcactatttattaataaaatcatatattgtgtaaaaaaaaaaaaaaaaaa

SEQ ID NO: 3474 - DNA, 4481 bp, Homo Sapiens
  NM_198196
ttcctgtctacgtttcatttcctgggggcttgccaagtgataaacagacccaggcgtgtgtggtagagttcgggttttttagcacgaagtgggtggctggagtttgcttgaaaacatcaattgactttgtgatcattacagaaatgctggtgtaaggtgttcagaagacaatggagaaaaaatggaaatactgtgctgtctattacatcatccagatacattttgtcaagggagtttgggaaaaaacagtcaacacagaagaaaatgtttatgctacacttggctctgatgtcaacctgacctgccaaacacagacagtaggcttcttcgtgcagatgcaatggtccaaggtcaccaataagatagacctgattgctgtctatcatccccaatacggcttctactgtgcctatgggagaccctgtgagtcacttgtgactttcacagaaactcctgagaatgggtcaaaatggactctgcacttaaggaatatgtcttgttcagtcagtggaaggtacgagtgtatgcttgttctgtatccagagggcattcagactaaaatctacaaccttctcattcagacacacgttacagcagatgaatggaacagcaaccatacgatagaaatagagataaatcagactctggaaataccatgctttcaaaatagctcctcaaaaatttcatctgagttcacctatgcatggtcggtggaaaacagcagcacggattcttgggtccttctttctaagggtataaaggaggataatggaactcaggaaacacttatctcccaaaatcacctcatcagcaattccacattacttaaagatagagtcaagcttggtacagactacagactccacctctctccagtccaaatcttcgatgatgggcggaagttctcttgccacattagagtcggtcctaacaaaatcttgaggagctccaccacagtcaaggtttttgctaaaccagaaatccctgtgattgtggaaaataactccacggatgtcttggtagagagaagatttacctgcttactaaagaatgtatttcccaaagcaaatatcacatggtttatagatggaagttttcttcatgatgaaaaagaaggaatatatattactaatgaagagagaaaaggcaaagatggatttttggaactgaagtctgttttaacaagggtacatagtaataaaccagcccaatcagacaacttgaccatttggtgtatggctctgtctccagtcccaggaaataaagtgtggaacatctcatcagaaaagatcacttttctcttaggttctgaaatttcctcaacagaccctccactgagtgttacagaatctacccttgacacccaaccttctccagccagcagtgtatctcctgcaagatatccagctacatcttcagtgacccttgtagatgtgagtgccttgaggccaaacaccactcctcaacccagcaattccagtatgactacccgaggcttcaactatccctggacctccagtgggacagataccaaaaaatcagtttcacggatacctagtgaaacatacagttcatccccgtcaggtgcaggctcaacacttcatgacaatgtctttaccagcacagccagagcattttcagaagtccccacaactgccaatggatctacgaaaactaatcacgtccatatcactggtattgtggtcaataagcccaaagatggaatgtcctggccagtgattgtagcagctttactcttttgctgcatgatattgtttggtcttggagtgagaaaatggtgtcagtaccaaaaagaaataatggaaagacctccacctttcaagccaccaccacctcccatcaagtacacttgcattcaagagcccaacgaaagtgatctgccttatcatgagatggagaccctctagtctcgtgagactttgccccatggcagaactctgctggaatcctattgagaaggtagacattgtgctttattaatatagtcgctcttcagccatgcctttgctgcagctgaaatggaagtcagaagtgagtgacctgttttcccagcaactcaccctcttccatctccaaacgcctgaagcttaaccaagagtgagaggatatgtcatgttcacactcaatgcaattcgtagtggttttcttgcttatgtaagaagtacatattagtctgccatctttaaaaaaaaatacagtattttcatttaaattctctgatggagggacaacaatggtttcaactgtatgcccatgcctgatcctcttatttgaacatctatcaacattgtaaactctttgccaaaatcctggggctttgctgcattccctaagataattacaggaaaaagaaaatgtaaaagtgctaacaaggctgccaagtaatggagaagtatggttagtcttcatattgaaattctgttgcttattttcatggaaggaaacagaatactttgcacaggaaccacattttcaatcctccttcactgtcttcctaccatgttcagcccagactcctgccacatggaccaggatgaagagggatcaaagagataattagccaaaaacccagtagcctagaagatacaaaactccactggcctctaaaattatattagccaagagtggtttcatttgagtgccttcgtgtgtatgtccatcaaactggaaccaaactgttttgtaagtaaacaggcagcctaagcccaaccctactttctaattccagttattctctttttcatctggggatttacctgttcatttaatctgcctgttttgatctgttttgaaaaagataaagagcctcaaatcagaccagcactgattaattaaccctgctcctaccaatcttttttaaagcagttgaagcagaatgtataggtgtcagagaagaaacctagtcagccagacgtgctctgtattcagcaatagtttgtgaatgaataaattactaatcctccttgtcgcttgaaaccttcccacactccctgctccaggagggaaaaacagatgttgttgacagatagagtgataggcaaattctgtgtggactttagtcccaaaaggaaactttagttcacttgcagtatgcttatccttgactgcacatgagaatgccttgtgcagagttatttggagattatgtctttttcttaaacaccatggctgtcacacttcagttcaattaaatcagaatgtctgaggagtgagacacaggcatcaacactctcaaatgattcacatgttcagccaaagttgagaaccatcgagcctgtggaagttctttctcatggctcagaatcttaggtaggtgcttaactcttgtggtggccagcctccaagatgagccccagtgttcttgcctcctactattcacatctttatgtggtcccctccaatgctgaatacagatgatttgtgtaacctgaggccaggattaaggggaggcaatcaatgcacctagggaaaaaatttaaggaggtattcacactcagggtcatgcacttgcacaatgttgagaatgagtaccactctcaccattggtatagccaaaaaagcttggaagtgaccaaggctaggtcacaaaatacactgtggcttcttctttgatctctctttgaccatactgacactgggaaaagcccattcccatgccatgaagacaccaaggcagccctattgagaaatctacctgtcgtggccgggcgcagtggctcacgcctgtaatcccagcactttgggaggccgaggtgggtggatcacgaggtcaggagatcgagaccatcctggctaacacagtgaaaccccgtctctactaaaaatacaaaaaattagccgggtgtggtgtcgggcacctgtagtcccagctactcaggaggctgaggcaggagaagggtgggaacccgggaggcagagcttgcagtgagccgagattgtgccactgcacactccaatctgggtgaaagaccgagactccgcctcaaaaaaaaaaaaaaaagaaagaaagaaagaaagaaagaaatctacctgtcaaggaactaaggtattttgctaacaagcaccaacttgccagccatgtaagggagccatcttggaagcagatcctccagcctccagtcaagtcttcagataattgcaacttcagttgatcttttgaccaagacctcaagagagccagaactacccagctaagccttttactaaatttctgaacttctaacactattagataataagtgcttattgtttaacaccattaattttgagtataatttgttacatagcgacagataactatacagctcaacaactagaaaaataaactgtttacctgccttaattatttatctttagttccttattagttctcaagaaacaaatgctagcttcatatgtatggctgttgctttgcttcatgtgtatggctatttgtatttaacaagacttaatcatcagta

SEQ ID NO: 3475 - DNA, 660 bp, Homo Sapiens
  NM_198202
ggtttgcacgccggaccggagagcgcggaggcagccatggtgcggttcaagcacaggtacctgctctgcgaactggtgtctgacgacccccgctgccgcctaagcctcgatgaccgagttctgagcagcctcgtacgggacacgatcgccagggtgcacggaactttcggcgcagccgcctgctccatcggcttcgcgggtacaataagaacatgtcagaagttcctaattcagtacaacaggagacagctgttgatcttgttgcagaactgcactgatgaaggagagcgggaagctatccagaagtctgtgacaagaagctgcttattagaggaggaggaggagtcaggtgaggaggctgcagaagcaatggagtgaacctctgctccccacacagctggctacactgctcaggcttcaggcccacttgttgaacagaacaatctgggtagcaacagcatcttccacagttttccaaactggatagctgccaaccagcagacattacccacttgaaatggagtactcagttaaactgaagttgcctttacctagcattccctggtgaagtgttgcaggttgtgaactctgtagacatctttattgcttggctaagagtagatttaataaatgtatctggtttccgtggcaaaaaaaaaa

SEQ ID NO: 3476 - DNA, 890 bp, Homo Sapiens
  NM_198232
ctgggtacaaatgtattttggatcaaagaaactccagtattcaaagataggaactgacaggattttaggtcactttgtaggtcaccacctagaggggaggaagacctcgctttggagagtgggaataaaacgctcgtggaaaagggtacacgcttttctgggaaagtgaggccaccatggctctggagaagtctcttgtccggctccttctgcttgtcctgatactgctggtgctgggctgggtccagccttccctgggcaaggaatcccgggccaagaaattccagcggcagcatatggactcagacagttcccccagcagcagctccacctactgtaaccaaatgatgaggcgccggaatatgacacaggggcggtgcaaaccagtgaacacctttgtgcacgagcccctggtagatgtccagaatgtctgtttccaggaaaaggtcacctgcaagaacgggcagggcaactgctacaagagcaactccagcatgcacatcacagactgccgcctgacaaacggctccaggtaccccaactgtgcataccggaccagcccgaaggagagacacatcattgtggcctgtgaagggagcccatatgtgccagtccactttgatgcttctgtggaggactctacctaaggtcagagcagcgagataccccacctccctcaacctcatcctctccacagctgcctcttccctcttccttccctgctgtgaaagaagtaactacagttagggctcctattcaacacacacatgcttccctttcctgagtcccatccctgcgtgattttgggggtgaagagtgggttgtgaggtgggccccatgttaacccctccactctttctttcaataaaacgcagttgcaaacacctgaa

SEQ ID NO: 3477 - DNA, 903 bp, Homo Sapiens
  NM_198235
gtataaggtccacaccccgggagctgagtgattgcagaaactggccttccatctctctcagacaccaagctgcagatccaggtcactttgtaggtcaccacctagaggggaggaagacctcgctttggagagtgggaataaaacgctcgtggaaaagggtacacgcttttctgggaaagtgaggccaccatggctctggagaagtctcttgtccggctccttctgcttgtcctgatactgctggtgctgggctgggtccagccttccctgggcaaggaatcccgggccaagaaattccagcggcagcatatggactcagacagttcccccagcagcagctccacctactgtaaccaaatgatgaggcgccggaatatgacacaggggcggtgcaaaccagtgaacacctttgtgcacgagcccctggtagatgtccagaatgtctgtttccaggaaaaggtcacctgcaagaacgggcagggcaactgctacaagagcaactccagcatgcacatcacagactgccgcctgacaaacggctccaggtaccccaactgtgcataccggaccagcccgaaggagagacacatcattgtggcctgtgaagggagcccatatgtgccagtccactttgatgcttctgtggaggactctacctaaggtcagagcagcgagataccccacctccctcaacctcatcctctccacagctgcctcttccctcttccttccctgctgtgaaagaagtaactacagttagggctcctattcaacacacacatgcttccctttcctgagtcccatccctgcgtgattttgggggtgaagagtgggttgtgaggtgggccccatgttaacccctccactctttctttcaataaaacgcagttgcaaacacctgaa

SEQ ID NO: 3478 - DNA, 1618 bp, Homo Sapiens
  NM_012135
agagcccggggcgagtgggcctctgctcgtgggtggttctcgtggaggtcagctcccgcgtgtctccgctcgacagggtgcttgggcagagcccatcgggtaggcgcgggccatggcgcagtacaagggcaccatgcgcgaggcaggccgtgccatgcacctcctcaagaagcgcgaaaggcagcgggagcagatggaggtgctgaagcagcgcatcgccgaggagaccatcctcaagtcgcaggtggacaagaggttctcggcgcattacgacgccgtggaggccgagctgaagtccagcacggtgggcctggtgaccctgaacgacatgaaggcccggcaggaggccctggtcagggagcgcgagcggcagctggccaagcgccagcacctggaggagcagcggctgcagcaggagcggcagcgggagcaggagcagcggcgcgagcgcaagcgtaagatctcctgcctgtcctttgcactagacgacctcgatgaccaggccgacgcggccgaggccaggcgcgccggaaacctgggcaagaaccccgacgtggacaccagcttcctgccagaccgcgaccgcgaggaggaggagaaccggctccgagaggagctgcgccaagagtgggaggcgcagcgcgagaaagtgaaggacgaggagatggaggtcaccttcagctactgggacggctcgggccaccggcgcacggtgcgggtgcgcaagggcaacacggtgcagcagttcctgaagaaggcgctgcaggggctgcgcaaggacttcctggagctgcgctccgccggcgtggagcagctcatgttcatcaaggaggacctcatcctgccgcactaccacaccttctacgacttcatcatcgccagggcgaggggcaagagcgggccgctcttcagcttcgatgtgcacgatgacgtgcgcctgctcagcgacgccaccatggagaaggacgagtcgcacgcgggcaaggtggtgctgcgcagctggtacgagaagaacaagcacatcttccccgccagccgctgggaggcctatgaccccgagaagaagtgggacaagtacaccatccgctaacacccgcctgccagagcggaaaccgggggtggggggagacactcatttctaggccccatcaccagtcacttgatttcgtgaccttgatttcttcccccaaatttaataaagacagagggttctcatgattcacattggttgtgctattgctgatgttatgctttggttgcttggttggtcttttctgagtattttagtgttgccacctggatttgctgcattgctctgctgagctgtattgaaaccatgactgggcccactgtcagacagaaattagaataggaggcacattttttacctggtggttatgagcatggacttgggggccacagtgactgagtttgattcccgacacagcctcctccttgctgtgtagttttgggtaagcttattaaacccccatgcctcagtttggtcacctgtaaaaggaaataacaagagcacttactttataagattgatgtgagtattaagtgaattaatatttgtaaaacgcttagctcttaataaatgtttctgttgttatta

SEQ ID NO: 3479 - DNA, 2172 bp, Homo Sapiens
  NM_012138
aatcccttcaaccttctgcgcgcttccgccttcatgctagcaacgcccgcagtgacgcgcaggccccgccccctcccgcgcgcctcccggaagtggccggtccagagctgtggggtggcctccgcgcggtctctggcggagtcggggaatcggatcaaggcgagaggatccggcagggaaggagcttcggggccgggggttgggccgcacatttacgtgcgcgaagcggagtggaccgggagctggtgacgatggcggggccgcagcccctggcgctgcaactggaacagttgttgaacccgcgaccaagcgaggcggaccctgaagcggaccccgaggaagccactgctgccagggtgattgacaggtttgatgaaggggaagatggggaaggtgatttcctagtagtgggtagcattagaaaactggcatcagcctccctcttggacacggacaaaaggtattgcggcaaaaccacctctagaaaagcatggaatgaagaccattgggagcagactctgccaggatcgtctgatgaggaaatatctgatgaggaagggtctggagatgaagattcagagggactgggtctggaggaatatgatgaggacgacctgggtgctgctgaggaacaggagtgtggtgatcacagggagagcaagaagagcagaagccactctgcaaaaacaccgggcttcagtgtccagagtatcagtgactttgagaaatttaccaagggaatggatgaccttgggagcagtgaggaggaggaagacgaagagagtggcatggaagaaggggatgacgcggaagactcccaaggcgagagtgaggaagacagggctggagatagaaacagtgaggatgatggtgtggtgatgaccttctctagtgtcaaagtttctgaggaagtggagaaaggaagagccgtgaagaaccagatagcactgtgggaccagctcttggaaggaaggatcaaactacaaaaagctctgttgaccaccaaccagcttcctcaaccagatgttttcccattgttcaaggacaaaggtggcccagaattttccagtgccctgaaaaatagtcacaaggcacttaaagcattgttgaggtcattggtaggtcttcaggaagagttgcttttccagtacccagacactagatatctagtagatgggacaaagcccaatgcgggaagtgaggagatttctagtgaagatgatgagctggtagaagagaagaagcagcaacgaagaagggtccctgcaaagaggaagctggagatggaggactatcccagcttcatggcaaagcgctttgccgactttacagtctacaggaaccgcacacttcagaaatggcacgataagaccaaactggcttctggaaaactggggaagggttttggtgcctttgaacgctcaatcttgactcagatcgaccatattctgatggacaaagagagattacttcgaaggacacagaccaagcgctctgtctatcgagttcttggcaaacctgagccagcagctcagcctgtcccagagagtttgccaggggaaccggagatccttcctcaagcccctgctaatgctcatctgaaggacttggatgaagaaatctttgatgatgatgacttttaccaccagctccttcgagaactcatagaacggaagaccagctccttggatcccaacgatcaggtggccatgggaaggcagtggcttgcaatccagaagttacgaagcaaaatccacaaaaaagtagataggaaagccagcaaaggcaggaaacttcggtttcatgtccttagcaagctactgagtttcatggcacctattgaccatactacaatgaatgatgatgccaggacagaactgtaccgctctctttttggccagctccaccctcccgacgaaggccacggggattgacatcgcccacctccgacacccagtgggcgccttggctggtgcggctgctggtccagatggaggaaaccagtgactttatggggctgagctagtagggaagcccctggaaagatgctgcgttccgaacctgtgcctaatacacgcaagggcgctgtcccgcccaaccccgcctttaaacgccacaaataaagagcattgttaccgccaaaaaaaaaaaaaaaaaaaaaaaaaaaaaaaa

SEQ ID NO: 3480 - DNA, 1515 bp, Homo Sapiens
  NM_012139
ccggctccggcgctcacctacccccggcaggccccgcccccgtgcggtccctcccggaagcgccggcggagcgtcctcgcatggagcgcgagcccagcgcctcggaggccgcccccgcggcggccgcgctcttcgcctggggtgcaaatagctatgggcaacttggcctcggccataaggaagatgtgctgttgccccagcaactgaatgacttctgtaaacccaggagtgtcaggaggatcacaggaggagggggccactctgcagttgtcacagatggaggagacctctttgtttgtggcctgaacaaagatgggcaactggggcttggtcacacagaggatatcccatattttaccccctgcaaatccctctttggctgtcccatccaacaggtggcctgtggctgggattttacgattatgctcacagaaaatggtcaagttctatcatgtggatccaactcctttggccagttaggagttcctcatggacctcgaagatgtgtggttccccaggccattgagctccataaagagaaggttgtttgtattgctgctggactgaggcatgcagtagctgctacagcgagtggcatcgtgttccagtgggggactggtttggcatcatgtggacgacggttgtgccctgggcagactcttccattgtttttcacagcaaaggaaccaagcagagtgacaggtctagagaattctaaagcaatgtgtgttcttgctggctcagaccactcagcttcattaacagatgcaggagaggtgtatgtttggggaagcaacaagcatgggcaactggctaatgaggctgctttccttcctgtgccccagaaaatagaagcacattgtttccagaatgaaaaggtcactgccatctggagtggatggacacacctggttgctcagacagaaactggcaagatgtttacctggggccgagcagactatggtcagctagggaggaagttggagacttatgaaggctggaaactagaaaagcaagattcatttctcccctgttcaagaccaccgaacagcatgccttcgtctccgcattgcttaactggagcaactgaggtctcttgtggctcagagcataatttggcaataattggtggagtgtgttactcttggggctggaatgagcatggcatgtgcggagatggcactgaagccaacgtctgggccccaaagccggtgcaggctctgctgtcatcgtcaggactccttgtgggctgtggggctggccactccttggccctctgccagctgccagctcaccctgcattggtccaggaccccaaggtcacctacctttccccagatgccatcgaggacactgaatctcagaaagccatggacaaagagagaaactggaaggaaagacaatcagaaacttcaacccaaagccaatctgactggtccagaaatgggggactgtgatagagaatctttaataaagtggcttttcccaccaaaaaaaaaaaaaaaaaaaaaaaaa

SEQ ID NO: 3481 - DNA, 2515 bp, Homo Sapiens
  NM_012142
gaggcggggccaggcctggtctctgataacgggatgggtggtgctggacctcgggcggggccgggcctcgtggcgggaggaggcagggcagggcctctgggacggggctggacggcttgttgacggaaacgagcccttgacgctgtggcccggaagtggagcggctgtcgcagtgcggctccggcagtggcagcggaggcctgtgtttgcggccttcggcaagcgactgagatggcgagcgcaactgcacctgcagccgcagtccccaccctggcttcgcctttggagcagctccggcacttggcggaggagctgcggttgctcctgcctcgagtgcgggtcggcgaagcccaggagaccaccgaggagtttaatcgagagatgttctggagaagactcaatgaggcagctgtgactgtgtcaagggaagccacgactctgaccatagtcttctctcagcttccactgccgtctccacaggaaacccagaagttctgtgaacaagtccatgctgccatcaaggcatttattgcagtgtactatttgcttccaaaggatcaggggatcaccctgagaaagctggtacggggcgccaccctggacatcgtggatggcatggctcagctcatggaagtactttccgtcactccaactcagagccctgagaacaatgaccttatttcctacaacagtgtctgggttgcgtgccagcagatgcctcagataccaagagataacaaagctgcagctcttttgatgctgaccaagaatgtggattttgtgaaggatgcacatgaagaaatggagcaggctgtggaagaatgtgacccttactctggcctcttgaatgatactgaggagaacaactctgacaaccacaatcatgaggatgatgtgttggggtttcccagcaatcaggacttgtattggtcagaggacgatcaagagctcataatcccatgccttgcgctggtgagagcatccaaagcctgcctgaagaaaattcggatgttagtggcagagaatgggaagaaggatcaggtggcacagctggatgacattgtggatatttctgatgaaatcagccctagtgtggatgatttggctctgagcatatatccacctatgtgtcacctgaccgtgcgaatcaattctgcgaaacttgtatctgttttaaagaaggcacttgaaattacaaaagcaagtcatgtgacccctcagccagaagatagttggatccctttacttattaatgccattgatcattgcatgaatagaatcaaggagctcactcagagtgaacttgaattatgacttttcaggctcatttgtactctcttcccctctcatcgtcatggtcaggctctgatacctgcttttaaaatggagctagaatgcttgctggattgaaagggagtgcctatctatatttagcaagagacactattaccaaagattgttggttaggccagattgacacctatttataaaccatatgcgtatatttttctgtgctatatatgaaaaataattgcatgatttctcattcctgagtcatttctcagagattcctaggaaagctgccttattctctttttgcagtaaagtatgttgttttcattgtaaagatgttgatggtctcaataaaatgctaacttgccagtgattaaatgagtgcccttccaaagtttctttttaccagaaatacagtggattgagactagaacattgctttcatttgggtttgtaggtttaaaaatctgattctaatcagaagtatatttagaacaaaacactttatttataaaagatgactccaaaattcatcttagtatttcaccatgttatatattattatcagcaagtccttctgaatattatcacagattactccatgtctctaaaatatattggcattgagctcatttgttaggtttgcccaccttattgaacagatttattttccttatacatacttgtgttgtccttggttacgtgtgtccccaaatgtaaataccaaatttttataaatcaaaaattttttagtgtgtaagagattttatgtaattttaagggccttttcagttcatccttttgcaaaaccatcaccacttaattatacttttgcatcagtctagaagactgcatattggaaagcagtgtaaatctataatgatgtatattctggtgagctgaatagggcattatgcatgtcctacaggtctccgccacctctcatgcccatcatcttccttttgtaggtgtaattcataacatatgcctttctgctgtctttaggtataatcagcaacagcagtcattctttgagtgactaatgtatacttggggttggggttgaaattccttaagccaaatgagttttagcttactgttttgaagtgccattttgtattgttaacaagtgtcatgaagggaaggaactaaaatcaaactgacagagtgtcaaggcaacaaaataacataaacaaaataataacattgtaaaaaaaaaaaa

SEQ ID NO: 3482 - DNA, 3540 bp, Homo Sapiens
  NM_012161
accgggcgcgcgcgccgacggggcgggcgcatgcgcaagggggcgcgccgcctctgccccgcggcgagggtgtctatggagaggcggcggccgcggctgctgaggcggaggctgaggcagtggcgatggcgccctttcctgaagaagtggacgtcttcaccgccccacactggcggatgaagcagctggtggggctctactgcgacaagctttctaaaaccaatttttccaacaacaacgatttccgtgctcttctgcagtctttgtatgctactttcaaggagttcaaaatgcatgagcagattgaaaatgaatacattattggtttgcttcaacaacgcagccagaccatttataatgtacattctgacaataaactctccgagatgcttagcctctttgaaaagggactgaagaatgttaagaatgaatatgaacagttaaattatgcaaaacaactgaaagagagattggaggcttttacaagagattttcttcctcacatgaaagaggaagaggaggtttttcagcccatgttaatggaatattttacctatgaagagcttaaggatattaaaaagaaagtgattgcacaacactgctctcagaaggatactgcagaactccttagaggtcttagcctatggaatcatgctgaagagcgacagaagttttttaaatattccgtggatgaaaagtcagataaagaagcagaagtgtcagaacactccacaggtataacccatcttcctcctgaggtaatgctgtcaattttcagctatcttaatcctcaagagttatgtcgatgcagtcaagtaagcatgaaatggtctcagctgacaaaaacgggatcgctttggaaacatctttaccctgttcattgggccagaggtgactggtatagtggtcccgcaactgaacttgatactgaacctgatgatgaatgggtgaaaaataggaaagatgaaagtcgtgcttttcatgagtgggatgaagatgctgacattgatgaatctgaagagtctgcggaggaatcaattgctatcagcattgcacaaatggaaaaacgtttactccatggcttaattcataacgttctaccatatgttggtacttctgtaaaaaccttagtattagcatacagctctgcagtttccagcaaaatggttaggcagattttagagctttgtcctaacctggagcatctggatcttacccagactgacatttcagattctgcatttgacagttggtcttggcttggttgctgccagagtcttcggcatcttgatctgtctggttgtgagaaaatcacagatgtggccctagagaagatttccagagctcttggaattctgacatctcatcaaagtggctttttgaaaacatctacaagcaaaattacttcaactgcgtggaaaaataaagacattaccatgcagtccaccaagcagtatgcctgtttgcacgatttaactaacaagggcattggagaagaaatagataatgaacacccctggactaagcctgtttcttctgagaatttcacttctccttatgtgtggatgttagatgctgaagatttggctgatattgaagatactgtggaatggagacatagaaatgttgaaagtctttgtgtaatggaaacagcatccaactttagttgttccacctctggttgttttagtaaggacattgttggactaaggactagtgtctgttggcagcagcattgtgcttctccagcctttgcgtattgtggtcactcattttgttgtacaggaacagctttaagaactatgtcatcactcccagaatcttctgcaatgtgtagaaaagcagcaaggactagattgcctaggggaaaagacttaatttactttgggagtgaaaaatctgatcaagagactggacgtgtacttctgtttctcagtttatctggatgttatcagatcacagaccatggtctcagggttttgactctgggaggagggctgccttatttggagcaccttaatctctctggttgtcttactataactggtgcaggcctgcaggatttggtttcagcatgtccttctctgaatgatgaatacttttactactgtgacaacattaacggtcctcatgctgataccgccagtggatgccagaatttgcagtgtggttttcgagcctgctgccgctctggcgaatgacccttgacttctgatctttgtctacttcatttagctgagcaggctttctttcatgcactttactcatagcacatttcttgtgttaaccatccctttttgagcgtgacttgttttggccccatttcttacaacttcagaaatcttaatttaccagtgaattgtaatgttgtttctcttgcaaattatacttttggtttagaaagggattaggtcttttcaaaagggtgagaacagtcttacatttttcttttaaatgaaatgctttaaagaatgttggtaatgccatgtcatttaaagtatttcatagataattttgagttttaaagtccatggaggtgattggttctctttacacattaacactgtaccaagctttgcagatcttttccgacacacatgtctgaagacttattttcaaagacagcacatttttggaaactaatctcttttccgtaatatttcctttatttcaatgattctcagaaggccaattcaaacaaacccacatttaaggttctttaggattatagaataaattggcttctgagtgttagctcagtgagctaggaaagcaccaatcgatatttgtttcctttagggatactttgttctcaccactgtccctatgtcatcaaatttgggagagattttttaaaataccacaatcatttgaagaaatgtataaataaaatctactttgaggactttaccaagtaatactgttgtgttgtgatttttattataaatctcaatccaggtttactttagtatagaataggactacatactttgtctttggacctcccatgaacttattaccctgacaaatagttttagacagatactgaattttattgagctgaattttctttttgaaatgagttattcagtagtcaaaatttgaatccgtaagtatatctactttgctttgttaaaacatcatgagagtggaggcctgccacccagaaaggcacatactagtgccttttagtacaattttatgtcatgtagaagaaaatggcaatgttcctcctattgatacagatacaggcatatgtcatcttattgcgttttgctttattgcactttgcaaataatgcattttttacaaatggaaggtttatggcaactctgcgttgagccagtctattggtgccatgtttccaataaaacttctcctttcatgtctcgtatattgtgataattcttggagtatttcatagtttttcactattattaaatctgttgtggtgatctgtggccagtgattgttgttactattgtaattgctttggaatgccatgaactgtgccctaataagacagagaacttaattgat

SEQ ID NO: 3483 - DNA, 1799 bp, Homo Sapiens
  NM_012162
gcttccccgagcgccgtcggtggtcatggctgccccagcctcccggcaggtccgacgcagagcccgggcagcgccgcggccccgctcggccgaggactggtggtgggaccggctggcgccgaggggctcggggtaccacctgctgcagtccgacagcatgctgctggtgctgtccgaacccggccccgcccggccccgcgcacagcggcgcgcttcccgccgcactccccggcagccgccccggggccccagcgccgcggccaagcccaaggccgggctcaggtccgaggcggcggccgcgcccgcacccgcaccggcacccacgcccacgcccgaggaagggcccgacgcgggctggggagaccgcattcccttggaaatcctggtgcagattttcgggttgttggtggcggcggacggccccatgcccttcctgggcagggctgcgcgcgtgtgccgccgctggcaggaggccgcttcccaacccgcgctctggcacaccgtgaccctgtcgtccccgctggtcggccggcctgccaagggcggggtcaaggcggagaagaagctccttgcttccctggagtggcttatgcccaatcggttttcacagctccagaggctgaccctcatccactggaagtctcaggtacaccccgtgttgaagctggtaggtgagtgctgtcctcggctcactttcctcaagctctccggctgccacggtgtgactgctgacgctctggtcatgctagccaaagcctgctgccagctccatagcctggacctacagcactccatggtggagtccacagctgtggtgagcttcttggaggaggcagggtcccgaatgcgcaagttgtggctgacctacagctcccagacgacagccatcctgggcgcactgctgggcagctgctgcccccagctccaggtcctggaggtgagcaccggcatcaaccgtaatagcattccccttcagctgcctgtcgaggctctgcagaaaggctgccctcagctccaggtgctgcggctgttgaacctgatgtggctgcccaagcctccgggacgaggggtggctcccggaccaggcttccctagcctagaggagctctgcctggcgagctcaacctgcaactttgtgagcaacgaggtcctgggccgcctactccacggctctcccaacctgcgcttactggatcttcgtggctgtgcgcgcatcacgccggctggccttcaggatctgccatgtcgggagctggagcagcttcatctgggcctgtatggcacgtcagaccggctgactctagccaaggagggcagcccctttttgacccagaagtggtgccatacactgcgagaactggacttgagtggccaggggttcagtgagaaggacctggagcaggccctggctgccttcttaagcacccctgggggctcacacccagccctgtgctctcttaacctcaggggcacccgggtcacaccaagcactgtcagctctgtgatcagcagctgcccgggcctgctctacctcaacctggagtcctgccgctgccttccccggggtctgaagcgggcctaccggggcctggaggaagtccagtggtgtctggagcagctgctcaccagcccctcacccagctaggcagccacagacctgggacacctcagccagcttgcccaccctccacctttgcccaatttcagatatttgagcattttgttaaaataaaacatttttaggaaaaaaaaaaaaaaaaaaaaaaaaaaaaaaaaaaaaaaaaaaaaaaaaaaaaaaa

SEQ ID NO: 3484 - DNA, 9186 bp, Homo Sapiens
  NM_012164
gcttccgccgggagccgcggagctgagggacgcgcggagatgacgcaggcagcaccggaagccgctcccctgtgaggctgcggaccgggagcagcggccgcaggtccgggcgccatggctgcggagcggacccggccgctgcaaggctctggcggtccgagcgtgcctagtagctgtgaacccggcgcgaggtcccgggccccggggcgctcgctcaggtaaatttttccataaccttatggagagaaaggactttgagacatggcttgataacatttctgttacatttctttctctgacggacttgcagaaaaatgaaactctggatcacctgattagtctgagtggggcagtccagctcaggcatctctccaataacctagagactctcctcaagcgggacttcctcaaactccttcccctggagctcagtttttatttgttaaaatggctcgatcctcagactttactcacatgctgcctcgtctctaaacagtggaataaggtgataagtgcctgtacagaggtgtggcagactgcatgtaaaaatttgggctggcagatagatgattctgttcaggacgctttgcactggaagaaggtttatttgaaggctattttgagaatgaagcaactggaggaccatgaagcctttgaaacctcgtcattaattggacacagtgccagagtgtatgcactttactacaaagatggacttctctgtacagggtcagatgacttgtctgcaaagctgtgggatgtgagcacagggcagtgcgtttatggcatccagacccacacttgtgcagcggtgaagtttgatgaacagaagcttgtgacaggctcctttgacaacactgtggcttgctgggaatggagttccggagccaggacccagcactttcgggggcacacgggggcggtatttagcgtggactacaatgatgaactggatatcttggtgagcggctctgcagacttcactgtgaaagtatgggctttatctgctgggacatgcctgaacacactcaccgggcacacggaatgggtcaccaaggtagttttgcagaagtgcaaagtcaagtctctcttgcacagtcctggagactacatcctcttaagtgcagacaaatatgagattaagatttggccaattgggagagaaatcaactgtaagtgcttaaagacattgtctgtctctgaggatagaagtatctgcctgcagccaagacttcattttgatggcaaatacattgtctgtagttcagcacttggtctctaccagtgggactttgccagttatgatattctcagggtcatcaagactcctgagatagcaaacttggccttgcttggctttggagatatctttgccctgctgtttgacaaccgctacctgtacatcatggacttgcggacagagagcctgattagtcgctggcctctgccagagtacaggaaatcaaagagaggctcaagcttcctggcaggcgaagcatcctggctgaatggactggatgggcacaatgacacgggcttggtctttgccaccagcatgcctgaccacagtattcacctggtgttgtggaaggagcacggctgacaccatgagccaccaccgctgactgactttgggtgccggggctgcgggttttgggtgcaacctctgcggcagccgactgcatgaaccaaagttctcacctaatggtatcatcacgcagtgcacaatcatttatctatgttttgccaggggccagggctcggggtgggggagggcttgttttattgacatacaacgcagcatgctaatggggtacaccattgacttcatttgtacttagttatgttggtcagtgttagaggatgcattttgggttcatctttcttgagtggagtattggttttaagtaaagaaagttaaatgatccattaatctgctaattggttgcctatgaaatcacattgtctgttattaaagctttttaccatagcctttttttcttttgaagttgaagcaaaggtgctatgatgttgttacagcaactttcctcacacggggtttagctcttataagagccagtgttaaaacttccaccaaataccagtttataaacttccaccaaataccagtgctaaggaaagtctgtcttccagttcaaatccaattctgtaaattgaatgttagcaactcattctaaaccttatatcttggcagagtcaaggttggccatgtttaagatgtgagcgagttctgtagtttttgttgccatgtcggggaagctagtccccggcagcctggatgactgcacagcggtgccctggtatagcagaaaagagcagtgagctggaaggttagagaccgggcctcttaccctggaactctgcaccctctctgggtcccagcttccttgtctgtacagccaggtatgaagctcagtgatttctaagattctttctggtccttcacctactgaaatgtgtaaaagttgatcatgtatttttgtctgatccctgattcatggtttctttcaggtcggataatatttaaatgaaatgactgttacagagttttctataagaacatcaattatatgaaaaggatgaataaaagggaaatgtagaaaatatagctgattccacttagacagtttaagtaattggttgaagaaatgctgatagaagccatggtttaaatagggacacagtatgctatactagaaggatacctgaacccaacctaacttcctcctttgcctctaacttaatctgcagcctcaggcaagttaactttctcttctaagaccatcattttcttcatcttttaagtgagggaattgtcctagatgagggctcacaaacccaaatgcctaagggagccgtgcaggtaacataaatgagtaaaacattctggggaggattgtgctgtcccctggaaagttgatctaatagggcagttattcagctctgttttgtcattaggagaagcaagcccagggttggcaggtcttcacattgtttcaggaggagctagaaatccagatttttatttgaaatcctggatttttaaaacgttacaactgattaaagaaaatttgaaataaggtgagccaaacaaaacatgtccctgggttgccagattgtgtcctcctccctctctaaagttaggtaattttgtgattcagcagtggaaatgttagtggtcacaatcagggagagagtagagggagcaagcagtagaaaaatctcagccgctcttcagctgtctccccttgtattacaagggtggtggggagggatgtatttcattcacagaccaataggaaggtagtttgaagatgaacataagaattggaacctcagtgacagcttatgtctgggaacatgagttattccttcttgctgactccagtataaagcatatccattttacaggtgagaaaaagggttgctggcagagctgagaatgatgtgaactctagagtggggacctatctcttgcagaatctgcattagcatagagccagactctggacctctgagtgctgtgaagttgatagaaattaatggtgaatttcaaggacagatatcattaatatccatgttgaaactctgtggggtttaagcaaaagaacaatatcttcccccatcccacaaaatctgggtttaatctatctcacattgagttctgtgcatcagctctgcttagtactctagaaatagaaccggaatcacaactgaatctattttgcagaagccccaggagactttgggcaatgatgatggtaaatgactttttactttattattatttttttttttttgagacagagtttcgctcttactgcgcaggctggagtgcaatggcacgatcttggctcactgcaacctccgcctcctgggttcaagtgattctcctgcctcagcctcctaagtagctgggattacaagcatctgccatgacacccaactaatttttatatttttagtagagacagggttccaccatgttggccaggctggtcttgaactcctgacctcaggtcatccacctgccttggcctcccaaagtgctgggattacaggcgtgagccaccacgcctggccgagtttttactttttatcgagcctgaacagataactattactgatctaatgaccatccccaccctacctcactttcagatctatccaatagcttcaaagggcaagtaattataatcatttgtgggaaaagttttattaaaaagtgacaaacttgaagctgtatatagtatgttctatttcagtttttagtggtgaatacagaagtcatcaaggtggtacttggtgccgctggaattttttttttttcctaggcagtcttgctctgtcatacaggctggagtacagtggcatcatcatgcagctggattttgacagcagaacttcaggcagtaattggagtcctaatgtcagttcttccttatggaggcctttatttggcctgagattttattcaactactttatagatgctgggtttattcatactatcgccagtttttataaaaatggaaaactagctcatcctttttgcaaaagaaagcaaagtggggagtcagaatgagaagtggataggggataactaaaactattctttactctcctttcattgcctttgagagctagctcttgcacacactgactttggcttccttagcgcataggtaagggaattgcctttccctcttttgtgaatattctcatttctgaaaaattctaagtcatgagaagataagccctatcctttcttacaaggattggatttcttgggtgacactgtggtgtggtggaagccagcggcttctttcaggttcataaaggccatcataacaacttcaggcttcatggtgtggacagggatccaggagagctgagtggatgtgtgaagtttctgatagattctgtcatcattccaaaggaatgtagtttcctccagctcaatcatttgaagtaatacacattgccaaatctgactgtaacctgacattttagacctattggagaaataggaagaaagcccctccagtggaaggactggacttggaagaagttctgcaggaaggtgcatgcaattggatagctgttcatgagtgaaacgtggggaacattgctatgaaattgtaaggtttgcacttcatttttcgtagtttaaaaattgctctgttctggctgttgaaaacacttggtgtgaggtttgaatgaggattatataatcattctagtattcataggaaaatgattactgctctctatttgtaaaacaaaagaaataactttcggaaacagtattttagacatgaggaaattgtttgtattaggcattttgatctaacagaatcagctaaggatagtggatcctggctttacacatttctttgaccaaacccagctggcaacttgaagttgttactgtgtggcttccagattgcctagaggtgaatcctaccaacatcactgttttttttgttttgttttgttttttttgtatgtttttgagacagagtcttgctctatccccaggctggagtgcagtggcgtgatctcggcttactgcaacctcagcctcctgggttcaagcgattctcctgcctcagcctcctgagtagctgagactacaggcgcgtgccaccacgcccagctatttttgtatttttagtagagacgaggtttcactatgttggccaggatggtcttgatttcttgacctcgtgttctgcccgcctctacctcccaaagtgccgggattacaggcgtgagctgctgtgcccggccccagcatcacttttatagctttctgtgcctcttcctctgggccttggtgtatgaagccacttgcctttctctgttgggaagcgagcagaatcagattgctactcatgatgcagtccgggcagggcatactgtcacctttgcctgtggacacagttgtcaggataggggagaagccctttaggtccgtcttcttgacacagccctcctacctggttacgctggtgctttcgcttggtttagacaaccaagacacttgagaattatgctgtcctcagaatgtctgatgaaaagaacagattcacttttttgacacaatgcccattagccatctttggcagtgtttctgatcaaaggttccccatgcctgctctaggaaagtaaacttttttcagaataaatcctcaaatggattactgagtagtctttgcaccattcccatcagcctaatcagactgaatggtcacgctcagtgcaaaaagctgttttgctgttaggatgtttcagtgtttcttgtctttcctggaacagttcagttgtttaaatttagtaattcaatcctgaccagtgtaaacccacttaattattgcagcctaaagaattcagctacttctactcttcataaatgtgcccaagtaaatatgtgtttttaatattcaaccctggaaaattagtaattcagatgataaaagctcatgttttggtgtctttgtactcagattgtgaacaggcatatttcactgatttagacttagtatacttgatgagaatgctcaggttgaagagatagttctgtcagcaatccaacatctatagcaatgtggaaaaagtaatcaactcatatttcacgaatttgatgtatgttgtgatttagagggcatgagataaagtttatatttgaactgtgtggggtagggggaagaagaggttgcttaagcaaatagtggggtgattgtggaacaagatgtctctaagatgagaagttattttcttgcatcatagaagcactctttttacccgtgagtgattgtgttaactataaatcatttatatctgtacattaaagcagattccctcaattaggcaaatttggttagccaagcccaagttattgtttgtacttgaaagtaataaagctgcatttccttaaaaatatattctgtagttaagactttgtcttgctttccccccaaccacttcagacattttatccaaccaatgcagggacttttcaaaagtcagtgtgtttttgaaaatagaacaaccccttgagtgatctgaggtggctctgtttttttactgtttctgcatcttctagaaggtaaactcaacaatataaccatttctgaaggtgatccaaaaagcaaaacaataaaggtaaaacacaaggaaataattttggtgaatttcatgaatagttgcaaatgaagggatggggtgggtaaaagtcccattttgcttccagaccttggaatagtcttcctctcttttgcccaaggatgtgtctatccagcacatctttgcatgagttctttcttactaacttaaacttacggggcttcttgtcatttgagtaccacggccctgcacctttgatcccctgacagcatcattaagggcagattgtcattcctgttttacagatgagaaagctgtggcttggtaaagtgattcattgcctagaggagttatagtaagtggtgaggctgaagccctgattttcagcccccacacacctggattttttccatgttttcatgtttgtctgttctttctgtatttcaagtctcttcaaatcccgactgctgccttctgccttcaccacttgtgtgcactgttcaacctgtcttatgctttgcttccagggagtctccccaaccacttctttgagcacttacttgctcttgttcaatcttggtaactctccgttaccatcagggcacatctggattccttaacatcatggagccctagctaatttcttcgagcaaacagttcttgctcctctatttatttccacccttgcgctttgggtgttaatctcccatcctcgtggaaagttcttgatgttcctttccaccagtcctagggccaggctttaatcccattgatctcccactatctttaaagcctctgctgaccaccataccccactccagcctcactgagcatttttgtgtaaggttagtggtgcagttcatttagcaataaatactgttgtaccttttgcagtagacaactattaactttcatccttgattctcagttttttccaaaatacaagtgaatacctggtttccccagcaacattgtaagattgagagtaggaattcattgagattttaatgaattccatggattgtcttaagagctatctaaacttggaagaaaaataacttccagagcatctaaaattgaaaataaaagatcagaagcaaatgaaagatcaattccacacagcttttcctctcttagacgtccctcttctgccatatcctgtaaacatctgaagtgttctgagtacatttggagagaatatttaatgatcacactgtgattagacatgagtagtccctgccagtgggatgttcctgtcctttgcattttaaccacatgttctgtgctctctgtggtaaagataatctaacagtaataaaaacttatggagaaaattacccagagctcctttatcattacgatttttaatactctcttctaatccttatgcacatgtgtatggatttatgtactgcaaatcattgttttgtaatacattctcaaaaatgtgctttaggtttttacaactaccataatattttgtaattttccttcattactgtaatttgctaaaccatttctgttttggtagataattaggtagtttccagttctgctttttagaagatactacagagaacttctttgtgcatatttccttagaacaagttccagtagaagacttactcgcaaaagcagtggaattttttcttagtattttctgttacaggtacagaagagtgcatacaacacacagttttgtcgaatagttatgaagtgaacacttgtctaaccactgcccgagtcaagaaagaacatttctaaacatgtttgccaatttaatagatataaaggaagtatctcaaggttgctttaactgacatttctttaacacatgacaacatttttatgggggaggggactagagagaaaatgacatatttttatgtgtgcttatttgtatctcttgaattctgtctgcatcttttacccattacactttcaaatacttgtgaaatcattggtcgagatgaattatggctataaataaaatttcactaatctaattatcactgatttagaaataatagttcaaccc

SEQ ID NO: 3485 - DNA, 2605 bp, Homo Sapiens
  NM_012171
ggcggggcccggtccagaggcggggacagcagggctccgggcaaggaggtctggatgctgagggcggtccctgaggggcgggcggggcccgaccggcgctctgtgtggccgaggccatgaagccgcagccgcccggctaggccccgggcggctctagcccagggcggcccgcggggcgctgggcctggctcccggctccggtttccgggccggcgggtggccgctcaccatgcccggcaagcaccagcatttccaggaacctgaggtcggctgctgcgggaaatacttcctgtttggcttcaacattgtcttctgggtgctgggagccctgttcctggctatcggcctctgggcctggggtgagaagggcgttctctcgaacatctcagcgctgacagatctgggaggccttgaccccgtgtggctgtttgtggtagttggaggcgtcatgtcggtgctgggctttgctggctgcattggggccctccgggagaacaccttcctgctcaagtttttctccgtgttcctcggtctcatcttcttcctggagctggcaacagggatcctggcctttgtcttcaaggactggattcgagaccagctcaacctcttcatcaacaacaacgtcaaggcctaccgggacgacattgacctccagaacctcattgactttgctcaggaatactggtcttgctgcggagcccgaggccccaatgactggaacctcaatatctacttcaactgcactgacttgaaccccagccgggagcgctgcggggtgcccttctcctgctgcgtcagggaccctgcggaggatgtcctcaacacccagtgtggctacgacgtccggctcaaactggtgagaggggagctggagcagcagggcttcatccacaccaaaggctgcgtgggccagtttgagaagtggctgcaggacaacctgattgtggtggcgggagtcttcatgggcatcgccctcctccagatctttggcatctgcctggcccagaacctcgtgagtgacatcaaggcagtgaaagccaactggagcaaatggaatgatgactttgaaaaccactggcttacgcccaccatttccgaggtcctgtccacggcggggcctcagcagaactctctgactggggcccctggcccggccccacccagccgacatgttttctttggcctgggtggtttataccctgagccaacctttaaaaattggtagatttcacataaaagtccagatccacagcttctcttgaagaatgaccacctggctacgccggctcttcggtggcaacactacctgggacactgcctccccagtcaccaagggccccagctggcccgttctactcacctaagtgccgcctgacccttgtacactaggagctggcctcccacctctgcagggttattccctgcacctcgaggccgctgcgggccaatctggagtgaaacacggggacctgaaggatggagaggctggaccccgctttgaagagggtgcagcctgggaagggcggccttgctggggactgcggtgggagtagagtgcccaggagagggtctgaggggtgggatgggggtcaggacaattttgcaaaagaagtagctggaagccatgggactggcgggagcctgtttgggggatctggatggttgactcctaggagtcaagttcagcatcttcaccgtggctgcagagctgcctgatgggcactagagggcatgccagccccacactccctgggtctggcttcctcccgcaacctcactctagtagagcctgtgcctgcctactagcgctctggggttcggagagtttgggaatttctcagagccaactggctcaggcttgggaaggctggctgctgccctcagctccgcctcatcagctatgtgaaggggtgtgtgtggagtgatcctgccgccccctccctgggctcgtccagagatctcaaactccgatgcccctggggccacgtatgttgtgtaaatggatgaaacaggcccttgagttgggagcctgcttcactttgactttcccactgttgctggagacaaagacatcgtgatgagagaaagttcgcacaatctagtcggtaacagccactttccttgagaccaagagagtgcggtggggatgggggggagagcacgggtccccgtctgacagtggccgctgccatattcaggtgtagctaattgctctggtgtgggaatgcaggcctaatgacagaaatctggagaagccagaaatacagatttgtatgtgagatgtcctgattttttaagttgttggcagaaattaattcagaaatcaaatctgcaggccaaacaaggtgcaggacccagctttggccccatgcccctgtaggtccctctgggacagtcaccgctggggtcctggctgctctgtcattgagggatgctgggcactgctgccgggtggccagggtatggggcatgtgcccagcaatgtggctccttggccccgctggccagtgtcctgggcccctgacaggcgctggctgtgagtggtttgtacatgctacaataaatgcagctggcagcattgtgcaaaaaaaaaaaaaaaaaa

SEQ ID NO: 3486 - DNA, 2109 bp, Homo Sapiens
  NM_012177
aaagtaccagctggcgccttttaagagatacaggtctgtgaagcaggcaggttgctcagctgcccccggagcggttcctccacctgaggcagactccacgtcggctggcatgagccggcgcccctgcagctgcgccctacggccaccccgctgctcctgcagcgccagccccagcgcagtgacagccgccgggcgccctcgaccctcggatagttgtaaagaagaaagttctaccctttctgtcaaaatgaagtgtgattttaattgtaaccatgttcattccggacttaaactggtaaaacctgatgacattggaagactagtttcctacacccctgcatatttggaaggttcctgtaaagactgcattaaagactatgaaaggctgtcatgtattgggtcaccgattgtgagccctaggattgtacaacttgaaactgaaagcaagcgcttgcataacaaggaaaatcaacatgtgcaacagacacttaatagtacaaatgaaatagaagcactagagaccagtagactttatgaagacagtggctattcctcattttctctacaaagtggcctcagtgaacatgaagaaggtagcctcctggaggagaatttcggtgacagtctacaatcctgcctgctacaaatacaaagcccagaccaatatcccaacaaaaacttgctgccagttcttcattttgaaaaagtggtttgttcaacattaaaaaagaatgcaaaacgaaatcctaaagtagatcgggagatgctgaaggaaattatagccagaggaaattttagactgcagaatataattggcagaaaaatgggcctagaatgtgtagatattctcagcgaactctttcgaaggggactcagacatgtcttagcaactattttagcacaactcagtgacatggacttaatcaatgtgtctaaagtgagcacaacttggaagaagatcctagaagatgataagggggcattccagttgtacagtaaagcaatacaaagagttaccgaaaacaacaataaattttcacctcatgcttcaaccagagaatatgttatgttcagaaccccactggcttctgttcagaaatcagcagcccagacttctctcaaaaaagatgctcaaaccaagttatccaatcaaggtgatcagaaaggttctacttatagtcgacacaatgaattctctgaggttgccaagacattgaaaaagaacgaaagcctcaaagcctgtattcgctgtaattcacctgcaaaatatgattgctatttacaacgggcaacctgcaaacgagaaggctgtggatttgattattgtacgaagtgtctctgtaattatcatactactaaagactgttcagatggcaagctcctcaaagccagttgtaaaataggtcccctgcctggtacaaagaaaagcaaaaagaatttacgaagattgtgatctcttattaaatcaattgttactgatcatgaatgttagttagaaaatgttaggttttaacttaaaaaaaattgtattgtgattttcaattttatgttgaaatcggtgtagtatcctgaggtttttttccccccagaagataaagaggatagacaacctcttaaaatatttttacaatttaatgagaaaaagtttaaaattctcaatacaaatcaaacaatttaaatattttaagaaaaaaggaaaagtagatagtgatactgagggtaaaaaaaaattgattcaattttatggtaaaggaaacccatgcaattttacctagacagtcttaaatatgtctggttttccatctgttagcatttcagacattttatgttcctcttactcaattgataccaacagaaatatcaacttctggagtctattaaatgtgttgtcacctttctaaagctttttttcattgtgtgtatttcccaagaaagtatcctttgtaaaaacttgcttgttttccttatttctgaaatctgttttaatatttttgtatacatgtaaatatttctgtattttttatatgtcaaagaatatgtctcttgtatgtacatataaaaataaattttgctcaataaaattgtaagcttaaaaaaaaaaaaaaaaaa

SEQ ID NO: 3487 - DNA, 1358 bp, Homo Sapiens
  NM_012191
aaaccaggggcgggttctaagcggcgacgcgcgggtgctgggaggccttagaacgccgtggcgtgccgcaggacgcgacggctgcagaacatccgccgcaccgctgggggccaacgttgtcggaccgaggagtccgaggtggcgactgagtgagatacccagctgtgcggagctaggacgcggaacatcccagaggccagcatcaacatgcaagagctgactctgagccctggcccagccaagctgacccctacactagaccctacacaccggatggagctgatcctgagtaccagcccagctgagctgactctggatcctgcgtgccagccaaagctgcccctggattccacatgccaaccagagatgaccttcaatcctggtccaactgagcttaccctggatcctgaacaccagccagaggagaccccagctcctagcctggctgagttgaccctggagcctgtgcaccgccgacccgagctcctggatgcttgtgctgacctcatcaatgatcagtggccccgcagccgcacctcccgcctgcactccctgggccagtcctcagatgccttccccctctgcctgatgctgctaagcccccaccccacacttgaagcagcacccgttgtggtgggccatgcccgcctgtcacgggtgctgaaccagccccagagcctcttagtggagacagtggtggtggcccgggccctgaggggccgtggctttggccgccgcctcatggagggcctggaggtctttgctcgggcccggggcttccgcaagctgcatctcaccacccatgaccaggtgcacttctatacccacctgggctaccagctgggtgagcctgtgcagggcctggtcttcaccagcagacggctgcctgccaccctgcttaatgccttccccacagccccctctccccggccacccaggaaggccccaaacctgactgcccaagctgccccaaggggtcccaagggacctccattgccaccaccccctcccctacctgagtgcctgaccatctcacccccagttccatcagggcccccttcaaaaagcctgctggagacacaatatcaaaatgtgagggggcgccccatattctggatggaaaaagacatctgaggccatccagggcaaggaactgtctttctggttcaatagactgccccgacagtctacaagcctcagcccactgaccatacctcagcccctagcccctggggggcagctttaacctgggcatgtttcctgggtaccagtggggccaggaggtggctctggctcagagccgtcagtgtggctgaataaaggctctcttgggtaaaaaaaaaaaaaaaaaaaaaaaa

SEQ ID NO: 3488 - DNA, 4999 bp, Homo Sapiens
  NM_012197
ggggacagggcggtttgggaggcccaggcggcggagcctccgggacggcgagcggcgggcggcggaggaggagacggcaggtcgggcattaaaaaatatttaatcattcatgtgttgagactcattcttgagttatggatgacaaggcttctgttggaaaaatcagtgtctcttcagactcagtatctactcttaatagtgaagattttgtcttggtttccaggcaaggagatgagacaccatctacaaataatggaagtgatgatgagaaaacaggactcaagattgtagggaatggaagtgaacagcagctgcaaaaagagctagcagatgtactgatggatcctccaatggacgaccagccaggggaaaaggagcttgtgaaaaggtcacaactggatggtgaaggagatgggcctctttctaatcagctctccgcttcatccaccattaaccctgtgccattagtagggctccaaaaaccagagatgagcctaccagtgaaacctggacaaggagattctgaagcttcaagtcctttcacaccagtggccgatgaggacagcgtagttttcagtaaactgacttacttaggctgtgcctcggtaaatgctcccaggagtgaagtggaagccttaaggatgatgtccatcttaagaagccagtgtcagatttcactagatgttaccctttcagtgccgaatgtgtctgaaggaattgtgagactcttagatcctcagacaaacactgaaatagcaaactaccctatctacaaaatcctcttctgtgtcagagggcatgatggaactcctgagagtgactgttttgctttcactgaaagtcattacaatgcagagctcttcagaatacacgtcttccggtgtgaaatacaagaagctgtaagccggatactttacagttttgccactgccttccgccgttctgccaagcagaccccactttcagccactgctgcaccccagactcctgacagtgacatctttaccttctctgtgtctttagaaataaaagaagatgatggtaaaggttattttagtgcagttcccaaagataaggacagacagtgctttaaactacgccaaggaattgataagaagattgtcatctatgtgcagcaaacaactaataaagaacttgccattgaaaggtgttttggtcttctccttagtccaggaaaagatgtacgaaatagtgacatgcacttattagatttggaatctatgggcaaaagttcagatggaaagtcgtatgttattacggggagctggaatccaaaatccccacattttcaagttgtaaatgaagaaactcctaaagataaagtcctgtttatgaccacagctgtagatttggtaataacagaagtacaggagcctgttcgatttctcctggagacaaaagtccgcgtttgctcacctaatgaaagattattctggcccttcagcaaacgtagtactactgaaaatttctttttgaaactaaaacagataaagcaaagggagagaaagaataatactgacactttatatgaagttgtatgcttggaaagtgaatcagaaagagagaggaggaaaactacagccagtccttcagttcgcctgccacagtctggatcgcaaagttcagtgataccttctcctccagaagatgatgaagaggaagataatgatgaacctctcctgagtggatctggtgatgtatccaaagaatgtgcagaaaaaattcttgaaacatggggagaactgttgtcaaaatggcatctcaacttgaatgtgagaccgaagcagttgtcatccttagtaagaaacggtgtccctgaagctcttcgaggagaagtctggcagctgctagcaggctgtcataacaatgaccacctggtagagaaataccgcattcttatcacaaaggagtctccccaggacagtgctatcacccgggatattaaccgaacattcccagcccatgactactttaaggacacaggaggagatggacaagattccttatataaaatatgcaaggcttattctgtgtatgatgaagagattggttattgccagggccagtcatttcttgctgctgtgctccttctccatatgcctgaagaacaggcattcagtgttctggtcaagatcatgtttgactatgggctcagggaacttttcaagcaaaacttcgaagatttgcattgcaaattttaccagttggagcgcctcatgcaggaatacattcctgacctgtacaaccacttcctggatataagccttgaagcacacatgtatgcctcccagtggtttcttactcttttcactgcaaaattccctctctacatggtcttccatatcatcgacctgcttttatgtgagggaataagtgttatttttaatgtcgcccttggattattaaagacttcgaaagatgacctgctgttgacagactttgaaggtgccttgaagttctttagggttcagcttcctaagagataccgctcagaagaaaatgcaaaaaaactaatggaattagcctgcaacatgaagattagtcagaagaagttgaaaaaatacgagaaagaatatcacaccatgagggaacagcaggcccagcaagaagaccccatcgagcgatttgagcgggagaataggcgtctacaagaagctaacatgaggttggaacaggaaaacgatgacttagcccatgagctggtgaccagcaagattgcactacggaaggacctggataacgctgaggaaaaggcagatgctctgaataaggagctgctgatgaccaaacagaagttgattgatgcagaagaagagaaaagacggctggaagaagagtctgctcagttaaaagaaatgtgccgtcgggaactcgacaaggcagaatctgagattaaaaaaaacagttctatcattggtgactataagcagatttgttctcagttgagtgaaagattggagaagcagcagacagccaataaggtggaaattgagaaaattcggcaaaaagtggatgactgtgagcggtgccgggaatttttcaacaaagaagggcgtgtaaaaggcataagctcaaccaaggaggttttagatgaggacacggatgaagagaaagagacgctcaagaaccagctgagagaaatggagctagaactggcacagaccaaactccagctggtggaggccgagtgtaagatacaggacttggaacaccatttagggcttgccctcaatgaggtgcaggcagccaagaagacgtggtttaaccgaacactgagctccataaagacagcaaccggggttcaagggaaagagacttgctgagagcagctgccgcctcccgacaccttcagaaaacacgacaccttttgttgccttctttggccagatgtgtgattctgtgacttgtcccaggaccagaatgtacctaagtcagatccatagacgcatgttggtaggtcactggaccagagcttgtgaagcaggcaacctctggggtaagactactgatactaacaggcctgctagctcagccgacgctctggacactctagaaatcactcctcagtgtgacctcccaggcctcttccccgtgtacgtcaacacctcacccagcctaaaggctgagtttacatgatcagagttaggggatccttcagtctgttgattttttttctaaaccttttttttttaatatacatatatatatatatatatatatatatatatatatatatatatatatatagtgggggtggggcaagggatcagaaattcaaataattcttttctgcttcaatgccagcagaaggtcccccaggtagacatggagaagcactttgttttaaataggagggtttcatagttgcatctgaagccacctggttctgttaaactgtatggtgcaggttttgggtttggcattattcatgtttctgatcaattctatgcaactctcatagttcctgttactttttagcattagctgccaaatgacttcaaaaggctggggtgggtgacttgactgtgagactggattataacatggacaaatcttattttgcttaatgtgtttgtgtgtgtgtgtgtgtgtgtgtgtgtgtgtgtatgtatatatatatataaatatctttcccaatatgccccgttgacagtgtttaaattccagactaggactgctgatctgcacaatttaattatgtggttattcgagcacttaatttcactcaaggttcattgggctctgctctcctccctgccattacgggagctgtggacagagctccctcacttcaagattcctagtgtttttgcacaacaggttgtccaagtgagaaagactgagttgcgtgtctgtaaatgtctgcgcagggtgcacatgctgcgaggtctccatcctccgggcctgtccctcccagatgggctgggcctttgggccctcctcagagtatgcctgggtacaaacctcactgttcagatgggctgtaagttctcacttcaaagctatggaatggattttagcacctttaaaaaaaaaaaaaactttgacttttaatttatatagtgatatgctgacaggctgacacgcagatggttttgtcctcttttctgcgttcagtgttgaggcggctgcttacaagaggcactggttttgtatataaagacactcgggttgttttgtagctctttttcttattggctgtactaacgcttgctgaggttatctgtaataagggaggtaacaagtggcaaccccctccccaccaaccatcccctttgctgctttctgtgtctttcttgttcagttaccaaaatagctgtaagcctatctaatgctaggtgtgtggacattgtgctaaggtagtttcagtgtgtcaactttatgaattgaaatataaaccagtaaaattgtattactgtttcttttgttggttttattttaacagcatattgattaaatattttggtacaaacaaaca

SEQ ID NO: 3489 - DNA, 3241 bp, Homo Sapiens
  NM_012198
gtgcagggcggggctggcctgcggaagggggcgggttcggaggagtgaactgtgcggttagtgcgcctttcagcctcacctgcagctgcgcctccttgcacctgcgcctgtgctttttctcccagcactgcggacgcgactcgagggtgacgctcgctccgctcgtcccgctcgtcatggcctacccgggatacggaggagggtttggaaattttagcattcaggtgccaggaatgcagatgggacagccagtgccagaaacaggcccagctatactcctcgatggatactctgggccagcatattcagacacttattcctcagctggtgactccgtgtatacttacttcagtgctgttgctggacaggatggtgaagtggatgctgaagaacttcagagatgtttgacacagtctggaattaatggaacttactctcccttcagtttggaaacctgcagaattatgattgccatgttggatagagatcacacaggaaaaatgggatttaatgcattcaaagagctatgggcagctcttaatgcctggaaggaaaacttcatgactgttgatcaagatggaagtggcacagtagaacatcatgagttgcgtcaagccattggtcttatgggttataggttgagtcctcaaacattaactactattgttaaacgttatagcaagaatggcagaattttctttgatgattatgttgcttgctgtgtgaagcttcgagcattgacagatttctttaggaaaagagaccacttgcaacaagggtctgcgaatttcatatatgacgattttttgcagggcactatggcaatttgaatgcttagaattttaaacctgaagagacactgtgaattcttttgtttggaagaagtgaactggactactttaaaacttttaagggttttctatgttcttcctacctgttaaacctcttccctttctgtgtgtttttattttagcagatagttcaaagcaataaaagatttcttttttaatttgaggtattactgcttttggaaaagttattttataaatatgtgcatattgtcataaaatattgtatgattaattgatttaaataatgcttagccttaattttagataatgtaaatttagaggaatgtactttacaagatagattgtataagaagccaaataatgaaagcctagaaaaaactaatttatacttatctgaaggttacaaattagacttttaaattttctttgtagttggtggtgtttgagggttggctagaaatgaaagcctggattttgtgccatgtttgtaatatagtttgttccttgatcaaataatcagagaaaagaaacttaaagatctttgtctgtgaagaagaaaattatctccctagttcaatctgtagtgaaataagactacagaaggcattgttttttccttttttattttttgtattatatatttttcttaaatatgttttattgtcttctctaagcaaaaagttcttaataaacatagtatttctctctgcgtcctatttcattagtgaagacatagttcacctaaaatggcatcctgctctgaatctagactttttagaaatggcatatgtttttgatgatatgtcaacattcaaaattgtcctaattaaattgttgtttaaatgtaatgtcaactctttataaacttaaaaataaacaagtaattaaccactctaattgttcagaaattttacatttgacttatttgacaacattaacattagtggtggctttgccattaaaaacccagtaagtattttgagtgcatctatgtgatgtggtgttttgagcatagtaggcaccacagcaacttttctgcgtggtactaaaactgccgaaaatgcgacgtagaatcaccagatctttagtgtttaatatccctggtataagatgttataattaatgtaatttctttcttggcaaacacctcatgtctgtcttagtgaagatttaataaaccacttatttttcttatgctttaaatgtgtattttctaacctaacagtgagtgacataattttatgactgctgaccaaattaatttatagattttataaaatcccatgtttcttaatggatggaggatagatggcaatatcttgaacaaaatcttttataaacttacagaattttaaatcagccttcacttaaaaaaatcctggaaaggaagtaacgcatagtcacttgacactgataattttatataatttgctgtcaaattcacttggtcagttttataaaaatgtgtgaataggtaatacacataattttgttctctggcttttttatgaacatatatttgataatgtgagaggacattaactgagctgggaaattaaagaaacagaattctaattagaagtgttgtaggaaaaagcaaatgtgaaaacactaagtgtcgttcacatcgaatggtgataatgtcgctcagcaacctgtaatcttaacatccaggttatacagatggtcgttactgaactattctgcggtcgattatgattatctctcttacttggaggctcacagttgaggtaaaacttttaaaatgacaaatggtattattcatgtaagcttctgccaggtgacactctatattagaactctttaacacaattttcatttaaaaatgttcttatgacttttggtcatagaaggtctatgaaggagcttccatggccaaacatatttagaaactctcactttctaaagcttgacaaggtatattagcatctgaaaccccaaggttaataaaatcagtcatgtttaattttatttgacccagttttttccaaactttttgaccacagaacccctttctctagcaaaacctaacattctatgccgatccaacttaattgccaggcaactcttctgcactttacattaaacagacaaacttatgttaacaaaaacattaggcctagagaatattttaccagaatttttatactgaaatacagttcactttttcgatgctttaaaaataactgatatttttatgatgaacatgactgtaatatgaatatagtatagtagtttgcactggttaacttacaccccagttcttttacgatgatgtaaattattgaataatgtacactcttaatgtataagtgcttttatttatacagtaaacatgtttccatgtcattttgagaatttttttaataaacattcaaatagcttgctgtaaaaaaaaaaaaaaaaaa

SEQ ID NO: 3490 - DNA, 7478 bp, Homo Sapiens
  NM_012199
actggcagctggccgggcgctcgcagtgggagctgctgcaggctccgcggcggcggcaacggaggctgcgggggcggcggcgcgagcggccgggcttggtaggggagccgagcccggcccgggatcccgagcagcgagagtgtggggtacctaggcccctcacgctggacttcacagtctccgggccgcctgacctccgcacgggtatatgggatggaagcgggaccctcgggagcagctgcgggcgcttacctgccccccctgcagcaggtgttccaggcacctcgccggcctggcattggcactgtggggaaaccaatcaagctcctggccaattactttgaggtggacatccctaagatcgacgtgtaccactacgaggtggacatcaagccggataagtgtccccgtagagtcaaccgggaagtggtggaatacatggtccagcatttcaagcctcagatctttggtgatcgcaagcctgtgtatgatggaaagaagaacatttacactgtcacagcactgcccattggcaacgaacgggtcgactttgaggtgacaatccctggggaagggaaggatcgaatctttaaggtctccatcaagtggctagccattgtgagctggcgaatgctgcatgaggccctggtcagcggccagatccctgttcccttggagtctgtgcaagccctggatgtggccatgaggcacctggcatccatgaggtacacccctgtgggccgctccttcttctcaccgcctgagggctactaccacccgctggggggtgggcgcgaggtctggttcggctttcaccagtctgtgcgccctgccatgtggaagatgatgctcaacattgatgtctcagccactgccttttataaggcacagccagtgattgagttcatgtgtgaggtgctggacatcaggaacatagatgagcagcccaagcccctcacggactctcagcgcgttcgcttcaccaaggagatcaagggcctgaaggtggaagtcacccactgtggacagatgaagaggaagtaccgcgtgtgtaatgttacccgtcgccctgctagccatcagacattccccttacagctggagagtggacagactgtggagtgcacagtggcacagtatttcaagcagaaatataaccttcagctcaagtatccccatctgccctgcctacaagttggccaggaacaaaagcatacctaccttcccctagaggtctgtaacattgtggctgggcagcgctgtattaaaaagctgaccgacaaccagacctcgaccatgataaaggccacagctagatccgctccagacagacaggaggagatcagtcgcctgatgaagaatgccagctacaacttagatccctacatccaggaatttgggatcaaagtgaaggatgacatgacggaggtgacagggcgagtgctgccggcgcccatcttgcagtacggcggccggaaccgggccattgccacacccaatcagggtgtctgggacatgcgggggaaacagttctacaatgggattgagatcaaagtctgggccatcgcctgcttcgcaccccaaaaacagtgtcgagaagaggtgctcaagaacttcacagaccagctgcggaagatttccaaggatgcggggatgcctatccagggtcaaccttgtttctgcaaatatgcacagggggcagacagcgtggagcctatgttccggcatctcaagaacacctactcagggctgcagctcattattgtcatcctgccagggaagacgccggtgtatgctgaggtgaaacgtgtcggagatacactcttgggaatggctacgcagtgtgtgcaggtgaagaacgtggtcaagacctcacctcagactctgtccaacctctgcctcaagatcaatgtcaaacttggtggcattaacaacatcctagtcccacaccagcgctctgccgtttttcaacagccagtgatattcctgggagcagatgttacacaccccccagcaggggatgggaaaaaaccttctatcacagcagtggtaggcagtatggatgcccaccccagccgatactgtgctactgtgcgggtacagcgaccacggcaagagatcattgaagacttgtcctacatggtgcgtgagctcctcatccaattctacaagtccacccgtttcaagcctacccgcatcatcttctaccgagatggggtgcctgaaggccagctaccccagatactccactatgagctactggccattcgtgatgcctgcatcaaactggaaaaggactaccagcctgggatcacttatattgtggtgcagaaacgccatcacacccgccttttctgtgctgacaagaatgagcgaattgggaagagtggtaacatcccagctgggaccacagtggacaccaacatcacccacccatttgagtttgacttctatctgtgcagccacgcaggcatccagggcaccagccgaccatcccattactatgttctttgggatgacaaccgtttcacagcagatgagctccagatcctgacgtaccagctgtgccacacttacgtacgatgcacacgctctgtctctatcccagcacctgcctactatgcccgcctggtggctttccgggcacgataccacctggtggacaaggagcatgacagtggagaggggagccacatatcggggcagagcaatgggcgggacccccaggccctggccaaagccgtgcaggttcaccaggatactctgcgcaccatgtacttcgcttgaaggcagaacgctgttacctcactggatagaagaaagctttccaagccccaggagctgtgccacccaaatccagaggaagcaaggaggagggaggtggggtagggaggagtgtaggatgccttgtttccttctatagaggtggtgtaagagtggggaacagggccagcaagacagaccaccagccagaaatctctgatatcaacctcatgtcccccacccctcaccccatcttgtcacatctggccctgaccccactggaccaaaaggggcagcactggtgcccaccatacacacaggtgtctcatgtgactcacagtgctaaagactcatgcttgacagcttggtaaggtcaactctgtagccctgcagacaaaagctggttaggtttgggtttgatactttagatgggaaagtgaggggcttgagaaagtgggtgggaggagggaaggattttttaggagccttaatcagaaaaggactagatttgtttaagaagaaaaatgaaaccagacccagatcaatattttaggatactagatgttttaatgggttcagaatccagtttgtaggaagattttttaatggttttggttgctcctcccccagctgccaccccccaccttacccttattcctctctgtccacattttctgccccaccttacttctcctccctgacagacatccagcccctagtaatacttaaggcactatggcacttagctttgaagtgacacgaccctgtcttccttccgcccgctggtgggtaaccagtgccttccctgtaacggtaatgctgcagaactgcaaccttttgtacctttctttggggaatggggtgggggtgggagaggaggtagatggggaagaaataccccagacccaacaaacctccagccagaaagccagctattttgcatttgaaggaattgacttcctcattcattgagctttttaaaagatcacaacctcaagatggttaaaatccattgacatttgcactttcaaacatgacaagtctcggagctgctgagatgacaggcccctggcctttccacttatgcctccttttctccttattcctcctacctcccgccccgcccaggtctggagttactttcatagcatttttcactcttggcttcttttctcccttgatggtcaagtctcttatgtttcaatatttcttaactggggtgtcttataacaaaaaactcttaggtctaaaatgagaaaaaagagagaaaacaaaatgttatttttataccataacttgagtgtattgccaaaatttggaaatccttcccatgcctgatgagtttatatcccagaaacattgagccatcagaatgaactgtgtacctgatttgttctctgacctggctaggtagggagggggtggttatcgccccaagatggggtccaggctccatccttcctctgtgcagataatacctttttcttgctatagcctccctcctctgcactgtcctgcactctttcttgcaagtgcatctttttccttcccctggactgtcctctgaccctttggctcatcctagattgcagtgtgtcctgtggacaggctggggaattttgctgctccctattgcttctgtttacaaaaatgaatttttcctggtttcccactagggcatgtgggtgggtggcatggacttttttttttttttttttttgtcttgagacatggggtttggctgtcttgcaggactggagaaggtggtggttctagcttggtctctgttggccttgaagcaagcatcccccctgccctttttccttgactgttcatttttttcctgccccactgcttgggatggggagttgcaacttcagtgtggaatttcctctttgaggagcctgggcttggatctatcctgatctggtgatgaagccatgattactttagacctagcccaggcttggaggccagctggaggaagaagggtctaaatcctggcctgtagagttagaactaccatttcctccccttagctgcccttgtatgacccggatttgctatgcaaaacaatctatcccaggttctgttctggttggctacattgttcagcaactcacaaaacgtagcacaaacattcattatggagaaagcatcaggactgttgagtaactcctcctttacttttttcctgctggctacagcatggggtgccctataggcacaagcccagctgaagaacagaatggagggctctgggaggaggcagctcactggagagcctacattccttacacaagtgcctaaagagagtgatgctaacactccatctgccctgtccattgccttcatatacagtctacttcgtgttctgtcaccctttggggaggggagttctcctgggacagtgggctctgcatgttctccacttggatacattttggggctaggatcagggcactattcctggagggtccagtcattcaccagcatttgcaaatgtccatagggagcaggtggcagcctctactcccagcaacaagtttgtgttctctccttttctctctttgcctcactctctccagttggttttcagctggggcttgaaatgcatttttagccctttgacgtggcttatgccattcaagaaataaaaagcaagagaatcagctttgggcaatgacaagaaatgagttcttactctgatttttttgtaaaaagataatttttgagacttgaaaaataccccgaccttgagattattcctgtttgaaaggtggtgcatgcagatggagaagtggtgttggcagcaagctttggctcatgtggatttggtttaagtggtgcttcttacccaagcttcaaggaagtgcttgggggacccccagcctcatcctcttagttgggtctcttgttccctttgtaccactgttttgccttccttttcctcttctctctttgcctggcttcctttcccttttcttctattcactctgcttgcttgctggccggcctgcctgcctgcctgcctgcctgcctgcctgtctgcctatgtgatgatgaaatctctgcatggctgcaatgatcccactgttagctggcagggtcaggcttagctccttgactgcagaagaccaagaacctgttccccaagcccagagatgtccacctgggctggactgccctcaagcttatactagagaagagcaactgacctgcccaacttgtgtgaagtcaggagggtttctggcattttccacacctgtccactccttggagctggtttctctcattgctttttctaaatctggttctttttctctttacctggggcctggcttttctgagattgtcttagggttgagctatttgggtatcctgggtttgagtgttaggggatggacataaaggaaaaagagtgatgagaagagaatggagagaatttgaataaaaggtgggaaaggagagcactgttctttgattgtttatccagtccaacctgatccattagggatcgaggtgctacactggcctccagggataagcctggggctactgttgctgggaacttaggcttaacataaagccgaagaaggtacctagaaatttgaaacttccctaaaaagctcctaatgcccacctgctagatagcttctctgtggcctcctatttagctaagcagcagtgtttttggatactttttttttctgtttgtgaataaggccagcactcaagatgggcagccaagggtgcactgactattagctggcccataggatatctgtaaggctggtgggacagttttggacctggaatcatgtgtaactaacaaggttggacgtttcttccccatcagggtagaaaaatcatctcaaactagccaaaaggcagttttggaaactacattgggggacgttatttttatttatatatggggcctaggccaatccaggatggtagctggaataccttccttcttaaaatctgatcatggcagggatatgcagggcactttttactatttggccttctaagcagattgggaaggaggtattttctggttttcgctttcctccgacttaataggacttgccttctccctgggcagggagagaggctgggttggtgctctcccttactctactcatactgacttagagcctctggctgctgtttgggcatccaagaaagggaggggaaggaatgagctaaaaacaaaacagaatgaggtgggaaagggagattttcttctttacagaggaaaataggaaaccctccaagaattgtgcaagtaaagacatttgttgaatgcactgagtcccttggtgtagtagcaataaggaaaaatgaaattactttcctgtgcacacagtccagcctaattggtatgtgatgttgcacttagcagccatgtggtgggcatgtgtgactactctggttttcactttagtttctaaactttttatccctctcaagtccagcatggatggggaaatgtctctggatccccacagctgtgtacttgtttgcatttgtttccctttgagatttgtgtttgtgtcctgctttgagctgtaccttgtccagtccattgtgaaattatcccagcagctgtaatgtacagttccttctgaagcaagcaacatcagcagcagcagcagcagcagcacaattctgtgttttataaagacaacagtggcttctatttctaa

SEQ ID NO: 3491 - DNA, 1235 bp, Homo Sapiens
  NM_012203
gcttctgtactgccaggtccgggtcggcggctgcactgcggatgagaccggtgcgactcatgaaggtgttcgtcacccgcaggatacccgccgagggtagggtcgcgctcgcccgggcggcagactgtgaggtggagcagtgggactcggatgagcccatccctgccaaggagctagagcgaggtgtggcgggggcccacggcctgctctgcctcctctccgaccacgtggacaagaggatcctggatgctgcaggggccaatctcaaagtcatcagcaccatgtctgtgggcatcgaccacttggctttggatgaaatcaagaagcgtgggatccgagttggctacaccccagatgtcctgacagataccaccgccgaactcgcagtctccctgctacttaccacctgccgccggttgccggaggccatcgaggaagtgaagaatggtggctggacctcgtggaagcccctctggctgtgtggctatggactcacgcagagcactgtcggcatcatcgggctggggcgcataggccaggccattgctcggcgtctgaaaccattcggtgtccagagatttctgtacacagggcgccagcccaggcctgaggaagcagcagaattccaggcagagtttgtgtctacccctgagctggctgcccaatctgatttcatcgtcgtggcctgctccttaacacctgcaaccgagggactctgcaacaaggacttcttccagaagatgaaggaaacagctgtgttcatcaacatcagcaggggcgacgtcgtaaaccaggacgacctgtaccaggccttggccagtggtaagattgcagctgctggactggatgtgacgagcccagaaccactgcctacaaaccaccctctcctgaccctgaagaactgtgtgattctgccccacattggcagtgccacccacagaacccgcaacaccatgtccttgttggcagctaacaacttgctggctggcctgagaggggagccgatgcctagtgaactcaagctgtagccaaacagtagagatggagggccgggaagcaaaccgtgccctggtattgtcagacacacccaggcttgatttggatccacaggcagagccaagggaaggtgtgattctctgaggaaagagtgattctgatatatgtacttgtcacattggtgttggacacatttgcgccaaaagtatggtaattctattattaaataattctctgag

SEQ ID NO: 3492 - DNA, 2427 bp, Homo Sapiens
  NM_012207
agttctcgctccgccccccacttcttgctcgttccctcccatccccccaagccagtagctgtgctgcgcagctccctaagcggttgtcaccgctggagacggttgggagaaccgttgtggcgagcgctacacgaggcaaacgacttctcccttctttgaactggaccccgcgagcaccagagtcggcgtaactatcgcctgacaggcatttaaatcaaacggtattgagatggattgggttatgaaacataatggtccaaatgacgctagtgatgggacagtacgacttcgtggactaccatttggttgcagcaaagaggaaatagttcagttctttcaagggttggaaatcgtgccaaatgggataacattgacgatggactaccaggggagaagcacaggggaggccttcgtgcagtttgcttcaaaggagatagcagaaaatgctctggggaaacacaaggaaagaatagggcacaggtatattgagatcttcagaagtagcaggagtgaaatcaaaggattttatgatccaccaagaagattgctgggacagcgaccgggaccatatgatagaccaataggaggaagagggggttattatggagctgggcgtggaagtatgtatgacagaatgcgacgaggaggtgatggatatgatggtggttatggaggttttgatgactatggtggctataataattacggctatgggaatgatggctttgatgacagaatgagagatggaagaggtatgggaggacatggctatggtggagctggtgatgcaagttcaggttttcatggtggtcatttcgtacatatgagagggttgccttttcgtgcaactgaaaatgacattgctaatttcttctcaccactaaatccaatacgagttcatattgatattggagctgatggcagagccacaggagaagcagatgtagagtttgtgacacatgaagatgcagtagctgccatgtctaaagataaaaataacatgcaacatcgatatattgaactcttcttgaattctactcctggaggcggctctggcatgggaggttctggaatgggaggctacggaagagatggaatggataatcagggaggctatggatcagttggaagaatgggaatggggaacaattacagtggaggatatggtactcctgatggtttgggtggttatggccgtggtggtggaggcagtggaggttactatgggcaaggcggcatgagtggaggtggatggcgtgggatgtactgaaagcaaaaacaccaacatacaagtcttgacaacagcatctggtctactagactttcttacagatttaatttcttttgtattttaagaactttataatgactgaaggaatgtgttttcaaaatattatttggtaaagcaacagattgtgatgggaaaatgttttctgtaggtttatttgttgcatactttgacttaaaaataaatttttatattcaaaccactgatgttgatactttttatatactagttactcctaaagatgtgctgccttcataagatttgggttgatgtattttactattagttctacaagaagtagtgtggtgtaattttagaggataatggttcacctctgcgtaaactgcaagtcttaagcagacatctggaatagagcttgacaaataattagtgtaacttttttctttagttcctcctggacaacactgtaaatataaagcctaaagatgaagtggcttcaggagtataaattcagctaattatttctatattattatttttcaaatgtcatttatcaggcatagctctgaaacattgatgatctaagaggtattgatttctgaatattcataattgtgttacctgggtatgagagtgttggaagctgaattctagccctagattttggagtaaaaccccttcagcacttgaccgaaataccaaaaatgtctccaaaaaattgatagttgcaggttatcgcaagatgtcttagagtagggttaaggttctcagtgacacaagaattcagtattaagtacataggtatttactatggagtataattctcacaattgtattttcagttttctgcccaatagagtttaaataactgtataaatgatgactttaaaaaaatgtaagcaacaagtccatgtcatagtcaataaaaacaatcctgcagttgggttttgtatctgatccctgcttggagttttagtttaaagaatctatatgtagcaaggaaaaggtgctttttaattttaatccctttgatcaatatggcttttttccaaattggctaatggatcaaaatgaaacctgttgatgtgaattcagttattgaacttgttacttgtttttgccagaaatgttattaataaatgtcattgtgggagataatagtaaaaaaaaaaaaaaaa

SEQ ID NO: 3493 - DNA, 2508 bp, Homo Sapiens
  NM_012208
atttccggctcctcccggaagtgccgaagctggctactaagggaacttgggaggatcccacctcagccttcgtgactagtgaggtgcgcaaacgcccgagttttccctggtgcgcgggttccgcctttgcagtgccctccacccttcctggtgtctgacccgcctccttcccaggccttttgttcctgtcccggaaagccggcgtcctgccgcgcgatgcccctgctcggacttcttcccaggagggcctgggcttcgctgctcagccagctcctgcgaccgccctgcgcttcgtgcaccggggcggtccgttgccaaagccaggttgcagaggcagtgttaacatcccaactgaaagcacatcaagagaaaccaaattttattatcaagaccccaaagggtaccagggatcttagtcctcagcatatggttgtgagggagaaaattcttgatttggttatcagctgctttaaacgtcatggagcaaaggggatggacaccccagcatttgagctgaaggaaaccctgactgagaagtatggagaggactctgggctcatgtatgatctgaaggatcaaggtggagagctgttgtccctccgctatgaccttactgttccctttgctcgttatctggccatgaataaggtgaagaagatgaaacgttatcatgttggaaaggtgtggcggcgagagagcccaaccatagtccaaggccgttatagggagttctgccagtgtgattttgacattgctggtcagtttgaccctatgatccccgatgcagagtgtttgaagatcatgtgtgaaatcctaagtggattgcagttgggagactttctcattaaggtaaatgaccggcggattgtggatgggatgtttgctgtctgtggtgttcctgaaagcaagttccgtgccatctgctcctccatagataaactagacaagatggcttggaaagatgtgagacatgagatggtggtgaagaaaggcctggctcctgaggtggctgatcgaattggggactatgtccagtgtcatggtggggtatccctagtagagcaaatgtttcaggatcccagactatcccagaacaagcaggccctggagggcctgggagacctaaagctgctatttgaatacctgactttatttggaattgctgataagatctcctttgacctcagcctggctcggggcctagactactatacaggagtgatctatgaagcagtgctgctgcagaccccaactcaggctggggaggagcccctgaatgtgggcagtgtggctgctggtgggcgctatgatgggctggtgggcatgtttgaccccaagggccacaaggtgccatgtgtgggactcagcattggggttgagcgaatcttctacattgtggagcagaggatgaagaccaaaggtgagaaggtgcggactacagagactcaagtgtttgtggccacaccacagaagaactttctccaagaacggttgaagcttattgcagagctttgggattctggaatcaaggcagagatgctatacaagaacaaccccaaactattaacccagctgcactattgtgagagcacaggcattccactggtggtcattattggtgagcaagaactgaaagaaggggtcatcaagatccgttcagtggccagcagagaggaggtggccattaaacgggaaaattttgtggctgaaattcagaagcgactgtctgagtcttgatccttgcctgattcccatctgctgctctttgtagaaaaggtttcctctagaactgaattcctctggaattgagtgatggacttcacaacaactagccaggaagggtgacaagtaccttctgcctcctccattcttcctgggtgcagaactgtagaagaccctgaggactcctgggctagtgtgagcagctattctgcatgggtgcagatggctggatgtgaaagagacatgctctagctgcagaggcaaatttgaagtgccacggaacgttgtcaagaggtagtgagattgttgctgtgagcaaggctctgggagagtcacctcaggctcaggattctgaaccattgagatcagaaaccagatacttagccttctactgtagctacggaaccagattctggtgaatttgtccacaatcagccattggcctgtctggggagtttttggaagacagcaaagaggggcaatggctgctttcagctttgaggacagatgctatcctaagggcatggcagtacccatgttgatttgacatctctctagcccatccattgcttacagtagaagagtggggctgtatgcttgataatcttgaacattgaacttaatagatgacttgacaaggtagagatctgatattttgagattttggagaccatttcctgtgccagaatcactgctctattccataccgtgccatggaggctgttttagaagtggttggataacatgttaaataaaatattaagtgtaaaaaaaaaaaaaaaaaaa

SEQ ID NO: 3494 - DNA, 3734 bp, Homo Sapiens
  NM_012210
ggtgctcaacggcgcgtgcgcagagggaggcaggcgggtgggctgccggcggtggactcgtcggagccgcgggcggtcagcaggaatttgaccctctagggcatgaatactgtgctgttcagttctgagctgtgctagcaatacccttcaaaggaagagcaatggctgcagcagcagcttctcacctgaacctggatgccctccgggaagtgctagaatgccccatctgcatggagtccttcacagaagagcagctgcgtcccaagcttctgcactgtggccataccatctgccgccagtgcctggagaagctattggccagtagcatcaatggtgtccgctgtcccttttgcagcaagattacccgcataaccagcttgacccagctgacagacaatctgacagtgctaaagatcattgatacagctgggctcagcgaggctgtggggctgctcatgtgtcggtcctgtgggcggcgtctgccccggcaattctgccggagctgtggtttggtgttatgtgagccctgccgggaggcagaccatcagcctcctggccactgtacactccctgtcaaagaagcagctgaggagcggcgtcgggactttggagagaagttaactcgtctgcgggaacttatgggggagctgcagcggcggaaggcagccttggaaggtgtctccaaggaccttcaggcaaggtataaagcagttctccaggagtatgggcatgaggagcgcagggtccaggatgagctggctcgctctcggaagttcttcacaggctctttggctgaagttgagaagtccaatagtcaagtggtagaggagcagagttacctgcttaacattgcagaggtgcaggctgtgtctcgctgtgactacttcctggccaagatcaagcaggcagatgtagcactactggaggagacagctgatgaggaggagccagagctcactgccagcttgcctcgggagctcaccctgcaagatgtggagctccttaaggtaggtcatgttggccccctccaaattggacaagctgttaagaagccccggacagttaacgtggaagattcctgggccatggaggccacagcgtctgctgcctctacctctgttacttttagagagatggacatgagcccggaggaagtggttgccagccctagggcctcacctgctaaacagcggggtcctgaggcagcctccaatatccagcagtgcctctttctcaagaagatgggggccaaaggcagcactccaggaatgttcaatcttccagtcagtctctacgtgaccagtcaaggtgaagtactagtcgctgaccgtggtaactatcgtatacaagtctttacccgcaaaggctttttgaaggaaatccgccgcagccccagtggcattgatagctttgtgctaagcttccttggggcagatctacccaacctcactcctctctcagtggcaatgaactgccaggggctgattggtgtgactgacagctatgataactccctcaaggtatataccttggatggccactgcgtggcctgtcacaggagccagctgagcaaaccatggggtatcacagccttgccatctggccagtttgtagtaaccgatgtggaaggtggaaagctttggtgtttcacagttgatcgaggatcaggggtggtcaaatacagctgcctatgtagtgctgtgcggcccaaatttgtcacctgtgatgctgagggcaccgtctacttcacccagggcttaggcctcaatctggagaatcggcagaatgagcaccacctggagggtggcttttccattggctctgtaggccctgatgggcagctgggtcgccagattagccacttcttctcggagaatgaggatttccgctgcattgctggcatgtgtgtggatgctcgtggtgatctcatcgtggctgacagtagtcgcaaggaaattctccattttcctaagggtgggggctatagtgtccttattcgagagggacttacctgtccggtgggcatagccctaactcctaaggggcagctgctggtcttggactgttgggatcattgcatcaagatctacagctaccatctgagaagatattccaccccataggggatgagaaattatcagtttcttctgctcccaagccaacttcccttcccttagttcttggttgttagtggcacatgcagaatagactcagcctatgtcctgattccagctgggtagttctagaacttcagaagctccatcttttaatgtttttatttgttatgtccccctccccgcttcccacctaaatttagagctttaaaagatgcactgcccaaataggacacacgatggtgttagctgaagtttgattagcaattaggcacttccaaggctttagtagagagagccactttagccctttgtgccatgtttgaaatttgcccttgtattaaatccttgattttttcccatttggctttgatgcccttgatccattgtttccttcctactataatgtgcttcatctgtgacactttctcttgaactctgattggattcactgtgcatgcttcagtgggatctgctccacctttcagtgacatttaagacatcatattcccgtaacattatgtctcagtctgatcgtctttaccagtatgaaagtcattcatttagtgctaccaaaggggatacacaagccctttaggaagcagtacctctcgcctggaggatctgtgccatcttggattgagaattgcagatgtgacagaatggattgaccctagttggttggtattgatgacttcagcctggaaattgcttgccttttaaagaagcatatatgggttggaattatgccaaagcataggaagctgggaataagcaaacaaatgctgatatagtcagcaaatttggatagtctctagggctcatcatttttcatactacctctctcttctggcctgtgtctaaggaattgtacaacataggccagggccaacaaagtggagaggtggacacattttcatgttcattactaaaacaaacagcaaaactattggtttgttattctgtgttttcctcaagtcagtacatactatttggtttcaggatttctttccatttctctatcaagcattaaataattgagaactgtttcttcatctctggtgttcatgtcttttaattaaatacggaattttggagatgataagagggataacctgcgctatgccattttgcttccttatctcactgtgttctttcagagtgtagatatctacccaggtcaaaattcagccaaaagcactattatgtaaagataataatccaaatctttctcccaaatacatgtgtacagaatcatcccccaaggtttagagtcaccaataccctattctgagcttctgctgtatgttttatgtttataattacagttcacaaaaaggaagttagtcttgtttttaagatcagaagtgggtgagaggacctgtgatgaggttcctgagggtttggtgtttactaagtaatatatcttactctaggtgcagggctgatggcaagccaaagagcaactgccttactttgatgtaaacaaaatttgctaaactgagctgctcaaaattgtttttatggtagtagtgtttctttggattgtatcataatagctgccaaaggataggtaaagaggtcattaaaatgatgttgaactagaaaaaaaaaaaaaaa

SEQ ID NO: 3495 - DNA, 1249 bp, Homo Sapiens
  NM_012212
gtcccgacgcctcccgcccccgcagttccttggagagcttggagccgcgcgccggagggaataggaaagcttggttacaacccgggacacccggagcttcaggatggttcgtactaagacatggaccctgaagaagcactttgttggctatcctactaatagtgactttgagttgaagacagctgagctcccacccttaaaaaatggagaggtcctgcttgaagctttgttcctcaccgtggatccctacatgagagtggcagccaaaagattgaaggaaggtgatacaatgatggggcagcaagtggccaaagttgtggaaagtaaaaatgtagccctaccaaaaggaactattgtactggcttctccaggctggacaacgcactccatttctgatgggaaagatctggaaaagctgctgacagagtggccagacacaataccactgtctttggctctggggacagttggcatgccaggcctgactgcctactttggcctacttgaaatctgtggtgtgaagggtggagaaacagtgatggttaatgcagcagctggagctgtgggctcagtcgtggggcagattgcaaagctcaagggctgcaaagttgttggagcagtagggtctgatgaaaaggttgcctaccttcaaaagcttggatttgatgtcgtctttaactacaagacggtagagtctttggaagaaaccttgaagaaagcgtctcctgatggttatgattgttattttgataatgtaggtggagagttttcaaacactgttatcggccagatgaagaaatttggaaggattgccatatgtggagccatctctacatataacagaaccggcccacttcccccaggcccacccccagagattgttatctatcaggagcttcgcatggaagcttttgtcgtctaccgctggcaaggagatgcccgccaaaaagctctgaaggacttgctgaaatgggtcttagagggtaaaatccagtacaaggaatatatcattgaaggatttgaaaacatgccagctgcatttatgggaatgctgaaaggagataatttggggaagacaatagtgaaagcatgaaaaagaggacacatggaatctggaggccatttagatgattagttaatttgtttttcaccatttagcaaaaatgtatactaccttaaatgtcttaagaaatagtactcataatgagtttgagctacttaataaaatacatttaagtggtatgtaaaa

SEQ ID NO: 3496 - DNA, 2211 bp, Homo Sapiens
  NM_012213
ggcagctgttgtggggcaccatgcgaggcttcgggccaggcttgacggccaggcgtctcctcccgctgcggttgcccccgcggccgcccgggccccggctggcgagcgggcaggcggccggcgccctggagcgggccatggacgagctgctgcgccgcgcggtgccgccgacgccggcctacgagctgcgcgagaagacaccggcgcccgccgagggtcagtgcgcggacttcgtgagcttctacggtgggctggccgagacggcccagcgggccgaactgctgggccgcctggcgcggggcttcggcgtggaccacggccaggtggcggagcagagcgccggcgtgctccatctgcgccagcagcagcgggaggcggcggtgctgctgcaggccgaggaccggctgcgctacgcgctggtgccgcgctatcgcggcctcttccaccacatcagcaagctggacggcggcgtgcgcttcctggtgcagctgcgggccgacctgctggaggcgcaggccctcaagctggtggaggggccggacgtccgggaaatgaatggggtgctgaaaggaatgctctcagaatggttttcctccgggttcctgaacctagaacgggttacctggcattcaccgtgtgaagtgcttcagaaaatcagtgaggctgaggctgtgcatcctgtaaaaaactggatggacatgaagcgccgcgttgggccctacagaaggtgttacttcttttctcactgttcgacccctggggagcccctggtcgttttgcacgtggcactgactggtgacatctccagcaacatccaggcaatcgtgaaggaacatcctccatcagaaacagaagagaagaacaaaatcactgctgcgatcttttattccatcagcttgacccagcagggactccaaggggtggagctgggaacattcctcataaagcgagtcgtcaaggagttgcagagagagtttcctcaccttggggtgttttcaagtctgtcacctatacctggtttcaccaaatggcttctggggcttctgaactcgcaaacgaaggagcatgggaggaatgaactctttacagattcggaatgtaaggaaatctcggagatcacaggtggccccattaacgagaccctcaagctcctcctcagcagcagcgagtgggtgcagtcggagaagctggtgcgggcgctgcagactccgctgatgaggctgtgcgcctggtacctgtatggagagaagcaccgcggctacgcgctgaaccccgtggccaacttccacctgcagaacggggcggtgctgtggcgcatcaactggatggcggatgtgagcctcagaggcatcaccggctcctgcggcctgatggccaactaccgctacttcctggaggagacgggccccaacagcacctcctacctcggctccaagatcatcaaagcctctgagcaggtcctcagcctagtggcccagtttcaaaagaacagcaagctctgacagtaaacctctcctaaagcacagggccccggctaagaaaacgatcattttcaggaggggccgggagttatgtatctgaagcagctttccaagcaaagccaaagttgactgtgttcttgtcccgcagccggtccacactgtgaggccaggcctcaacttccctcaccctgggcgtgacatgcacccagtgcaagacggttgtgggtgcgggtgcacacaaatgagtgggttgctgtgctgtctccggaagattctgtcgttgcccttggcctggctccctgcccggggctggtgctgtggtacctacatcttcaggaagctgtgcagcctctgccattgccatcccagggggatctggcatcctcctaaggaccggggcgcgtggcccagataagaataggtgttcctttgtgctcataaaacagaatgcggcgatggttgctttagccgtttctcaccatgcaatgcagagggacaaagggctgtgctacacttcccagttacattctgaagctcataaatgtatgagaaggtttgtgattttgcacaaggtgtgtgtagtaagttaaattgttgaacacaaaaatgttgctgcttgaggcataagttggataataggctttaaatgatcagggattcaggttcataatgaacttcacagtaaagaacacgtttgttctgtaaagcattgaaaaaaaaaaaaaaaaaa

SEQ ID NO: 3497 - DNA, 8382 bp, Homo Sapiens
  NM_012214
cgcagcggcggcggcagcggcggcggcggctacagcagctccgccggcagccgcgggagcacggcgacgccagcggcgggaagggaaaaggccgaggcatcagcgtgtgaagaccgcaaagacgatcccgagtacagttgtgaacagcattgctgctaggctcctcctgcagatcatctgaaatgaacctctcttattgatttttattggcctagagccaggagtactgcattcagttgactttcagggtaaaaagaaaacagtcctggttgttgtcatcataaacatatggaccagtgtgatggtgaaatgagatgaggctccgcaatggaactgtagccactgctttagcatttatcacttccttccttactttgtcttggtatactacatggcaaaatgggaaagaaaaactgattgcttatcaacgagaattccttgctttgaaagaacgtcttcgaatagctgaacacagaatctcacagcgctcttctgaattaaatacgattgtgcaacagttcaagcgtgtaggagcagaaacaaatggaagtaaggatgcgttgaataagttttcagataataccctaaagctgttaaaggagttaacaagcaaaaaatctcttcaagtgccaagtatttattatcatttgcctcatttattgaaaaatgaaggaagtcttcaacctgctgtacagattggcaacggaagaacaggagtttcaatagtcatgggcattcccacagtgaagagagaagttaaatcttacctcatagaaactcttcattcccttattgataacctgtatcctgaagagaagttggactgtgttatagtagtcttcataggagagacagatattgattatgtacatggtgttgtagccaacctggagaaagaattttctaaagaaatcagttctggcttggtggaagtcatatcaccccctgaaagctattatcctgacttgacaaacctaaaggagacatttggagactccaaagaaagagtaagatggagaacaaagcaaaacctagattactgttttctaatgatgtatgctcaagaaaagggcatatattacattcagcttgaagatgatattattgtcaaacaaaattattttaataccataaaaaattttgcacttcaactttcttctgaggaatggatgattctagagttttcccagctgggcttcattggtaaaatgtttcaagcgccggatcttactctgattgtagaattcatattcatgttttacaaggagaaacccattgattggctcctggaccatattctctgggtgaaagtctgcaaccctgaaaaagatgcaaaacattgtgatagacagaaagcaaatctgcgaattcgcttcagaccttcccttttccaacatgttggtctgcactcatcactatcaggaaaaatccaaaaactcacggataaagattatatgaaaccattacttcttaaaatccatgtaaacccacctgcggaggtatctacttccttgaaggtctaccaagggcatacgctggagaaaacttacatgggagaggatttcttctgggctatcacaccgatagctggagactacatcttgtttaaatttgataaaccagtcaatgtagaaagttatttgttccatagcggcaaccaagaacatcctggagatattctgctaaacacaactgtggaagttttgccttttaagagtgaaggtttggaaataagcaaagaaaccaaagacaaacgattagaagatggctatttcagaataggaaaatttgagaatggtgttgcagaaggaatggtggatccaagtctcaatcccatttcagcctttcgactttcagttattcagaattctgctgtttgggccattcttaatgagattcatattaaaaaagccaccaactgatcatctgagaaaccaacacattttttcctgtgaatttgttaattaaagatagttaagcatgtatcttttttttatttctacttgaacactacctcttgtgaagtctactgtagataagacgattgtcatttccacttggaaagtgaatctcccataataattgtatttgtttgaaactaagctgtcctcagattttaacttgactcaaacatttttcaattatgacagcctgttaatatgacttgtactattttggtattatactaatacataagagttgtacatattgttacattctttaaatttgagaaaaactaatgttacatacattttatgaagggggtacttttgaggttcacttattttactattatagaccctcttttatagattatcagggattatatatataaatatataaatatacataaaaatgttatggaattaatttattagaaacacttaagaagtacatatttttgtgcagtagatttttgaatcgatactttttttgaaaaccagtttccttgcttttttaagttctttctatatttttctttggaaatgcaaacattacaaaccaatgccatttttcaaatgcactgccatttaagattgattatagatggatttcttaattgaagtacttttataatcacagtgactgaacaaaatattttcaaagacatttgtcattccttaaagccaagattttaaagactaatgtccttcctgagggttactttactatactgtgtatggtgtatagccacagaaagtcagtctgataaattttcaatgtgtaagtgtgatgcattcaacccagattattgtagacttaacttattatatttcctctgatatgtaaaatgacaaactcttctttcctttttaatctttgtctttaatccatgaattaggtgcattatctgctgttgattcttttatatctgcactcattttatgacgtcagacaaaatgttttctaggtgttgctattgtatgagtcataattggtataattttaaagaaaattgtaatattgttttttggtgaaatatattattagtagtatattttccaaaatgattttattgtagtatgaactgataagtgagtcccgtgtccaagagactgtatttattactcttaaacacgctattccaaatgatattactactataaacaaagaatattaccggtctcagcaatcagtgatctttataaaagtacttttaaaaaatgatgaattatcaccaggcgctgtggctcacgcctgtaatcccagcactttgggaggccgaggcgggcggatcacgaggtcaggagatcaagaccatcctggctaacacggtgaaaccctgtctctactaaaaatacaaaaaattagccaggcgtggtggcaggtgcctgtaatcccagctacttgggaggctgaggcaggagaatggcgtgaacccaggaggcagagctggcagtgagctgagatcgcaccactgcactccagcctgggcgacacagctagactccgtctcaaaaaaaaaaaaagatgaagtatcaacatcagttcccagccagtctgcttggacacactggggtgccacaagtgggttgcaggttggttgcagacgggcagagatggattctgctgagctttcagagtgaccactggctggggcctagcgctggggcaaggttccagctggctgcctctagcctggaggagcttcatctagttacccaatgtgctgaaccaacagcatgaaatagcatcatttcctgtgctgtgttacaaagtgcaaacgtttggaaacactgatacagtacaattatttccatcactccatgttgttataatttttagttacttttcttgattgaaaagtcaatcacattgccaaaaatgatttttatgtcagttaaaggccagttgaaatttttttattaggatgttttaaatttacttttcactttcttgaatttttttcttctcaaatttccttggcccagtgcccatgagcaaatttcattcaaaaacaggaataaccttttgtcataaaattttggcaccagcttggtatactaaattactgcaaagataactgagtaccagaagtaaaaatctctgcaggtgggcttaggagtactcttgggtccctggttcctcagttgccaactctggtttcatgaagaaagaccatgctctgaaaatctagggaggagaaagttattgcagcacctggtgtgatttgttacaacttctttaaagacagcctgcctggctagctttttcctgttttcatgcagtttgccctcccagcattggtccacctgttgttcccaagaaactcattcttgttcccaagactccttttagccaaatctttcctatcattccaggacttttttgtgcttctctccccatgaatctacccgtgcctagggtgtgtgccaggcacgtggcaggtggccagtcagcatctggatgtgagaccaattattccagcctgccctcctctttctctttttatcattttgtattatttttgagacagggtctcgctttgttgcccaggctggagtgcagtggtgctctcatagctcactgcagcctcgatctctggcctcaagcaatcctcctgcctcagcctcccaaagtgctgggattataggtgtgtgccaccatgtccagccccctttctctctcttaactccctctccctgctgtcgttgccatactcttgcatacacaatcggttgtctagtttttgattgtttgtgtgtatggtgtgtgctgtctctctgaccagatttcaggttcctgaggcgagcctgcagctcatactgctcatctgtcctctcctatggtgggtgctcagggcctctcactgttagttactccctcctttctgcccagttctgcactcaactagtagaagcagccatcctttccccaagcaggaaattgtagtggtcgcccttaagagcagtgtgagggcagaagattaagggaggggaagagtccctggaactggaagaaggtaaatactttgccttgagagggcgccgaatcattttaccaaaatagtaaatggaaaaagtgtcaaaggttgggactagttttaaaaacacatatagccagtagacacatgggggctgtttaaataaaaacatttttttacccggttctgccatcacacacactagtgacattccaagtactcagtggccatgtggagctagtggccaccacacttgacaccacggatgcagaacttttccatcactgcagaaagctctgttgaacagtactgtgtccagagtgctaattatgaacagcttagaaaccacaattaatacattctcatgaggttaaaagcagacatgggaatagaacataatgcaaatgatgatgaatattttgggtgagaagagaaagctgaggacccatttctaggattctaagatgtaagatttcttaagttctttatcttagtctcatgcattctccacatcacgcgctgtaccatactgtgtagtcagaacagacagtgtgattgaaaagctttggaaaaagttaacacaaaggattatttagcacataggctgtagatacgtatgtgtgtatttgttcaacaattggagatggttgaatacccttgaacaaagtgtgtatcttctcaaatcagtggttgcactagtcaataattagaaggtgttgttatttttaaaactataagcaaaattatgaaggcctttaaaaaatctatcataataatgaaaaagaggttgtctcccaacagtgctgtccctcaaagaaaagactggttatgtggaaacagcacgtttggagagattattctagtgaataacagtgtatatttgtggtaggcaaatttctaagaatgacccctactgacacccccaccaatgaccttgtataatatcctcccactttgagcatgggtggaacctgtttgatccatgattatatcatgttatgtagcaaaaggaagactgtctgggggtggctaatcaaatcttgtgactcctttaaaagcagagagttttctcgggctggtggcagaagtcaagagacaaagcagaaggacctcaggcaccattgctgttttaaggtagagggggctgcatgagaaggaatgcacatggctttgaggagctgagagaggccttggctaacagcaaaggagctgggaactgcagtcctacagccacgggaactgaattcagcccataagctcattcataggcttggaaaggcattcatctccagtctccagataagacccagcctggccaacactttgaatccagccttgtgagaccctaagccgagaactcacttaagcctgcttggacttctgacctacagaactatgagataataaatcagtggtgttttaagctgctaaatttgtggcaatttgttatgtaggaataggaaatgaatacagtattttaaaagaggtaaagaggaaatcttcatacttgattccctgtagtatgctggatatttcttggtaaatgcatgaataaagtctttagtagcaagtcatgtacctggaccttgttggggatgttctcgccagagatctcaattagtcttcattggacgtttgttggcaaagttgcagcatcttactgagtagcgtttggtaaaggaactgctagaatgagactataggaataggactgaaacagtgtgtaagggatcttttttatttctagaagaggtgttactttatactgatttagactgctctgagcctgtcagaagtaaattcaagaatgattaacagtggtattttagatacattaagagcaaaaataacctttgccttgtagagatcagataatctgtgtatcgagggatttaattttttttaaccaaaacttagtttctctttttatcatctagcacagatcaaatcctgtatgggccagccaaatgtttgtagtttgagaatgttttgcaaatacctctctgcttccaagccattaatagctaatgaagttttattttggtttgtccattaatttttctgcttatttttactgtattgccatgtccttgatacgagacaagtagaactaaaagagagaaaatgagaggttaagactgtcagaagatgagaaatgtgagtcataaccataccttagtgttttaagggaactttatccagtccaatccctttatagaaaaggaacttttccaagttatgttgcagtatttatagtgtgtaaaattttgtttgactttggtagttgtgcattttaaattatgaatcttatatgctacgataactagtatgcttactttctttaatgcatgtgatcatacaatgctaaaaaggtattttttaaagacccaaccaaactgaggattttgttatacatatctgtatcaacacctatatataaactcttcttcttacctgaaacactccttcacccggtttgggcactaactagatcattttcaaaggaacaaacaggaaggagcaagctggcactccagggtgcatctgagctgagaatttagaagacctcattcaagaaagtaaactgagcattgatgggaaagcactttgcgcgaagtaacattcccactgttaatgttgcagtcaaaattgtggaaaaaaaaaagtggtgctaaaattgttctgaaatgaagattgtttgttgtggggaatattttaatactcttggactttagggaggctattttatgtgtcacttgctcctagttgtttcattgtattagtaattagcaaactgtcctggaaccaagggtttggtacttttgcctgattagcattccattatttatttgaaatgctcagtgtttgctcaaatttggtgaaaatatcttttgaagacatattctctgagccttaaaaatggctgctatcgacagtactgtaagatgcactgccagtagatttgatacttttcatttcagtgtaggcagtaatgttttctaagaaagatttagaaatcagcaaagtgtaacaattgtgtttcatttatggaatggaaaaactgaagtgtcccattcagaacactttggaaaggttgtctgcattaggggatgtttctggaagcatcccttagagaagctgcctgaggaatctccttgccaggttgtaccagatttttttttttcttaaatgtattgtatatattttccttaaaatgtcttcattggctgaatgattcctatccgtagtaatattttaggtacttgttggatttttaaaggaagattatttattttcagatttgctgctataattgaaaacctagtaactggtcctgttgattgtgccttcatcactgtttctctgtgccacgaccgttcatgtgtatttgaaataaagaagtttaaaaagccatgttgaattcaagattccttctaataaaaataggtgaaacttaa

SEQ ID NO: 3498 - DNA, 6123 bp, Homo Sapiens
  NM_012218
aaagggggcggggcttcagccggtcacgtgttcccgcacctccccggcgcgcgcctgcccgcccgcccgctcgcccccggtccggactcctcctcctcctcttctcgccattgcagttggacccagcagcccggcgcgcaccgcgtggcttttgggggcagaccccggcgggctgtggcaggagggcggcggcggcggctgcggtcgaagaaggggacgccgacaagagttgaagtattgataacaccaaggaactctatcacaatttgaaaagataagcaaaagtttgatttccagacactacagaagaagtaaaaatgcgtccaatgcgaatttttgtgaatgatgaccgccatgtgatggcaaagcattcttccgtttatccaacacaagaggagctggaggcagtccagaacatggtgtcccacacggagcgggcgctcaaagctgtgtccgactggatagacgagcaggaaaagggtagcagcgagcaggcagagtccgataacatggatgtgcccccagaggacgacagtaaagaaggggctggggaacagaagacggagcacatgaccagaaccctgcggggagtgatgcgggtgggcctggtggcaaagggcctcctactcaagggggacttggatctggagctggtgctgctgtgtaaggagaagcccacaaccgccctcctggacaaggtggccgacaacctggccatccagcttgctgctgtaacagaagacaagtacgaaatactgcaatctgtcgacgatgctgcgattgtgataaaaaacacaaaagagcctccattgtccctgaccatccacctgacatcccctgttgtcagagaagaaatggagaaagtattagctggagaaacgctatcagtcaacgaccccccggacgttctggacaggcagaaatgccttgctgccttggcgtccctccgacacgccaagtggttccaggccagagccaacgggctgaagtcttgtgtcattgtgatccgggtcttgagggacctgtgcactcgcgtgcccacctggggtcccctccgaggctggcctctcgagctcctgtgtgagaaatccattggcacggccaacagaccgatgggtgctggcgaggccctgcggagagtgctggagtgcctggcgtcgggcatcgtgatgccagatggttctggcatttatgacccttgtgaaaaagaagccactgatgctattgggcatctagacagacagcaacgggaagatatcacacagagtgcgcagcacgcactgcggctcgctgccttcggccagctccataaagtcctaggcatggaccctctgccttccaagatgcccaagaaaccaaagaatgaaaacccagtggactacaccgttcagatcccaccaagcaccacctatgccattacgcccatgaaacgcccaatggaggaggacggggaggagaagtcgcccagcaaaaagaagaagaagattcagaagaaagaggagaaggcagagcccccccaggctatgaatgccctgatgcggttgaaccagctgaagccagggctgcagtacaagctggtgtcccagactgggcccgtccatgcccccatctttaccatgtctgtggaggttgatggcaattcattcgaggcctctgggccctccaaaaagacggccaagctgcacgtggccgttaaggtgttacaggacatgggcttgccgacgggtgctgaaggcagggactcgagcaagggggaggactcggctgaggagaccgaggcgaagccagcagtggtggcccctgccccagtggtagaagctgtctccacccctagtgcggcctttccctcagatgccactgccgagcaggggccgatcctgacaaagcacggcaagaacccagtcatggagctgaacgagaagaggcgtgggctcaagtacgagctcatctccgagaccgggggcagccacgacaagcgcttcgtcatggaggtcgaagtggatggacagaagttccaaggtgctggttccaacaaaaaggtggcgaaggcctacgctgctcttgctgccctagaaaagcttttccctgacacccctctcgcccttgatgccaacaaaaagaagagagccccagtacccgtcagagggggaccgaaatttgctgctaagccacataaccctggcttcggcatgggaggccccatgcacaacgaagtgcccccaccccccaaccttcgagggcggggaagaggcgggagcatccggggacgagggcgcgggcgaggatttggtggcgccaaccatggaggctacatgaatgccggtgctgggtatggaagctatgggtacggaggcaactcggcgacagcaggctacagtcagttctacagcaacggagggcattctgggaatgccagtggcggtggcggcgggggcggtggtggctcctccggctatggctcctactaccaaggtgacaactacaactcaccggtgcccccaaaacacgctgggaagaagcagccgcacgggggccagcagaagccctcctacggctcgggctaccagtcccaccagggccagcagcagtcctacaaccagagcccctacagcaactatggccctccacagggcaagcagaaaggctataaccatggacaaggcagctactcctactcgaactcctacaactctcccgggggcgggggcggatccgactacaactacgagagcaaattcaactacagtggtagtggaggccgaagcggcgggaacagctacggctcaggcggggcatcctacaacccagggtcacacgggggctacggcggaggttctgggggcggctcctcataccaaggcaaacaaggaggctactcacagtcgaactacaactccccggggtccggccagaactacagtggccctcccagctcctaccagtcctcacaaggcggctatggcagaaacgcagaccacagcatgaactaccagtacagataagcccccgcggggcggagatttctaccttctgcacttactccccatcagaagatcgagttttatgcatcacagttaacatgtcagctggccctccaggcccccgcccccatcccgtccacgttgctgtgtcgtgaggtgcagcgggtcaccctgtggcccgtcctgtgacccatatttagccgtgtttgggactccgtgtcttcaatggtttgttagttgccattacaactttgtctgggtagagtttttgagtttttgcagttcagtatccctctgtctattcacacttcgtgttagtggtaactcagtttgtctttaaatagttacagaagggatacgtcatttgttaatgcttttgtgaagtgagttaaacgagctttctgtattttaatgctttagtgtttcagttttataagtgaagattttattttaaaaaccagtgggaaagagtggggggtttctttttatgtctgggtcattcaggcagtacatctgaattaagctgaatgtagacaaataaagaaaaacaaaactgcgcccgtcttaggcctgggtgtctgacccaccagcagtgcaatgggcaggtttccccactctattcctgctcttgggaaagcagcgtgggccatcaggatggtccctggtccttagagagggtccagttcaggcttctagacattttactcatgctcagcgaaggctggttcctggtcccctgggctgtgtagacccggtgtcccaccaggctccaggctcccaccatctacagaggggcttacagcgcccattctggtcttggggaacccatcacaaaataggctttttctgctccccgattctggtgtagttctaagtacacagtgatgtcctctgtaggggcgtgcctgtggtggaacataacgcagttacaaaagaaagggcaggtgaggcctgggtaaccccagccatggaccgtcagtggctggagggagcttcgtgtctgtgctggagctgcagcctgctcgccatctggaggctcagtggagtggggagttggggttctcataccagcagatttccctagagcgtgattctcccatctgaggcaatcttgcctcccaggggaaattttgcaatgtttggaggatgttgtcacagctagtagcgggtgctctgggatctggtggatagatgccaaggatgctgtcaagcatactgtactgcccagaacagtggcccatagcagggacctgccctatcaaaatatcaggtgtatggaggtggagtcccaacgctagagcagcccttctcagctccaccctgcccggggagggaggaggagctctggtttcagagcagtgccgggattgcctttccccaggatctgtgtcggccatccaggaagaactgtactggccaagcctgggaccacacgtctgcagagatcctgctctgctggcctgagccccaggccttggcctcctgtgcttgggtaaccatggccactgggaaaagcaaggaccgtgtttgactttcttggagaggtgaaagaggtgaaagaacaagttgtgtgctagaaaacttttgaggaattcttatttgtgttagagcagaggaggtcccagataccaagtggcgcctcccaggaaaggctgggagaagaggtggcctggagtaccccgagatcccagcagcgcacacagtggagggatgaggatggatgggtcctaacccctgattttgatgggatgtgttcatgtcctatctcctctcctggacacattaaggggttgggacaagaagagactcctgtgagatcagcagacctcgtgtttaaggagagaatgcctgcctgcaacactcatggagagggacacttcctggccccacctgctaaatacctccaaactctgggcaggcgcctgcattctcaacacaggacttcccttaacagtttccggatcagtgaccaccaccacgttcaggtttctgaatgcagacccaccacgagggatggattccacccgcccgccctgctgcagatacatgcggcacagcaggcacgtgcctggagagaacagctcctgagcacagcacccttggagccctcaccccgctcacgatcctcaccagtgctgatgatgccgtcatgctgctggcctgagacagtatcccagctacaacaggacgacaccgggttcaggaatatgtggctatcaccttgagcactgacagtggccttccaggctagttgccttccaaacgcaggtagccgacctgcaggagggcctacaaacgggcccagcaagagctgggcaacagctggcttgtgaaatgagacaccttgaccaatatgctttgggtggacggtctcctacatgttcagtggaggccaccaggagcatccatgagcggggaaggggtccacacccttacatggcaagttgatacgatggggtgcttggtggatgggccatggaggtccgtgagctggaactgggcacacgccatcccagagggctcaggatgccccaggaaggaaagaagggcaacagactacacgattggacgtgtgtggttgactgggatgaagttggagggaggggcagggccttgcaggggattggtactgatcccagggaggaagtgttggggcttcatgaactaggatgaaaggaggcccctgagccatgacaaggggcacatccaggatttccgccaccctgaatttagtagagctagtaggccctggtcgtcactctgggcagggatgccgtcagccttgagggtcgccacccacctgtgtgttgccctctgtcctggcagggaaacatacaccccttgtctcaccaccaaccttgcttgtgtagtcagcagggctggccctgccccaaggactcactgcatgtacccggacccctaggcctggcctttgcagcatagttgggagcttctggattccatctgcacctgtgagccccatgctggctgtgcactgcgcgggcctgagactgctggatacaatgttgggcaacaactcagccagcctgatggcagcctcagaggcttactctaacccatcccagaataaatggagacttcatgtgttcattgtttcattcactcaaaaaaaaaaaaaaaa

SEQ ID NO: 3499 - DNA, 1936 bp, Homo Sapiens
  NM_012222
cagccggagccgcggtgtacaacggaacttgtagtctcctcgtggctagttcaggcggaaggagcagtcctctgaagcttgaggagcctctagaactatgagcccgaggccttcccctctcccagagcgcagaggctttgaaggctacctctgggaagccgctcaccgtcggaagctgcgggagctgaaactgcgccatcgtcactgtcggcggccatgacaccgctcgtctcccgcctgagtcgtctgtgggccatcatgaggaagccacgagcagccgtgggaagtggtcacaggaagcaggcagccagccaggaagggaggcagaagcatgctaagaacaacagtcaggccaagccttctgcctgtgatgggatgattgctgagtgtcctggggccccagcaggcctggccaggcagccggaagaggtggtattgcaggcctctgtctcctcataccatctattcagagacgtagctgaagtcacagccttccgagggagcctgctaagctggtacgaccaagagaaacgggacctaccatggagaagacgggcagaagatgagatggacctggacaggcgggcatatgctgtgtgggtctcagaggtcatgctgcagcagacccaggttgccactgtgatcaactactataccggatggatgcagaagtggcctacactgcaggacctggccagtgcttccctggaggaggtgaatcaactctgggctggcctgggctactattctcgtggccggcggctgcaggagggagctcggaaggtggtagaggagctagggggccacatgccacgtacagcagagaccctgcagcagctcctgcctggcgtggggcgctacacagctggggccattgcctctatcgcctttggccaggcaaccggtgtggtggatggcaacgtagcacgggtgctgtgccgtgtccgagccattggtgctgatcccagcagcacccttgtttcccagcagctctggggtctagcccagcagctggtggacccagcccggccaggagatttcaaccaagcagccatggagctaggggccacagtgtgtaccccacagcgcccactgtgcagccagtgccctgtggagagcctgtgccgggcacgccagagagtggagcaggaacagctcttagcctcagggagcctgtcgggcagtcctgacgtggaggagtgtgctcccaacactggacagtgccacctgtgcctgcctccctcggagccctgggaccagaccctgggagtggtcaacttccccagaaaggccagccgcaagccccccagggaggagagctctgccacctgtgttctggaacagcctggggcccttggggcccaaattctgctggtgcagaggcccaactcaggtctgctggcaggactgtgggagttcccgtccgtgacctgggagccctcagagcagcttcagcgcaaggccctgctgcaggaactacagcgttgggctgggcccctcccagccacgcacctccggcaccttggggaggttgtccacaccttctctcacatcaagctgacatatcaagtatatgggctggccttggaagggcagaccccagtgaccaccgtaccaccaggtgctcgctggctgacgcaggaggaatttcacaccgcagctgtttccaccgccatgaaaaaggttttccgtgtgtatcagggccaacagccagggacctgtatgggttccaaaaggtcccaggtgtcctctccgtgcagtcggaaaaagccccgcatgggccagcaagtcctggataatttctttcggtctcacatctccactgatgcacacagcctcaacagtgcagcccagtgacacctctgaaagcccccattccctgagaatcctgttgttagtaaagtgcttatttttgtagttaaaaaaaaaaaaaaaa

SEQ ID NO: 3500 - DNA, 1399 bp, Homo Sapiens
  NM_012225
attggttggaaggcccttcgctctagctgggaggctgacggcccgcgggcgtaagcggactgcagccgcgagctcctggaggcggcgggatggaggcggcggccgagcctggaaacctggccggcgtcaggcacatcatcctggtcctctcaggaaaggggggcgttgggaaaagcaccatctccacggagctggccctggcactgcgccatgcaggcaagaaggtgggaatcctggatgtggacctgtgtggccccagtatcccccgcatgctcggggcgcagggcagggctgtgcaccagtgcgaccgcggctgggcacccgtcttcctggaccgggagcagagcatctcgctcatgtctgtgggcttcctgctggagaagccggacgaggccgtggtgtggagaggccccaagaaaaacgcgctgataaagcagtttgtgtccgacgtggcctggggggagctggactacctggtggtggacacgcccccggggacctccgatgagcacatggccaccatagaagccctgcgtccctaccagcccctgggggccctcgtggtcaccacgccccaggcggtgtccgtgggggacgtgaggcgcgagctgaccttctgtaggaagacgggcttgcgggtgatgggaatcgtggagaatatgagcggcttcacctgcccacactgcacggagtgcaccagcgtcttctccaggggcggcggagaggagctggcccagctcgccggggtgcccttcttaggctccgtgcccctggaccctgcgctcatgaggaccctggaggagggccacgacttcatccaggagttccctgggagccccgccttcgctgcactcacctccatagcccagaagattctggacgcgacgcccgcgtgcctcccctgactaaggccaccttgcagccgctttccagggccaccaagggctctgctccagcctctcagagaaacagaggcctgggctcggttcccgggccctgcaggggcaggcccaggcagcgtcagccggagagcttctccccgaccagcccagccccaggatgtgtcgcaccagcagctctgcctggttggcctgcagtgccgtggtctgcgtgctctgcagctgtgagacgggggcggcctgggctctcttcccatccatgttgcctacctgtgcccctggcagccgcgtgtccacacagttagcggagcgcgggacttctgcagtcctcaggtgaccccgggcctccagcaccctgggtcgctgtcatctgtgtttagctcggggagtgccccctaagggggcgaactgacctcaggcatgttttgtaactgtagaggcgcctgccattaaacgtgtccgctgctgtggcgacagatctgaaaaaaaaaaaaaaaaaa

SEQ ID NO: 3501 - DNA, 1877 bp, Homo Sapiens
  NM_012227
atgtgggccctgcgggccgccgtacgcccggggctgcggctctcccgcgtgggccgcggccgctcggctccgcgggcagccgcgccgtcctgccccgcgcgcgcgctagccgctgtcggccgcaggagccccgggaatctggaggggccgtggggcggagggcggggcctgcgggcggacggcggccgaagccgcacgggagacgacgaggaggagccggaagatgcggacgagaacgccgaggaggagctgctgcggggagagcctctgctgccggcggggacccagcgcgtgtgtctggttcaccctgacgtcaagtggggcccggggaagtcgcagatgactcgagccgagtggcaggtggcggaggccacagcgctggtgcacacgctggacggctggtccgtggtgcagacaatggtcgtgtccaccaaaacgccggacaggaagctcatctttggcaaagggaactttgagcacctgacagaaaagatccgagggtctccagacgtcacgtgcgtcttcctgaacgtggagaggatggctgccccgaccaagaaagaactggaagccgcctggggcgtggaggtgtttgaccgcttcacggtcgtcctgcacatcttccgctgtaacgcccgcacgaaggaggcccggcttcaggtggccctggcggagatgccgctgcacaggtcgaacttgaaaagggacgtcgcccacctgtaccgaggagtcggctcgcgctacatcatggggtcaggagaatccttcatgcagctgcagcagcgtctcctgagagagaaggaggccaagatcaggaaggccttggacaggcttcgcaagaagaggcacctgctccgccggcagcggacgaggcgggagttccccgtgatctccgtggtggggtacaccaactgcggaaagaccacgctgatcaaggcactgacgggcgatgccgccatccagccacgggaccagctgtttgccacgctggacgtcacggcccacgcgggcacgctgccctcacgcatgaccgtcctgtacgtggacaccatcggcttcctctcccagctgccgcacggcctcatcgagtccttctccgccaccctggaagacgtggcccactcggatctcatcttgcacgtgagggacgtcagccaccccgaggcggagctccagaaatgcagcgttctgtccacgctgcgtggcctgcagctgcccgccccgctcctggactccatggtggaggttcacaacaaggtggacctcgtgcccgggtacagccccacggaaccgaacgtcgtgcccgtgtctgccctgcggggccacgggctccaggagctgaaagctgagctcgatgcggcggttttgaaggcgacggggagacagatcctcactctccgtgtgaggctcgcaggggcgcagctcagctggctgtataaggaggccacagttcaggaggtggacgtgatccctgaggacggggcggccgacgtgagggtcatcatcagcaactcagcctacggcaaattccggaagctctttccaggatgaacggacgcccacagaggcctgcggggtgggggcatcgctgcctggggagctgaggcgttaccgctgtgttgggggcagcttggtgtcaggtgcagcagggtcctccttgtctggttctgcacccgtctcgctcccagccatttgctgggatgaccgtgcaggccggtgacacggccgcacctgccccaaagcgggccgcccgagcgtccactccaagcctgagcatccacacaattccagtgggccctcggtgcctgctgtgaactgctttccctcggaatgtttccgtaacaggacattaaacctttgattttaaaaaaaaaaaa

SEQ ID NO: 3502 - DNA, 1811 bp, Homo Sapiens
  NM_012228
agggaggccgactagcgcaggcggacgggagagaatgggggaggggtgggatgggagcaggggcagagacgggcagagggcagagggcggagcggcgccggagcgggcgtcatggcgcggctcctctggttgctccggggcctgaccctcggaactgcgcctcggcgggcggtgcggggccaagcgggcggcggcgggcccggcaccgggccgggactgggggaggcagggtctcttgcaacgtgtgagctgcctcttgccaagagtgagtggcaaaagaaactaaccccggagcagttctacgtcacaagagaaaagggaacggaaccgcctttcagtgggatctacctgaataacaaggaagcaggaatgtatcattgcgtgtgctgcgacagtccactcttcagttctgagaaaaagtactgctctggcactgggtggccttcgttttccgaggctcatggtacgtctggctctgatgaaagccacacagggatcctgagacgtctggatacctcgttaggatcagctcgcacagaggttgtctgcaagcagtgtgaagctcatctaggtcacgtgtttcctgatggacctgggcccaatggtcagaggttttgcatcaacagtgtggctttgaagttcaaaccaaggaaacactgaccatcttcaagagtcccgttcccttgccaccccttcacgtgcaccctcaatttccacaattcacttgaatgacttgttttatttgcaataaaactgggctgaatttgctgctgtctccagcgagtcattgcttctcttaatttatttacctggaatcaacttaatcctgtgtgttaggctgttcttgtgttgctataaagaagtacctgatcaggatctgggagaatttgaaaaaaaaagaaaaactagaaaaataaacaaaattaaaaagaaaaaaaaatacctgagactgagtaacttataaagaaaagaggtttaattgactcacagttctgcagggtgtacagaaagcatggtgccagcatttgctcggattctggggagacctgagggagcttttactcatggcagaaggtgaagggggagccggcgtctcacatggcaaagcaggagcaagagagagtggtagggaggtgccacatacttttaaacagccagatctctcaagaactcactcactgtcaccaggacagcaccaagccatgagggatccaccctcatgacccagttacctcccggcagggcccacctccggcactaggaattatacttcaacataagatttggagagggaaaacatccaaaccatatcacccaactcccacttggagtagaacttcacaaaacgacagagggacagctgtttccatcaaacacttccacagcttcacctgagacgagggcatgactctgggaacatcaggaggctgatggactattaagccaaacaattcctacaaaaattccctgcaccttccactgcgtttcagtccttgacagacataagtaagggatcaagtgagaagaggaaggaaaatacaggatccaaggaatcaacaatgctagcactgaagagcaggattacggaggagctgtgctctgggagcatatatggtgatcaatcagatgcatgacttttttttcaaaattttaaatgtcttgagcatgctacttccaaccattctacccacaaataaactgcaataggacttggttagatttcaatgattatgaataaatgttcaccttcataccttctggttacaaagctaaactttaaaatgtccaaataaaatattcactaaaattta

SEQ ID NO: 3503 - DNA, 4918 bp, Homo Sapiens
  NM_012233
cttcttcccggcagccttagcgccaggcccggcgctcctcaagatggctgccgacagtgagcccgaatccgaggtatttgagatcacggacttcaccactgcctcggaatgggaaaggtttatttccaaagttgaagaagtcttgaatgactggaaactgattggaaactctttgggaaagccactcgaaaagggtatatttacttctggcacatgggaagagaaatcagatgaaatttcctttgctgacttcaagttctcagtcactcatcattatcttgtacaagagtccactgataaagaaggaaaggatgagttattagaggatgttgttccacaatctatgcaagatttgctgggtatgaataatgactttcctccaagagcacattgcctggtaagatggtatgggctacgtgagttcgtggtgattgcccctgctgcacacagtgacgctgttctcagcgaatctaagtgcaaccttcttctgagttctgtttctattgccttgggaaacactggctgtcaggtgccactctttgtgcaaattcaccacaaatggcgaagaatgtatgtaggagaatgtcaaggtcctggtgtacgaactgatttcgaaatggttcatcttagaaaagtgccaaatcagtacactcacttatcaggtctgctggatatcttcaaatcaaagattggatgtcctttaactccattgcctccagttagtattgctattcgatttacctatgtacttcaagattggcagcagtatttttggcctcagcaacctccagacatagatgcccttgtaggaggagaagttggaggcttggagtttggcaagttaccatttggtgcctgcgaagatcctattagtgaactccatttagctactacatggcctcatctgaccgaagggatcattgtggataatgatgtttattctgatttggatcctattcaagctccacattggtctgttagagttcgaaaagctgagaatcctcagtgtttgctaggtgattttgtcactgaattttttaaaatttgccgtcgaaaggagtcaactgatgagattcttggacgatctgcatttgaggaagaaggcaaagaaactgctgatataactcatgctttgtcaaaattgacagagccggcatcagttccaattcataaattatcagtttcaaatatggtacacactgcaaagaagaaaatccgaaaacacagaggtgtagaggagtcaccgctaaataatgatgttcttaatactattctcctgttcttattccctgatgctgtttctgagaaaccattagatggaactacttcaacagataataataatcctccatcagagagtgaagactataatctctacaatcagttcaagtctgcaccatctgacagtttaacatacaaactggctttgtgtctctgtatgatcaatttttaccatggagggttgaaaggagtggcacacctctggcaggaatttgttcttgaaatgcgtttccgatgggaaaacaactttctgattccaggattagcaagtggacccccagatctgaggtgttgtttactgcatcagaaactacagatgttaaattgttgtattgaaagaaagaaggcacgtgatgaggggaaaaagacaagtgcttcagatgtcactaatatatatccaggggatgctggaaaagcaggagaccagttggtgccagataatctaaaagaaacagataaggaaaagggagaggtaggaaaatcttgggattcctggagtgacagcgaagaagaattttttgaatgcctaagtgatactgaagaacttaaaggaaatggacaagagagtggcaagaaaggaggacctaaggagatggcaaatttaaggccggaaggacggctctatcagcatgggaaacttacactgctgcataatggagaacctctctacattccagtaacccaggaaccagcacctatgacagaagatctgctagaagagcagtctgaagttttagctaaattaggtacatcggcagagggggctcaccttcgagcacgcatgcagagtgcctgtctgctctcagatatggagtcttttaaggcagctaatccaggttgctccctggaagattttgtgaggtggtattcaccccgggattatattgaagaggaggtgattgatgaaaagggcaatgtggtgctgaaaggagaactgagtgcccggatgaagattccaagcaatatgtgggtagaagcctgggaaacagctaagccaattcctgctagaaggcaaaggagactctttgatgatacacgggaagcagaaaaggtgctgcactatctggcaatccagaaacctgcagaccttgctcggcacctgttaccttgtgtgattcatgcagctgtactcaaggtaaaggaagaagaaagtctcgaaaacatttcttcagttaagaagatcataaagcagataatatcccattccagtaaagttttgcacttccccaatccagaagacaagaaattggaagaaatcattcaccagattactaatgtggaagctctcattgccagagctcggtcactaaaagccaagtttggaactgagaaatgtgaacaggaggaggaaaaggaagatcttgaaaggtttgtgagttgcctgctggagcagcctgaagtgttagtcaccggtgcaggaagaggacatgctggcaggatcattcacaagctgtttgtgaatgcccagagggctgcagctatgactccaccagaggaggaattgaagagaatgggctccccagaggaaagaaggcagaactccgtgtcagacttcccaccccctgctggccgggaattcattttgcgcaccactgtgccgcgccctgctccctactccaaagctctgcctcagcggatgtacagtgttctcaccaaagaggactttagacttgcaggtgccttttcatcagatacttccttcttctgattcttctagcattactcgttggtggcttcagagacagtgctgcctcctcctgagggagggaaggtaccagggagaacctgggaggtcctggagagggccctgtccagttgggtgatcaggaatcaaaccagcatcggaaagacttcccagcaccaagcttgagctgtgtcgtttcgtggagggggcagcgaggatgggcttgagctgttgagagatttctgccctagagatggcctttgtatatgggggggtggtggggggacacaaacacatcagacactccgtcctcacactggcaggacggtgttcatcgcattctcttctgtgaccagcctctaggctagcggctgcattcgtggtctgtgcaaacacttcgtggttctatatatcagcagcaagtgtgcaaaataaaggacctgttaactcagatttctggatattttggtggtagcttctagtcccagaatctgtgtttttaaaatactacatgacattctgtctattcaatcacctggtggtcatctttcttgtactaattaactgttgatgagcattttggatattctaggagaaagcctataatttcacatagtttctctttttcatgtaactgtaacctaaatgtattacttctgataaaactatatatcaaatgtcactgcaaattagttttatatctgtcatgtgagatttgtcttacttatttttcttttggttgccatggaagttatggccctgaaaatcgtctccctccccttctcttgctgtacagcatgcgttctctttttgtggttgctggctgggtactgtatttaatgaagtagagaatagcacttgcaaaaatacagtcttggtacctagagactgtcatgcagatagtataatttggtatatgtgctaatgcattgagtagaggattattttaacacactattttgcttttgtattttagttaaaataatcgatggggatgtgtagcccccccgtgtgaggatgacatcaccacatttctagtttcatggagctcaagatgtcttgtgtctgtgtggctagatggcctctgcttggtaatcttatttttaggcctaaaattcccacttaaatccaaagtaaaaatggttatactgaagcataaaccttgcctgtgtaattttaaaaaattaatagagctgtgcaaaccctgttatttttgtaaaaaaaaaaaaaaatacatatctatatataatatgtgtgtgtgtgtgacatatgcacacgtctctgtgtatgtgaagtaggggaggccctgggggatgacctcccagcctttatgatgcttttctctatgctgctggacttcattcttactggtccacgcagatgcaggcggcctgaggccagtgctgtaccaagtagaagacggttcctaaggacagagtttgtctgttttctaacaaagaaaaattctacaaaggagaggttgggcgttacaaaggcattgtgaatctaataaaaggaaagtgtcgctttctgtggcgttttctttcattttctcccgctgaggcatttcagtctaatttcatgtggttttgtgctgtctcagctctaatgtttgcagcctgctgagcctaacaaggcagtggtctcaagaacattctttgtgcctttttaaagtactccattttatttttatgatagttatgtatttatttcacagatatatttaagtacccactttgtgtcaggtacagtacaagcaatgaagataaaacagaaaccaaaacacactcccttacagggaaaactgacaccacgttgccacaaaatgttgagtatagtcaactctgctgtgtggatcggagggcctgcatttatcctacaaataattgaatgtaatcctacattcatgtattcattggcagtacggagtaataaatgcagcaatgtcataaa

SEQ ID NO: 3504 - DNA, 4255 bp, Homo Sapiens
  NM_012235
agaggtgaaggggcgggcacccggcggccaggagagagagggagggcgccacgcaccggactgcgggccgagagcgcgcacgccgcgctccgcccctgctgccgcccccgtcgccgccgccgccgccgccgcagcttgggaggtgctgccaccacaggtacctgcacatgttgttctttgtcagtgctgtcaagtgtgtgccagggtgatccatggtcactttccgggatggcagcaaggtgacttcggctgaggatgaccctgactgaaaggctgcgtgagaagatatctcgggccttctacaaccatgggctcctctgtgcatcctatcccatccccatcatcctcttcacagggttctgcatcttagcctgctgctacccactgctgaaactccccttgccaggaacaggacctgtggaattcaccacccctgtgaaggattactcgcccccacctgtggactctgaccgcaaacaaggagagcctactgagcagcctgagtggtatgtgggtgccccggtggcttatgtccagcagatatttgtgaagtcctcagtgtttccctggcacaagaacctcctggcagtagatgtatttcgttcacctttgtcccgggcattccaactggtggaggagatccggaaccacgtgctgagagacagctctgggatcaggagcttggaggagttgtgtctgcaagtgaccgacctgctgccaggccttaggaagctcaggaacctactccctgagcatggatgcctgctgctgtcccctgggaacttctggcagaatgactgggaacgcttccatgctgatcctgacatcattgggaccatccaccagcacgagcctaaaaccctgcagacttcagccacactcaaagacttgttatttggtgttcctgggaagtacagcggggtgagcctctacaccaggaagaggatggtctcctacaccatcaccctggtcttccagcactaccatgccaagttcctgggcagcctgcgtgcccgcctgatgcttctgcaccccagccccaactgcagccttcgggcggagagcctggtccacgtgcacttcaaggaggagattggtgtcgctgagctcatcccccttgtgaccacctacatcatcttgtttgcctacatctacttctccacgcggaagatcgacatggtcaagtccaagtgggggctggccctggctgccgtggtcacagtgctcagctcgctgctcatgtctgtgggactctgcacactcttcggcctgacgcccaccctcaatggcggcgagattttcccctaccttgtggtggttattgggttagagaatgtgttggtgctcaccaagtctgtggtctcaaccccggtagacctggaggtgaagctgcggatcgcccaaggcctaagcagcgagagctggtccatcatgaagaacatggccacggagctgggcatcatcctcatcggctacttcaccctagtgcccgccatccaggagttctgtctctttgctgtcgtggggctggtgtctgacttcttccttcagatgctgtttttcaccactgtcctgtccattgacattcgccggatggagctagcagacctgaacaagcgactgccccctgaggcctgcctgccctcagccaagccagtgggacagccaacgcgctacgagcggcagctggctgtgaggccgtccacaccccacaccatcacgttgcagccgtcttccttccgaaacctgcggctccccaagaggctgcgtgttgtctacttcctggcccgcacccgcctggcacagcgcctcatcatggctggcaccgttgtctggattggcatcctggtatacacagacccagcagggctgcgcaactacctcgctgcccaggtgacggaacagagcccattgggtgagggagccctggctcccatgcccgtgcctagtggcatgctgccccccagccacccggaccctgccttctccatcttcccacctgatgcccctaagctacctgagaaccagacgtcgccaggcgagtcacctgagcgtggaggtccagcagaggttgtccatgacagcccagtcccagaggtaacctgggggcctgaggatgaggaactttggaggaaattgtccttccgccactggccgacgctcttcagctattacaacatcacactggccaagaggtacatcagcctgctgcccgtcatcccagtcacgctccgcctgaacccgagggaggctctggagggccggcaccctcaggacggccgcagtgcctggcccccaccggggcccatacctgctgggcactgggaagcaggacccaagggcccaggtggggtgcaggcccatggagacgtcacgctgtacaaggtggcggcgctgggcctggccaccggcatcgtcttggtgctgctgctgctctgcctctaccgcgtgctatgcccgcgcaactacgggcagctgggtggtgggcccgggcggcggaggcgcggggagctgccctgcgacgactacggctatgcgccacccgagacggagatcgtgccgcttgtgctgcgcggccacctcatggacatcgagtgcctggccagcgacggcatgctgctggtgagctgctgcctggcaggccacgtctgcgtgtgggacgcgcagaccggggattgcctaacgcgcattccgcgcccaggcaggcagcgccgggacagtggcgtgggcagcgggcttgaggctcaggagagctgggaacgactttcagatggtgggaaggctggtccagaggagcctggggacagccctcccctgagacaccgcccccggggccctccgccgccttccctcttcggggaccagcctgacctcacctgcttaattgacaccaacttttcagcgcagcctcggtcctcacagcccactcagcccgagccccggcaccgggcggtctgtggccgctctcgggactccccaggctatgacttcagctgcctggtgcagcgggtgtaccaggaggaggggctggcggccgtctgcacaccagccctgcgcccaccctcgcctgggccggtgctgtcccaggcccctgaggacgagggtggctcccccgagaaaggctccccttccctcgcctgggcccccagtgccgagggttccatctggagcttggagctgcagggcaacctcatcgtggtggggcggagcagcggccggctggaggtgtgggacgccattgaaggggtgctgtgctgcagcagcgaggaggtctcctcaggcattaccgctctggtgttcttggacaaaaggattgtggctgcacggctcaacggttcccttgatttcttctccttggagacccacactgccctcagccccctgcagtttagagggaccccagggcggggcagttcccctgcctctccagtgtacagcagcagcgacacagtggcctgtcacctgacccacacagtgccctgtgcacaccaaaaacccatcacagccctgaaagccgctgctgggcgcttggtgactgggagccaagaccacacactgagagtgttccgtctggaggactcgtgctgcctcttcacccttcagggccactcaggggccatcacgaccgtgtacattgaccagaccatggtgctggccagtggaggacaagatggggccatctgcctgtgggatgtactgactggcagccgggtcagccatgtgtttgctcaccgtggggatgtcacctcccttacctgtaccacctcctgtgtcatcagcagtggcctggatgacctcatcagcatctgggaccgcagcacaggcatcaagttctactccattcagcaggacctgggctgtggtgcaagcttgggtgtcatctcagacaacctgctggtgactggcggccagggctgtgtctccttttgggacctaaactacggggacctgttacagacagtctacctggggaagaacagtgaggcccagcctgcccgccagatcctggtgctggacaacgctgccattgtctgcaactttggcagtgagctcagcctggtgtatgtgccctctgtgctggagaagctggactgagcgcagggcctccttgcccaggcaggaggctggggtgctgtgtgggggccaatgcactgaacctggacttgggggaaagagccgagtatcttccagccgctgcctcctgactgtaataatattaaacttttttaaaaaaccatatcatcatctgtcaggc

SEQ ID NO: 3505 - DNA, 3293 bp, Homo Sapiens
  NM_012236
cccgcgtctccgctccctccctgcgcagcggaaacatggcggcgggaagagagtgagccgccccgcgcccccgccgcgccctcagatggagaaattagcatacaaagaaactgacttgtcagaagtcagagcaaggtattggtggatccagggataaatcccaaacttcttaacccctagaccggtttttagtccattgactatgcagcctaatgtgatagactggagtgatgttagaaaacacaaatatggtcacctatcagagtctgcatcccaatatcaagaagctgctgacatcctggatctagggttgtaaagaagattacatgagctaatggatgtgaaaacatcttaaaaactctcaaatacttttcaactttggaggattattatgattttcattctgttcagcggctatactcagactttactctaaaagtcaaatcttctgacattctttgaagtgaagcattctatgaatgtgagctgaagaaatgaatgaaatgaaataatgcagtcctacacacctccaagcaacgagttcaagatcagtatgaaattggaagcacaggaccccaggaacaccacatccacctgtattgccacagtagttggactgacaggtgcccgccttcgcctgcgccttgatgggagcgacaacaaaaatgacttctggcggctggttgactcagctgaaatccagcctattgggaactgtgaaaagaatgggggtatgctacagccacctcttggatttcggctgaatgcgtcttcttggcccatgttccttttgaagacgctaaatggagcagagatggctcccatcaggattttccacaaggagccaccatcgccttcccacaacttcttcaaaatgggaatgaagctagaagctgtggacaggaagaaccctcatttcatttgcccagccactattggggaggttcggggctcagaggtgcttgtcacttttgatgggtggcgaggggcctttgactactggtgccgcttcgactcccgagacatcttccctgtgggctggtgttccttgactggagacaacctgcagcctcctggcaccaaagttgtgattccaaagaatccctatcctgcctccgatgtgaatactgagaagcccagcatccacagcagcaccaaaactgtcttggaacatcaaccagggcagagggggcgtaaaccaggaaagaagcggggccggacacccaagaccctaatttcccatcccatctctgccccatccaagacagctgaacctttgaaattcccaaagaagagaggtcccaaacctggcagcaagaggaaacctcggactttgctgaacccaccacctgcctcaccaacaaccagcactcctgaaccggataccagcactgtaccccaggatgctgccaccatccccagctcagccatgcaggccccaacagtttgtatctacttgaacaagaatggcagcacaggcccccacttagataagaagaaggtccagcaactccctgaccattttggaccagcccgtgcctctgtggtgttgcagcaggctgtccaggcctgtatcgactgtgcttatcaccagaaaaccgtcttcagcttcctcaagcaaggccatggtggtgaggttatctcagccgtgtttgaccgggaacagcataccctcaacctcccagcagtcaacagcatcacctacgtcctccgcttcctggagaaactctgccacaaccttcgtagtgacaatctgtttggcaaccagccctttacacagactcacttgtcactcactgccatagagtacagccacagccacgacaggtacctaccaggtgaaacctttgtcctggggaatagtctggcccgctccttggaaccacactcagactcaatggactctgcctcaaatcccaccaaccttgtcagcacctcccaaaggcaccggcccttgctttcatcctgtggcctcccaccaagcactgcctcagctgtgcgcaggctatgctccagggggtcggaccgatacctggagagccgcgatgcctctcgactgagtggccgggacccctcctcatggacagtcgaggatgtgatgcagtttgtccgggaagctgatcctcagcttggaccccacgctgacctgtttcgcaaacacgagatcgatggcaaggccctgctgctgctgcgcagtgacatgatgatgaagtacatgggcctgaagctggggcctgcactcaagctctcctaccacattgaccggctgaagcagggcaagttctgaaccaggagaggcagcctagacaaccaagtggcagcaggtgggggcattcttctaggaatgaggggcatcagcccaccccaggcacctcagtggggttccgggccacctcaggactccaagaggctgtgtggagccaccactcctagccacagctgccatgataagtccttccatgaaggactgaggagggagagtgggggtccagggctggtgctgctcttccctcagctctgccggggctctaaggtccctctatttatttctcaaccctggctggcctctcaccaggagtttaggctgaatgccttccacgtgatggaggaaaaggccaactctgtcctggtcttgctgtggcaccccatcgccccacagctcgtaccttctcaccagattcccctgaatccaaactcgtggtgcaaacctctaccttttttacaaaaagatcttattgttaatttattgtttctggcacttgggcaaaccctgtagttaatactcctcccacactagacactgggtttcaggaggagggagactgccctgctttggtcccagagaggccctctgcagataggcgtggcccctcttcagaggacactaccctagggcactttctctttgaggtggagagacccataaagccttgaccacatcactccatatggggaggagaaggatccctgtcaccttctcctctcttcacggggcccttttgcagccctaggcctcatctgtgggaagggagtccctggcttatactgcccccaccacagctccttgccctggccagaactgctgtcgaagaaaatcaggccggaaggccaagaaggcgctaagggggatgggagggcaggttttccaggctggagtcggttccacccactcgcctgtccacaggcttccttgtaagcaagtcagcagcacagctactcacgctgccatctggacttattttatgtcaatctgtttataaataaaaaccaatatagataccaaaaaaaaaaaa

SEQ ID NO: 3506 - DNA, 1213 bp, Homo Sapiens
  NM_012240
gcaaatgcaatcagacggtcccactgtggggtgtgaagtgtccgtagagctgtgagagaatgaagatgagctttgcgttgactttcaggtcagcaaaaggccgttggatcgcaaaccccagccagccgtgctcgaaagcctccattgggttatttgtgccagcaagtcctcctctggaccctgagaaggtcaaagagttacagcgcttcatcaccctttccaagagactccttgtgatgactggggcaggaatctccaccgaatcggggataccagactacaggtcagaaaaagtggggctttatgcccgcactgaccgcaggcccatccagcatggtgattttgtccggagtgccccaatccgccagcggtactgggcgagaaacttcgtaggctggcctcaattctcctcccaccagcctaaccctgcacactgggctttgagcacctgggagaaactcggaaagctgtactggttggtgacccaaaatgtggatgctttgcacaccaaggcggggagtcggcgcctgacagagctccacggatgcatggacagggtcctgtgcttggattgtggggaacagactccccggggggtgctgcaagagcgtttccaagtcctgaaccccacctggagtgctgaggcccatggcctggctcctgatggtgacgtctttctctcagaggagcaagtccggagctttcaggtcccaacctgcgttcaatgtggaggccatctgaaaccagatgtcgttttcttcggggacacagtgaaccctgacaaggttgattttgtgcacaagcgtgtaaaagaagccgactccctcttggtggtgggatcatccttgcaggtatactctggttacaggtttatcctcactgcctgggagaagaagctcccgattgcaatactgaacattgggcccacacggtcggatgacttggcgtgtctgaaactgaattctcgttgtggagagttgctgcctttgatagacccatgctgaccacagcctgatattccagaacctggaacagggactttcacttgaatcttgctgctaaatgtaaatgccttctcaaatgacagattccagttcccattcaacagagtagggtgcactgacaaagtatagaaggttctaggtatcttaatgtgtggatattcttaattaaaactcattttttttaaataaaaaattgttcagctttaaaa

SEQ ID NO: 3507 - DNA, 3927 bp, Homo Sapiens
  NM_012241
ccggagcgcggtcgggacacagcgcctctaggagaaagcctggaaggcgctccgggggtacccagagctcttagcgggccggcagcatgtgcggggcccaagtaaatggaaatgttttctaacatataaaaacctacagaagaagaaaataattttctggatcaaattagaagtctgtattatattgatgtctccagattcaaatatattagaaagcagccgtggagacaaccatcttcattttgggagaaataactaaagcccgcctcaagcattagaactacagacaaaccctgatgcgacctctccagattgtcccaagtcgattgatttcccagctatattgtggcctgaagcctccagcgtccacacgaaaccagatttgcctgaaaatggctcggccaagttcaagtatggcagattttcgaaagttttttgcaaaagcaaagcacatagtcatcatctcaggagctggtgttagtgcagaaagtggtgttccgaccttcagaggagctggaggttattggagaaaatggcaagcccaggacctggcgactcccctggcctttgcccacaacccgtcccgggtgtgggagttctaccactaccggcgggaggtcatggggagcaaggagcccaacgccgggcaccgcgccatagccgagtgtgagacccggctgggcaagcagggccggcgagtcgtggtcatcacccagaacatcgatgagctgcaccgcaaggctggcaccaagaaccttctggagatccatggtagcttatttaaaactcgatgtacctcttgtggagttgtggctgagaattacaagagtccaatttgtccagctttatcaggaaaaggtgctccagaacctggaactcaagatgccagcatcccagttgagaaacttccccggtgtgaagaggcaggctgcgggggcttgctgcgacctcacgtcgtgtggtttggagaaaacctggatcctgccattctggaggaggttgacagagagctcgcccactgtgatttatgtctagtggtgggcacttcctctgtggtgtacccagcagccatgtttgccccccaggtggctgccaggggcgtgccagtggctgaatttaacacggagaccaccccagctacgaacagattcaggtttcatttccagggaccctgtggaacgactcttcctgaagcccttgcctgtcatgaaaatgaaactgtttcttaagtgtcctggggaagaaagaaattacagtatatctaagaactaggccacacgcagaggagaaatggtcttatgggtggtgagctgagtactgaacaatctaaaaatagcctctgattccctcgctggaatccaacctgttgataagtgatgggggtttagaagtagcaaagagcacccacattcaaaagtcacagaactggaaagttaattcatattatttggtttgaactgaaacgtgaggtatctttgatgtgtatggttggttattgggagggaaaaattttgtaaattagattgtctaaaaaaaatagttattctgattatatttttgttatctgggcaaagtagaagtcaaggggtaaaaaccctactattctgatttttgcacaagttttagtggaaaataaaatcacactctacagtaggtaatttattgtataaagacattaccccacgatatggctttattagggactttttttttttttttttgagacagagtttcactcttgttgcccaggctggagtgcagtggtgcgatctcagctcacagcaacctccgcctcccgggttcaagagattctcctgcctcagcctcatgagtagctgggattacaggtatgtaccaccacacccagctaattttgtatttttagtagagacggggtttctccatgttggtcaggctggtcttaaactctcgacctcaggtgatctgcccgcctcggcctcccaaagtgctgagattacgggcatgagccaccgcacccggcttactgggggctttttaaccttgtttggctacattacctcagtgaacaaggggaagctcacaacaggaactcacacaaagaaggaagagaacagtaccaacaaggtagaacatcacgatgagaagaaagaatgatgcaaatatgtggacccccaggataaacacagctgcccaaaatttagctctggcccccttagatgggggaagtcaacagtgaagtgtttctcagcatcataaaggcagaagctgtggttcctgtggggcctgccaaccgttcccagatgctgaactctgctgggagttttttccatgggactttaaaaaatgatgcccttaggttgggccagacctctgttaacttcagtagggatggcaccaggttcaagaggccaaagaagagacctggagctagtgaaggaaacatagggtttatttggggaaccttacagggtggtccagtggccgcgggctggacagaactgcaaccacttataaaaagcatgcagtttacatagcactttcactcagcaccctcccctcagcagcctccacgtggcaaccctcacttcttaagttattgctgtcagatgcatctgccatacagggtcattctcaggggatgcttaagttatttctgtcaggtacatcttccatacactttactaccttggagtaaagtagtaagaatacagctttttccttaacctttaccagctaactcagtgcttaggggccttggaatgcctgctgtccagcaggtgtcacaggcctgactgggaggcatggccattatcaacagtgtatgaaggtcacatatggctccctgaagtgattacatacttggaccacatcacctcagccccttgcaaaattgcatttaatgttacacccttggcttttgtagaaacaggcaacaagacactatcatataaaactttgtactgcattgcaaggcataacctttaataaatcccagtggtcctttgtgtagggaacggggatgctcatagcctatggggcggctggagaaccagtcagggaccctgagggctcgatgtacactttacatgggtgggccaaggagtttacactgagggcactggtaatacctgtaatagtcttatagtacttataaagcagttttgcacataaaataccatcatgcacttataagtttgttcttgggctgctccaagttaactttattcattttcctagtgttagtgtctcagggagtctgattatatttttgatttgtaatttctatctgactaaggcctagagatttcaaaactgttctttgcaattcctctcatactgaacctctggttcagcagctttttttgttgttgttgttttcaagttttatcatttttgttcctatttggttttgtcgtttttaaattgagaattgcttctaaaacagaagacatgaaaagagaattaaaaatacaatatatgtgtaagatagaattattcaacttagcatttattaaacatctaccagatgatagacattagaaataaaatgactagcaagacctggcccttcccctcaggggttcacagaatggctggagcaactgtcatataagctgttatgaagtgcagaaactacacagacatttgtgcgggttcagaccagcgcaattagagatgggcagagtgggatggggtaggggtaaggtgcttgaaatttgcctgggtgggaatttttgaagtataaaaaggacttctacctggggggctgcggcagtagagggaagagcacggtcggtacaaatgcatggcaggtgtgaaacagtttgatttgttcaaagaatgatgaatcacttagtgttgtataatggatgggaggagagaaacacagcgatcacaaagggccatgtttgccaagaaataaaatatacttggaaaaaaaaaaaa

SEQ ID NO: 3508 - DNA, 2149 bp, Homo Sapiens
  NM_012243
ccgcgggaacccggaaacgcctgggctgcaccgagctggcggtggctacggcgacgggagccggcggcgctgcgggtcagcggtcgcgtaggacccagcggactcggcagcctggggcgcccggcggagctgaaccgcggcccccggtggtgggctcagccggtcgagctgcgcgggaggcaaatgaagataaaacaatgttcgccaacctaaaatacgtttccctgggaattttggtctttcagactaccagtttggttctaacaatgcgttattccagaactttaaaagaagaaggacctcgttatctatcttctacagcagtggttgttgctgaacttttgaagataatggcctgcattttattggtctacaaagacagcaaatgtagtctaagagcactgaatcgagtactacatgatgaaattcttaataaacctatggaaacacttaaacttgctattccatcagggatctatactcttcagaataatttactgtatgtggcactatcaaatctagatgcagctacttatcaggtcacgtatcagttaaaaattcttacaacagcattattttctgtgtctatgcttagtaaaaaattgggtgtataccagtggctgtccctagtaattttgatgacaggagttgcttttgtacagtggccctcagattctcagcttgattctaaggaactttcagctggttctcaatttgtaggactcatggcagttctcacagcatgtttttcaagtggctttgctggggtttactttgagaaaatcttaaaagaaacaaaacaatcagtgtggataagaaatattcagcttggtttctttggaagtatatttggattaatgggtgtatacatttatgatggagaactggtatcaaagaatggattttttcagggatataaccgactgacctggatagtagttgttcttcaggcacttggaggccttgtaatagctgctgttattaagtatgcagataatattttaaaaggatttgcaacctctttatcgataatattatcaacattgatctcctatttttggcttcaagattttgtgccaaccagtgtctttttccttggagccatccttgtaataacagctacttttttgtatggttatgatcccaaacctgcaggaaatcccactaaagcatagttgtatactatctttaactggtttttcacgatggggcactaggaatctcgacattaatcttgcacagaggacttctacagagtctgagaagatatcatcatgctgaatctgatcatactgttttttaaaagtttaaggataagacatgtgtatatgtaacaaaacacattgcatctagaaatcaaaacttgaaagtatttccagggattaggattagaaggaatattagaggaaacttgaaatctgagtttaaaaagattttacctttttgattgctgcagaaatgtcctatgcactctttgcaagagcacacaacaaatgtcagataccaatttttgcaaattagatttaatcttattaaatgtttttatcttactctttctgtacagatatatcaaatcacatgaaatatttaaagtttgaaaattataattacctataaagctgtgaaaaatagaagtataatttgaaaaaacatttcacttatcagagatttttatatttatacaaaagattactaaatgaaggattgctaaatgtttttggttcaattacataaaaattaatattctgggtctgatctgtcagagaataaatatcaaatctaaatttaatgtagagatacatactatttctccatatgaattttaagatattttagtgcttcaagactgctgaaagcaatccagttgctcctgtgctagatggtagccagagaattttatagtaatggaggttagcccttaatctcttcattgcatttcatttctgtaaatcagattaagtccttaatattattttaaattaaaatttgtgtgtaattgccattaaattttcaaaatgtaatttaaaaggattaaatactcatttaataatttaaaataattattgtataatatctacatttggagaattttgaactatcaagcatatactgtatacagttagaaagttattaaatgaacattttactc

SEQ ID NO: 3509 - DNA, 3275 bp, Homo Sapiens
  NM_012247
gggccgcacgccgccacccagcagccagggccgcctcttaaagggaggtggccggccttaaaggacccccgcgcgcccagccggcgggagcgcggcggcccggctcccgcagggccgcgccgaggcaggcgagcccccgcggcgcccaggcgcgggcccgggcccccgccgccgccgccgccgccgggcgcggcatttttattcaggcgacgcttaagggagcccggccgcgcccggtgcattgtgggagcggcccgcggcccgttttcgggaggaggcggagggcgcaaagcgagccggtggatccataaagaacccagccaacccgcagagggaggggaggggctgagctgtgaggagagcggggcccaagaaccatgtctacgcgggagtcctttaacccggaaagttacgaattggacaaaagcttccggctaaccagattcactgaactgaagggcacaggctgcaaagtgccccaagatgtcctgcaaaaattgctggaatctttacaggagaaccacttccaagaagatgagcagtttctgggagccgttatgccaaggcttggcattggaatggatacttgtgtcattcctttgaggcacggtgggctttccttggttcaaaccacagattacatttacccgatcgtagacgacccttacatgatgggcaggatagcgtgtgccaatgtcctcagtgacctctatgcaatgggggtcacggaatgtgacaatatgctgatgctccttggagtcagtaataaaatgaccgacagggaaagggataaagtgatgcctctgattatccaaggttttaaagacgcagctgaggaagcaggaacatctgtaacaggcggccaaacagtactaaacccctggattgtcctgggaggagtggctaccactgtctgccaacccaatgaatttatcatgccagacaatgcagtgccaggggacgtgctggtgctgacaaaacccctggggacacaggtggcagtggctgtgcaccagtggctggatatccctgagaaatggaataagattaaactagtggtcacccaagaagatgtagagctggcctaccaggaggcgatgatgaacatggcgaggctcaacaggacagctgcaggactcatgcacacgttcaatgcccacgccgccactgacatcacgggcttcgggattttgggccatgcgcagaacctggccaagcagcagaggaacgaggtgtcgtttgtaattcacaacctcccggtgctggccaagatggctgcggtgagcaaggcctgcggaaacatgttcggcctcatgcacgggacctgcccggagacttcaggcggccttctgatctgtttaccacgtgagcaagcagctcggttctgtgcagagataaagtcccccaaatatggtgaaggccaccaagcatggattattgggattgtagagaagggcaaccgcacagccagaatcatagacaaaccccggatcatcgaggtcgcaccacaagtggccactcaaaatgtgaatcccacacccggggccacctcttaatctagacagaaatagctgtttggttttgtttttaaatagatctatttcccttatcacttcaattaaagactataaacaacaaaaatctcattgtgtctacacatcggggtgaccttaggtcggtttgtaagtggatacaattaataaaataaaatccattgcctttttttcctgttacattaactgaagatgcacctaatcttgaggcagcttctgagttgagaattatattgttatccaatactgttgattcattttgaatctttagacacttatctcttgccgcataggctttttaaaggtgctttcacatagcacaggcattacccgtagtcgtgtcaaatagcagttggtgtcttcattttatgtatatttatcatataagtctgatttttttttttaagcgtcttgaatggttttctggagagacagcattggtaagtggcacatgacggtatcccagtcataagagggttgcatgattcctttgagtgtttgatttgaaaagcctagtcttgtctctcaagagcatctcggacccagaacattctccagtagtgcattcagttcaacacagcaagtgcttcattgcatggaaaacactttgaagacaaaaaagaaatcttatttctttttttgtagccttcctgatatttacagtaataccattaactgttttatcgatagcaaaaaaggatactttttgcaatgttattagatgttctatagtgctacaaggaattgccttccgaatggaggttcatgtataatactcatttacaattcaatatataattacacaaataatttttaaatataatcaatagtaaagactgttctgtggatggtagtgtttaatacattttctattttgtacagtgatttcaggccttttgttttcttaaaatcagcagctgtttggcctaattcttagcattattttgtcctttgcgccagtacttttttgtgcacgctttttgtgatctgtgttaaaaacctgcattgccaacattgcagctcgaacttaaacttgttattcaaataaatatttaattttttaaattgctcttgtataatcagatgccccttttagtattattttagaagcgttgggagggttttgcctaaagtacaatttatcgggaaaaactagattttagttttataaaacttttaagtctttcatgggacctatattttcttgaattaaattttgtagttctagaataaataggcaatctaaaaaggtgttctctgtgttatgtaaagtggaggcttccttatattttaacctactaagcaatgaggagggattcctgtcattaagcacaagggcgctggatcctcaagtgcccatcttcgtgagagaaaaagcagcacatcctgcccatttctggtgctttctgctcacaggcaccaaagctgcacatgtaaactgacttcttgccaaaggaaatgacccctgggaagttcaagctcctggaagaggctttaactcggacgcgccctcctccaggaaccagtgggcagggcagccttcatgcatgtgtaactggacctccagccataagcatggtgtgcagtatggaagagcctgctacggaactgaaagtgattggacattttataggaattgatagagatgttggtcctcaaaagctacaaaccagtggtctgcaaaataaagtgtgttggaaacctctaaaaaaaaaaaaaaaa

SEQ ID NO: 3510 - DNA, 2291 bp, Homo Sapiens
  NM_012248
aaataagggagtccggcggctcctctatcaggaagattgtgcatgccgtgggtctgacggcttgagtagcgctagggagaatccctgcaggtaatatttgacttttgcttcatattaatctgagtggaaaataaaagggccctcttctcctctcgcttccctgccgggcaggcgccatggcggaagcctcggcgacgggcgcctgcggagaggcgatggcagcggcggaaggctcctcgggcccggcgggcttgactctgggccggagcttctcgaactaccggcccttcgagccccaggcgttgggcctcagcccgagctggcggctgacgggcttctccggcatgaagggctgaggctgcaaggtcccgcaggaggcgctgctcaaactcctggcgggactgacgcggccggacgtgcggcccccgctgggccggggcctggtgggtggccaggaagaggcgtcccaggaagccggcctgccggcaggagcgggccccagccccacctttccagccctgggcatcgggatggactcctgcgtcatccccctgaggcacgggggcctgtcactggtgcagaccacggacttcttttaccccttggtagaagatccctacatgatggggcgcatagcttgtgccaacgtgctgagtgacctctacgccatggggattactgagtgtgacaacatgttgatgttactcagcgtcagccagagtatgagtgaggaggaacgcgaaaaggtaacgccactcatggtcaaaggctttcgggatgcggctgaggaaggagggacggcagtgaccggtgggcaaacggtggtcaacccttggattataatcggtggagttgccactgtagtatgccaaccaaatgagttcataatgccggacagcgccgtcgttggggacgtgctggtgttaaccaaaccgttaggaacccaggttgctgtcaatgcccaccaatggctggataatcctgaaagatggaataaagtaaagatggtggtctccagagaagaggtggagctggcctatcaggaagccatgttcaatatggctaccctcaacagaactgctgcaggtttaatgcacacatttaatgcccatgcggccacagatatcacaggctttggcattctaggacactcccagaaccttgcaaaacaacaaagaaatgaagtgtcctttgttattcataatctgccaataattgccaagatggctgccgtcagcaaggccagtggacggtttgggcttcttcaaggaacctcagctgaaacctctgggggattactgatttgtctgccaagagaacaggcggctcgcttttgttctgaaatcaaatcctccaagtacggagagggtcaccaagcgtggatcgttggcattgtggaaaagggaaaccgaacggcccggatcattgacaagccgcgagttattgaagtcctgcctcgtggggccacagctgctgttcttgctcctgacagttcaaatgcctcctctgagcctagctcgtgagatgaaagaacagaagttgtttggaccttagagccattgtccacaatcacggatggttctcaagagttgattgtaagaaatttccaaagaaggctgcctgcatagtggttccggctgccctttctaggtgattggaatcagcccatctaaagcagtctttatatgcattccgaggccagagtaacattttgaactttggggggatatttgttcatcacttgggtagaagaggagcaaaaatacctctgttttctcttgccaaagtaagatgaagctattccaggttgagggatttttctttgcacggggttgattaatttctgcacagggagtgagattattaaagtaacacacacacaaagtaaattgcaaaatgaaaaaaattagaagcaaatgagttttggaccaatattgttgataaatctaaattgttaagagagatcttataatgcaacatcaaattctttattcaattttactgaagtactggctctttcctgctctggacaagaattgagcaacttgtctgatgactgggaaaggaggacctgcaaccatctgacttggtctctgttaatgacgtctctccctctaaaccccattaaggactgggagaggcagagcaagcctcagagcccaggcctcagtggtcattaagatgttaagtcttttgcggcagattcctggtgatttgatcaataaagagtaatttcttgctaaataaataaaagaaaccttgttgaaaaactaaaaaaaaaaaaaaaaaaa

SEQ ID NO: 3511 - DNA, 2360 bp, Homo Sapiens
  NM_012250
cagacggccatttgtggcggcgctggaggctgcgttcggcaggcgctgcggagacgcgtagaggagcgcgccccccggccgctgccgcccctggcccgtgccgtcaccccgcttctccgcgcctcgggcggtacccagccagtccccagcgccgcgctaccgcgctgaccggccctccagacgcctcccggtacccgggaccccagcccggccgctcgcccgcagcccgccggccgcacacgtccccggagccgggcctagggcgggcggcagcggcggctcggcgcagtcaggctgggctctgtagcgtccccatggccgcggccggctggcgggacggctccggccaggagaagtaccggctcgtggtggtcggcgggggcggcgtgggcaagtcggcgctcaccatccagttcatccagtcctattttgtaacggattatgatccaaccattgaagattcttacacaaagcagtgtgtgatagatgacagagcagcccggctagatattttggatacagcaggacaagaagagtttggagccatgagagaacagtatatgaggactggcgaaggcttcctgttggtcttttcagtcacagatagaggcagttttgaagaaatctataagtttcaaagacagattctcagagtaaaggatcgtgatgagttcccaatgattttaattggtaataaagcagatctggatcatcaaagacaggtaacacaggaagaaggacaacagttagcacggcagcttaaggtaacatacatggaggcatcagcaaagattaggatgaatgtagatcaagctttccatgaacttgtccgggttatcaggaaatttcaagagcaggaatgtcctccttcaccagaaccaacacggaaagaaaaagacaagaaaggctgccattgtgtcattttctagaatcccttcagttttagctaccaacggccaggaaaagccctcatcttctctttctctcctcagtttacatcttgttggtacctttctagccttagacaaatgatcaccatgttagccttagacgaagaagctggctagtcctttctgtgaagctaatacaatggtcatttccagacaaatttaaaggaaacactaaggctgcttcaaagattatctgattcctttaaaatatatgtctatatacacagacatgctctttttttaagtgcttacattttaatagagatgaatcagttttggaatctaagctgtttgccaagctgaagctacaggttgtgaaataatttttaacttttggaatcatactgcctactgttactctaaatagaaatatagggttttttttaatgtgaatttttgcctatctttaaacatttcaatgtcagcctttgttaaccttaaatacactgaattgaatctacaaaagtgaaccatctcagacctttactgatactacaacttttgttttctgatggccaaaataccaaatgcctgttgtatttatggattaaaaactgcttataaaaccctgtgttactactcctactcttggagatgataatattctatgtggtcaaatatttggactcatttaggacttagatatttcagtgtacttgattttttaatttaactctttttcacagccacgctaagggtaaaaaggaataatttccttctgtcttccttttcaagtatttctgggtaagggattcaaaaaactaaaactgtttttgtttgtaatataaaatatggaattgatctttccagggtcagagatgattaatgtttttgctatatacttttatacattattttcttatcaaactagttaacaagtatttttatatgtttgtaagcagatatgctttcatagcataccttgtgtatatgtaaagataagtatttaattctcactgttcacttttaactgacaaagaaaaacaagtggaaactacagaaactgtggtagaacttttacttgctggtctggtcttggttgtacccatctttggccagtcacataactactcaagaaaccttcccaatagagtacaacaggatgagactctgaaatcactttcagtattccctgctagatattgattgttatttcaagtattaagtgtaagcttttaatggataattagtataactgtggatggcatctgattttgtttttaattctgtggattgtgtttaagcaattcaatagtatgttcctgattttgagatgctaagtggtattgcacagttgtcactttatcaagtgtgtacaacagtcccatgaagtttatagagcatacccttgtatagcttcaggtgctagaattaaaattgatctgttatcacaagaaaaaaaaaaaaaaa

SEQ ID NO: 3512 - DNA, 2652 bp, Homo Sapiens
  NM_012253
tcccttgacttgcttgcggagggagcggccggcggagggagcggcaggtggagggagtggcacgaggcatgcggagggagctgcaccgacatcacataaacgcactgggcagctcgcaggcgccattcgctcttcagacgccggagacgtaggagtgggtcttcagactccaaaggggttggactaatggcggatgctgaggcgagggctgagttcccggaggaggccagacctgacaggggcaccttgcaggtgttgcaagatatggccagccgcttgcgaatccattccatcagggccacatgctccacgagctccggccaccctacatcatgtagcagttcttctgagatcatgtctgtgctgttcttctacatcatgaggtacaagcagtcagatccagagaatccggacaacgaccgatttgtcctcgcaaagagactgtcgtttgtggatgtggcaacaggatggctcggacaaggactgggagttgcatgtggaatggcatatactggcaagtacttcgacagggccagctaccgggtgttctgcctcatgagtgatggcgagtcctcagaaggctctgtctgggaggcaatggcctttgcttcctactacagtctggacaatcttgtggcaatctttgatgtgaaccgcctgggacacagtggtgcattgcccgccgagcactgcataaacatctatcagaggcgctgcgaagcctttgggtggaacacttatgtggtggacggccgggacgtggaggcactgtgccaggtattctggcaggcttctcaggtgaagcacaagcccactgctgtggtggccaagaccttcaagggccggggcaccccaagtattgaggatgcagaaagttggcatgcaaagccaatgccgagagaaagagcagatgccattatcaaattaattgagagccagatacagaccagcaggaatcttgacccacagccccccattgaggactcacctgaagtcaacatcacagatgtaaggatgacctctccacctgattacagagttggtgacaagatagctactcggaaagcatgcggtctggctctggctaagctgggctacgcgaacaacagagtcgttgtgctggatggtgacaccaggtactctactttctctgagatattcaacaaggagtaccctgagcgcttcatcgagtgctttatggctgaacaaaacatggtgagcgtggctctgggctgtgcctcccgtggacggaccattgcttttgctagcacctttgctgcctttctgactcgagcatttgatcacatccggataggaggcctcgctgagagcaacatcaacattattggttcccactgtggggtatctgttggtgacgatggtgcttcccagatggccctggaggatatagccatgttccgaaccattcccaagtgcacgatcttctacccaactgatgccgtctccacggagcatgctgttgctctggcagccaatgccaaggggatgtgcttcattcggaccacccgaccagaaactatggttatttacaccccacaagaacgctttgagatcggacaggccaaggtcctccgccactgtgtcagtgacaaggtcacagttattggagctggaattactgtgtatgaagccttagcagctgctgatgagctttcgaaacaagatatttttatccgtgtcatcgacctgtttaccattaaacctctggatgtcgccaccatcgtctccagtgcaaaagccacagagggccggatcattacagtggaggatcactacccgcaaggtggcatcggggaagctgtctgcgcagccgtctccatggatcctgacattcaggttcattcgctggcagtgtcgggagtgccccagagtgggaagtccgaggaattgctggatatgtatggaattagtgccagacatatcatagtggccgtgaaatgcatgttgctgaactaaaatagctgttagctttggtcttttggcctctttaccctgtgtttatgtttgttccaaaaccatcatttaaatctctactgtcacattttgtttcttaaaagcaaagccagctaacaccttcattcatccctagttcggaaattcaagctaactacttaccctttaaactgtcactgcatatgcaagtaccgctctaatttttggatcattaaagggagttacacaacttttaagtgaaaaaaataggtaacaaaacaaccacctgatagtaagttttctgataagactatagataagtggtagaggtaatcaattcttccgaagtgtttccttcgtgaataactggtagaggtaatagttttttcaatgtatttccttcatgagtaaagaaaatgtggattgaagtatagattccagtagcctagtttccacagcacgataacaccatgacgcctactgctgttcccaccttgggattctgtgtgctgccatcccacctgcagctgccctggaattcccttcgctgtttgccttcatctccctccacgtttgagaggctgtcaggcagcagcgaaagcttgttaggatgtcctgtgctgcttgtgatgagagcctccacactgtactgttcaagtcaatgttaataaagcatttcaaaaccagctgctttattca

SEQ ID NO: 3513 - DNA, 2814 bp, Homo Sapiens
  NM_012256
agaatgcacctggcatcaacacggcggcggcggcggcggcttccaacaggctctggggcgccgagcggacaggaacgcagcacgggggctccgaggcggggtctgggtgttgaggggcgactggagccatggcggagtcggcgcctgctcggcacaggagaaaacgacgctccacacctttaacttcttccacacttccttcacaagcaacagagaaaagctcctattttcagaccaccgagatttcactctggacggtggtggccgctattcaggctgtggagaagaagatggagtcccaggctgcccggctacagagcctggaggggcgcacggggacagccgagaagaagctggctgactgcgagaagatggccgtggagttcgggaaccagctggagggcaagtgggccgtgctggggaccctgctgcaggagtatgggctactgcagaggcggctggagaacgtggagaacctgctgcgcaacaggaacttctggatcctgcggctgcccccgggcagcaagggggaggcccccaaggtgtccaggtcactggagaatgatggcgtctgtttcaccgagcaggaatgggagaatctggaggattggcagaaggagctctacagaaacgtgatggagagtaactatgagacactggtctctctgaaggtccttggccagacagagggagaagcggagttgggtacagagatgctgggtgacttggaagaggaaggtcctggtggtgcccacccagcaggtggggtcatgatcaaacaggagctacagtatacacaggaaggccctgcggatcttcctggagagttctcatgcattgctgaagagcaggctttcctgagcccagagcagaccgaactctggggtggtcagggcagttctgtcctcttggaaacaggtcctggggactctactctagaggagcctgttggtagtagagttcctagcagcagcagaactgtgggctgcccgaagcagaaatctcataggcaggtacagctggaccaggaatgtgggcagggcctgaagctgaaaaaggacacttcccgcccctacgaatgttctgagtgtgagatcaccttccgctataagcagcagctggccacacatctgcgcagccactctgggtgggggtcttgtacacctgaggagccagaggagagccttaggcccaggccacggctgaaaccacagaccaaaaaggccaagctgcatcagtgtgatgtgtgcctgaggagcttcagctgcaaggtgagcctggtgacccatcagcgttgccacctgcaggaggggcccagtgccggccagcatgtccaagagaggttctcacccaacagcctggttgccctgcctggccacatcccttggaggaaaagccggagttccctcatctgtggttactgtggcaagagcttcagtcacccatctgacttggtgcggcaccagcgcatccacacgggtgagcggccctacagctgcactgagtgtgagaagagctttgtccagaagcagcacctcctgcagcaccagaagatccaccagcgggagcggggtgggctggccctggagcccggaaggcccaatggcctgctttaagggtgcagcccctcgcccgtctgggggatggaggggggtggcattggttcccccgaagagacactgcagtcagggactgagttcttcctgagggcagttgtttgtgattgccttcccttgtcccagtaccaagccaagcccaaaggctgtcctgaaaaccctgtggaagaagagtccaggccaggtcttcatcctgctgccaagtttgctgtttcttggcaccttcaggtctctggttttctcattcatgccaatgcttgtgggctggggttggcgttctgaccccacagggactggtggctggttccagggctcgtcccggcatttcatgtcttcccacggggttgagtcgggccataggggtgagcagctgcctggaagagttctgggaagtataaccctccattttttcttgttttataatctctttgtttaataataagtagaagaaataatttaaatgaactgcttagccctgctctgaagaaccttttttggaattagattttagttgattttttaaagaatacagcccaacacttgttttttacattttaagagttgtagaagttgttcctaacttggggactggacctaccctctaggagggagttgttaatggggctcttttagcccactgatgcttacttaggccggagagcaggggacacggtgctaggttccctcgtgcagtgcctggtgctctcaaattgtctcaaaaggaccaagaggaaaagagtcggaggggtagaccctgcagccctgttgagaagaaagattccagtgaagttgctgatggtatggctgtggtctgggacttgcggtgtctcggcatacccctctcctcttcccacctcctcctggctatgttctgcagcctcccagagtagaaaactactttgttacttaaggttgttcaccttgtaccagtggttatttgagtttgttcctattacaccaatccttacttgaggtggttcggattacagtttccaaatgcattctgggattgcctattccagagagggtacagaaaaagcacacagatggcttgtctcaggagtgttgaatgtgtgccccgctgctgtctggggggatgggagtgggctctggggtcatatgtgaacatccccttggatgatttgcggttgcttagaataaaacttgctactagcaaaagaaaaaaaaaaagttaaaa

SEQ ID NO: 3514 - DNA, 2037 bp, Homo Sapiens
  NM_012260
agaccgcctcttccttcccgttgtttaaggcagttggttgccctcctgtccgtcagaggtgcagtaccagaggtggcgtgctgccgatttcgcgtttgccttgctggatgattccgcttgtttgccggctgcgtgagtgcttagagcttttcggtggaagatgccggacagtaacttcgcagagcgcagcgaggagcaggtgtctggtgctaaagtcatcgctcaggccctgaaaacgcaagatgtggagtacatatttggcatcgtaggcatcccagtgaccgaaatcgccattgctgcccagcagctaggcatcaagtacatcgggatgaggaatgagcaagcggcttgttatgctgcctccgcgattggatatctgacaagcaggccaggagtctgccttgttgtttctggcccaggtctcatccatgccttgggcggtatggcaaatgcaaacatgaactgctggcccttgcttgtgattggtggttcctctgaaagaaaccaagaaacaatgggagctttccaggagtttcctcaggttgaagcttgtagattatataccaagttctctgcccgcccaagcagcatagaagctattccttttgttattgaaaaggcagtgagaagcagtatctatggtcgtccaggtgcttgctatgttgacataccagcagattttgtgaaccttcaggtgaatgtgaattctataaagtacatggaacgctgcatgtcacctcctattagcatggcagaaacctctgctgtgtgcacggcggcttctgttattaggaatgccaaacaaccccttcttatcatcgggaaaggtgctgcttacgctcatgcagaagagagtatcaagaaattggtggagcaatataaactgccatttttgcccacccctatggggaagggtgttgtccctgacaaccatccatactgtgtaggtgcagccagatccagggctttgcaatttgctgatgtaattgtgttatttggtgccagactaaattggattttacattttggactgcctccaagatatcagccagatgtgaagtttatccaggttgatatctgtgcagaagaattggggaataatgtaaagcccgctgttactttgctaggaaacatacatgctgtcactaagcagcttttagaggaacttgataaaacaccatggcagtatcctccagagagcaagtggtggaaaactctgagagaaaaaatgaagagcaatgaagctgcatccaaggaactagcttctaaaaaatccctgcctatgaattattacacagtattctaccatgttcaagaacaactacctagagactgtttcgtggtaagtgaaggagcaaatactatggacattggacggactgtgcttcagaactaccttcctcgtcacaggcttgatgctggtactttcggaacaatgggagttggtttgggatttgctattgcagctgccgtggtggctaaagatagaagccctgggcaatggatcatctgtgtggaaggagacagtgcatttgggttttctggcatggaggtagaaaccatctgcaggtacaacttgccaatcatactgttggtagtgaataacaatggaatttaccaaggttttgatacagatacttggaaagaaatgttaaaatttcaagatgctactgcagtggtccctccaatgtgtttgctgccaaattcacattatgagcaagtcatgactgcatttggaggcaaagggtattttgtacaaacaccagaagaactccaaaaatccctgaggcagagcctagcagacacaactaaaccttctcttatcaacatcatgattgagccacaagccacacggaaggcccaggattttcattggctgacccgctctaatatgtaaataaagacgccagttggtggtcttgagttttctctttcttgcaagatgaaattttattttccacagcaaaattactctactgttaaaattgtgcaaaataaaataaacatttaaaatgacattttacagtaaaaaaaaaa

SEQ ID NO: 3515 - DNA, 1773 bp, Homo Sapiens
  NM_012263
agtgcagcgcggggcggggcgggccggtgcgcctggcagtcggctgcgtactcctgcgagcgccggagaggggctggaggcggggcgagggcgcggctcgaggcatccctgcagggcgctcctccgagtccctcggcgctctgagcccacagggaagaaggaggggccggcgtcagtgacgtcagcgagaccgaggtgagcgtgggcgttgccagtggtgctctgtcagtgcctatggattatggcagggaaagtaaaatgggtcactgatatcgagaagtcagtgctgatcaataactttgaaaagagaggatgggtccaagtgacagaaaacgaggactggaatttttactggatgagtgtgcaaaccatccgaaatgtgttcagcgttgaagctggatatcggctctcagatgaccaaatagtcaaccattttccaaaccactatgaactgacccggaaggacctgatggtgaagaacatcaaaagatacaggaaggagctggagaaagaagggagtcctctggcagaaaaagatgaaaatggaaaatacctctatctggactttgttccagtcacctatatgctgcccgctgactacaacctgtttgtagaggagttccggaagagcccgtccagcacctggatcatgaagccttgtggcaaggcccagggaaagggcatcttccttatcaacaagctctcacagatcaaaaagtggtcccgggacagcaagacatcttcgtttgtgtctcaatctaataaggaagcctacgtgatctctctctatattaacaacccgttactaattggcgggaggaagttcgacctgcgcttgtacgttctggtgtccacgtaccgtccactgcgctgttacatgtacaagcttgggttttgccggttctgcacagtgaaatacaccccgagtaccagtgagctggacaacatgttcgttcatctcaccaacgtcgccatccagaaacacggggaggactacaaccacatccatgggggcaagtggacagtgagtaacctgcggctctacctggagagcacccgcggcaaggaggtgaccagcaagctgttcgacgagatccactggatcatcgtgcagtccctgaaggctgtggcgccggtgatgaacaatgacaagcactgctttgaatgctatggctacgacatcatcatcgacgacaagctgaagccctggctgatcgaggtgaatgcgtccccgtctctcacgtccagcactgccaatgaccgaatcctcaagtacaacctgattaatgacaccctcaacatcgccgtcccgaatggtgaaatcccagactgcaaatggaacaagtcgccacctaaggaagtcctcggcaattacgagattctgtatgatgaagaattggcccagggtgacggggctgaccgggagctgagaagccgtcagggtcagtctctggggcccagagcaggccgatcgagagactcggggagagcggtcctcaccacctggaagtgagtcccacctggaccttatcaaaactactcactccacctgggcccctgctgaagccctattttgaaatttcccttttgtagagcttttttcctttcctaagccctgtaaataaacgaaggcacttctttggaaggttatggagtctgtttgactagtgctaaaggaaacaattcatgcggatgtataaaactcgctcttttttttttaatttttaacctaagcagaattttcatattaaaaactcacttttttgacagaaa

SEQ ID NO: 3516 - DNA, 1925 bp, Homo Sapiens
  NM_012267
gcaaaagtatcgggggcgggactcgctgaggtgcgaaaactgggccaggggcagggctttgaccagctacttgagcgtgaaggggcggcgcccgcacgaaggggcgtcccagcttggaggcggggcccggatgggaggggcggggccgagtgcagtatcccgccaggtgagaaggggataagagtcgggcaagcagcttcagccgcaaccacggcacgaagttgggtgggtacgcctggcacttccgggtgaaaccgtgcgtatttccggttaagatggcggcgcccagcagagtcaggtgcggacgactttgtctgtaggagcagcggcggcttgaggacccggggagaccctcaagaatcgacccatcaggacgccagagctgcttcagcggtgaccaccttctccctctaacacattcttcccttcttcacaaacggcccatgtcagacgaaggctcaagggggagccgcctgcccctggcgctgcccccggcctcccagggttgctcttcagggggcggcggcggcggctcctcggctgggggctcgggcaattcccggcccccacgcaacctccaaggcttgctgcagatggccatcaccgcgggctctgaagagccagaccctcctccagaaccgatgagtgaggagaggcgtcagtggctgcaggaggccatgtcggctgccttccgaggccagcgggaggaggtggagcagatgaagagctgcctccgagtgctgtcacagcccatgccccccactgctggggaggccgagcaggcggccgaccagcaagagcgagagggggccctggagctgctggccgacctgtgtgagaacatggacaatgccgcagacttctgccagctgtctggcatgcacctgctggtgggccggtacctggaggcgggggctgcgggactgcggtggcgggcggcacagctcatcggcacgtgcagtcagaacgtggcagccatccaggagcaggtgctgggcctgggtgccctgcgtaagctgctgcggctgctggaccgcgacgcctgcgacacggtgcgcgtcaaggccctcttcgccatctcctgtctggtccgagagcaggaggctgggctgctgcagttcctccgcctggacggcttctctgtgttgatgagggccatgcagcagcaggtgcagaagctcaaggtcaaatcagcattcctgctgcagaacctgctggtgggccaccctgaacacaaagggaccctgtgctccatggggatggtccagcagctggtggccctggtgcggacagagcacagccccttccacgagcacgtgcttggagccctgtgcagcctggtgacagactttccgcagggtgtgcgcgagtgtcgggagccggaactgggcctggaggagctcctccgccaccgctgtcagctgctgcagcagcatgaggagtaccaggaggagctggagttctgtgaaaagctgctacagacctgtttctccagcccagcggacgacagcatggatcggtgaaaccaggtggcttcttgcccccttctccgtgggaaccccaggcctcttgcctccctccccacctacaaggccctctcccaagggatcgcagggcctaggtgcctggacccagggtgtgccagcccgtctctgtgcagtccctggaaggggcgctgagaaaggcaccagctccttggaccccacctcccatgctctcactctcatccccgttctcttgtccacacagctcttccaataaaggtgtttctcttcctccttctcctccttcactgccgcctttgtcatctcctttggagggtgcatgggggacgggaggaggggcacgggtttaagggacttggggagccactggaagaataataaaagtgttgctctttatcatctaaaaaaaaaaaaaaaaaa

SEQ ID NO: 3517 - DNA, 3089 bp, Homo Sapiens
  NM_012279
aggcgcctgagaggctctctaccggtgagggtttgcggggaagatggagtatcccgcgccggccacggtgcaggccgcggacggcggagcggccgggccttacagcagctcggagttgctggagggccaggagccggacggggtgcgctttgaccgcgagagggcgcgccgcctgtgggaagccgtgtccggtgcccagccggtgggtagagaggaagtggagcacatgatccagaagaaccaatgtctcttcaccaacacccagtgtaaggtttgctgcgccttgcttatttctgagtcccagaagctggcacattaccagagcaaaaaacatgccaacaaagtgaagagatacctagcaatccatggaatggagacattaaagggggaaacgaagaagctagactcagatcagaagagcagcagaagcaaagacaagaaccagtgctgccccatctgtaacatgaccttttcctcccctgtcgtggcccagtcgcactacctggggaagacccacgcaaagaacttaaagctgaagcagcagtccactaaggtggaagccttgcaccagaatagagagatgatagacccagacaagttctgcagcctctgccatgcaactttcaacgaccctgtcatggctcaacaacattatgtgggcaagaaacacagaaaacaggagaccaagctcaaactaatggcacgctatgggcggctggcggaccctgctgtcactgactttccagctggaaagggctacccctgcaaaacatgtaagatagtgctgaactccatagaacagtaccaagctcatgtcagcggcttcaaacacaagaaccagtcaccaaaaacagtggcatcatccctgggccagattccaatgcaaaggcaacccattcagaaagactcaaccaccttggaagactagaggtgattctgcccagcatcccatattgggccagccatgagccagcttcccgtgactgctcagcccttggctccctcttgctcgttgttctcaccaggaaagtacacgggcctgaggcaggattgggccacagacagcctctcattggtccgggctaattcactcctgctgctcccctttggcaggggtcctgtaggtcatgacaggggaggcaagggtattgagagactcggggtctcgcggggtggtagtttggagggtggctttccccatttcccaacccctctgggccttaggtgctgaggcccctgccacctgtctttcctctaaaggtcagttttgggccagttcttgcaactaaagagcagagatctctctgggccctagacatttccagcaaaacctggaactttcatgccaaacctggggcagggcaggaaacagaggaaatggctgcaacatgggagcttggagctaatacgacactctgccttcccccagaaggtgcaggctttcctgagtcttagaccagatatggccagttgcgcaggtttctgccaactgtgaagtatcctcctggagcagtgacacaatcttggcggagcattgctacccccgctgccccctccacagttcctgaatggtgctaaggatctgcagcagttggcaacgagctggggctgggggcggcctccatgtccactgagatcataggacactccaatggggatgggacctttcccctcctccatcagaggtgctctgaccctaggttacacgggaaagtgccccacatgcaagtctccctgagggttctgcccctaaaggcagactgcctcatgcccgctagctgtgaggttcattgctaccctcggccctactagccctctcttcccccttgtgcagcggaccacttgcccagtttgctgtggtgctagccttccccatcatccaccgggtgatttctgggtcccagggaaagaaagagagagctgatgcaggtttctacagtgaggaacaggcgtttcccaggccccacacccagatttctctatctttgctgtgttttatggcctgggactgagtccacacggatagatttttccttgtaaccttgagacgagaattccaaggagtgtcaccatcagaggcttctcttcattgtgtcaaagaagcccctagctgctctcgtggcctccttcccccactccctatcccttcacctgtgaaatgcctttgctttgcatattgtgtgtggatgtgtgtgtgtgtgtgtgtgtgtttgtgtgtatgtgtgtgcttctgtgtgtgcctaatgctctgtctcttggtcactgaagcatccaaataaagaatttccctcatgggccagactacaacttaacagacctagggttttgagccatattgccattggatctagtatgtctgtcttgacccctcacccccaccccattcagacctcagtagtccccagtagtcactttaggagttgggacagagtcgagcaccctgtgaaagtctcccttgagttcaggtgccctgaactcagtacagcctcatcttctcatccaccaccttctcctgcttctcctgtcacatagggcctcatgaaggtctttaaagggtttaagctggggatctgctttatgtttgagagaactgttctggctgttatgtaaaggagtgcagggaggggcaggaaaggagacaaggaggccagtatggacactgtgtccagtatggctttccaggctaatcacttagggcagagacccagccttattcatctctacttcctgatgtccatagtggtgtgtcatgaatttttattgaatgaacaaatgaggtgtatgaggagagatggttttctcctgctcagctcttacacagtgataggtttgttccatgggacttatcataggcctggtgattcttgaaagagcatttttcatgactcaaaaatgagctgagaaggagtgttatggccaggtgcggcgtcatgcacctatagtcccagctgctcaggaggctaaggcagaaagaccattcaagcccaggagttccagcctgaagtatgctgtgatcatgcctgtgaataaccactgcactccagccagggcaacataacaagactctatctaaaaaaaaaaaaaaaaaa

SEQ ID NO: 3518 - DNA, 1951 bp, Homo Sapiens
  NM_012280
ggatacgtcgacaatagatgacggggctcacgttgtacgttcacatcaggtcccggcccgccggaacctgggcgatccacgatgccgagtttgccacgctgcgacagcccataggcttgcccccccgggcattcgggtggactacgaacacaaactgaagccctaggacttgtcgcccgtttgcgctctcgccgaggcacaggctgctcgcggaccaccctgctccgaaaactaagaggtaggtggtagcccattcatctggttactgatactggccggcatcagtggactgtcggcaggtccttgagcaactggtgtgtgaaatgggacggacgtcaaaggacaagcgggatgtctactaccgcctggccaaggagaatggctggcgtgctcgcagcgccttcaaactgctacaactggataaggaattccaactcttccaaggcgtgacacgggcagttgacctgtgtgcagccccaggcagctggagccaggtgctgagccagaagatcgggggccaagggtccggccacgtggtggctgtggacctgcaggctatggctccactaccaggtgtggtacagatccagggggacatcacccagctgtccactgccaaggagatcatccagcactttaagggctgccctgcggacctagtggtgtgtgacggggctcctgatgtaaccggtctccatgatgttgatgagtatatgcaggcccagctcctcctagctgctctgaacattgctacacatgtcctgaagccagggggctgctttgtggccaagatattccgaggccgggatgtgacgctcctctacagccagctgcaggtcttcttctccagcgtgctgtgtgccaagcccaggagcagccggaactctagcatcgaggccttcgctgtctgtcagggctatgaccctcccgagggcttcatcccggacctgagcaaacccctgctggaccattcttacgacccagatttcaaccagctggatggtcccacccgcatcattgtgccttttgtgacctgtggggacctgagctcctatgattcggaccgcagttacccactggacctagagggcggctcagagtacaagtacactccacccacacagccccccatctcgccaccataccaggaggcctgcacgttgaagaggaaggggcagctggccaaggagatccgcccccaggactgccccatcagcagagtggacacgtttccccagcccctggccgcccctcagtgccacaccctgctggcccctgagatggaagacaatgaaatgagttgttcaccttaacccattacgctggcaaactgatacaactcagaaactgctcaatgtcaggaaaaccggaacttgttgatgaacttgttttcaaaatatcatctcatcaacgaggcctggacaaacaagccctgaggagggatctgcaacaaccctgaagacaacaaggaaagaaaccatgaaagtctgtctgtactgcagtgggaattcttgagtgaggtcttacctcttctttaaacctcttcaggagtgtcctgattatgtccagaattttccctaaaggcagggattcttaacctggatagaagccaggggtaaccatgaacttgatggaagaaaatgttacatctttattttcagcaatgaaactgaaatttagccttactcccaagttataaatgctggcaacaaatcacagtagtaaaagcagtacctgggattttcccaccaatacaaaccagttacagcaactgtaatgtaacataaaaagggcatcttgaagtattgttcatatttgtcacctcttggaatgatagcagatcctgtaagttgatgtattaattaaaaagcccatatattactgcatctcaattttgtttcaatttaatatatagtaataattgtaattcaatgtaattggcttccattgt

SEQ ID NO: 3519 - DNA, 1465 bp, Homo Sapiens
  NM_012282
cgcgctcgccggagagctgggtgctaccgctgtttccgctgctgagccctgcccgccggccggcccgctcgctagctcgcttcccctcgcccagggggaaaggtcagcagcgtcctggagccgccgtgtcactccccgaaagccatgaactgcagcgagagccagcggctgcgaacccttctgagccgcctgttgctcgagctgcaccaccggggtaatgccagcggcttgggcgctggccctcgtcccagcatgggcatgggggtcgtgcctgaccctttcgtgggccgcgaggtgaccagcgccaagggcgacgacgcctatctctacatcctgctcatcatgatcttctacgcctgcttggccggaggcctcatcctggcctacacccgctcccgtaagctcgtcgaggccaaggacgagccgtcccaggcttgcgccgagcacgaatgggccccgggaggcgccctgaccgccgacgccgaggctgccgcgggctcccaggccgagggccgccgccagcttgcctccgaggggctgcctgccctcgcccagggcgctgagcgggtctaaaaccacagccccagattgctggttcgcgccctcctcatctcgctcatccctgggcgcgcctcccaccttccacccccaactcccttccagggttcgcctcatctgaggcccagataatggtgagaggccaggagaccttgtctggaaggccctggaaggagaagcaccaccttacccattcgggccagtttctccctcttcacccctgcgcctccacccctaccccgcacatccaactgcactaaactgcctctgctctcttgtcttcagacagccctgacagcacgctccagccctctgggaactgaatccaacacgtccaacacttggcactgaactgaagcaatgcattctatcagaactctgggccgtctaactggcagctgctccaggggctgccagggactgctcactctgcagagccaacgggcttgccaggccgactgcagcagctccagcttccagttgccttagggacagagacaaaggaaatgaagagacctcagacatcttttccctccctctctctttcagcagggagctagcaggacactaggaccagtctgtgggatagaatgaacttaatgggggacggaagggggaggagtgctcaacggggagggaaatgatctatgactccaaccgtatgattttcttgcctccccagttttcatcccagtggtaacgcctgatttttggtagctatgccatcttctgctgaggattaccattactgggtgtatcaccccagtacttccaaatgcctctcctctattgattcagttgttattgcagtgtctgcttcatccgtggaacttgaggctcagatgccccctgctctgtaaccctggggaatgtcagaggcaggtaataaaggttgtttaaacaataa

SEQ ID NO: 3520 - DNA, 7065 bp, Homo Sapiens
  NM_012288
ccccgaagttgttccgcgctgggcgggcgagcggctgtgggagagcgggcggcgggccggcgggcggaccgggccggtgctggagaagtttgcgctgcggttcgtgagcgcagggtgcgggccccgccggccgctgcgcgcccgctgccatggctttccgcaggaggacgaaaagttacccgctcttcagccaggagttcgtcatccacaaccatgcggacatcggcttctgcctggtgctctgcgtcctcatcgggcttatgttcgaggtcacagccaagactgcctttctatttattttacctcagtataacattagcgtgcctacagcagacagtgagaccgtgcactaccactatggccctaaggacctggtcacaatcttgttctacatcttcatcaccatcatcttgcatgctgtggttcaggagtacattttagataaaatcagcaaacggcttcatctctccaaagtcaaacacagcaagttcaatgaatctggacagctggtcgtctttcatttcacctcggtgatttggtgcttctacgtggtggtgacggaaggatacttaacaaacccaagaagcctctgggaagactacccgcatgtgcacctccccttccaggtgaagtttttctacctatgccagctggcctactggctgcacgcacttcctgagctatacttccagaaggtacggaaggaggaaattccccgccagctccagtatatttgcctgtacctggtgcatatagctggagcatacctcttaaacctgagccgcctgggcctgatcttgctgctgctgcagtactcaactgagttcctcttccacacggctagactcttctactttgcagatgaaaacaacgagaaactgttcagtgcctgggctgctgtttttggggttacccgcctcttcatcctcacccttgccgtgctggccattggctttggactggctcgcatggaaaaccaggcatttgatcccgagaaagggaacttcaacactttgttttgcaggctctgcgtgctgctgctggtgtgtgccgcccaggcctggctcatgtggcgcttcatccactcccagctgcggcactggcgggaatactggaatgagcagagtgcaaagcggagagtcccagccacacccagactaccagccaggctcatcaagagggaatctggttaccatgaaaatggagtggtgaaggcagagaacggaacctccccacggactaagaaactcaagtctccctaaggccaaagtgctaagaacaggaatcctcttggtgggggccgagcagggggcaaggagcccaggccccctccctgcctcctccttcctgcctgtgatgctccgtctcaaacagccgaaacctgtcttgcaatggggggagggggcgtttcgctttccttcttcttggcttcctcttattcttccacaaaccattctcaataaagccaaaaatctttctctttctccccctcaggccacctcctgtcctcactcctgtcctgtgctggcttttctggaacgccaggcgcccatggctggcacctttctgcttgctctgtctcttgccttatggctgctgcttttcctttttacttcctattttcaccttatcttgcaatttttctgtctgatttttacaatgggaggggagctaagattgcagtcctgtccttcggtcccccagggcctgccggtcagaagcctggggctggtaggcccttggtggtcctcatgtggatgggcaagaagagagcggccatctcggatcataatctccttggtgctgattaactgacgagatatatgattccagttctgcatgtaccatcttgaggcacagcagccactgctcgttgtaaatgccaaggcatttggctttgggacgtgacaactcaatccagaaggatggtgtgaactcggttgggtcccgtgactcgagctcctaccagtggctggccgcggattggaagccagcctgctgtcgctctgtggggggggacacgtcttcccactgcttagagcgagagcagagcaaactgcgcagcaggcacctccagaaaggtaatggtggcagaacccacagtggagtcgacctaggcctttctccagcagtcccagtcgccattgctttttcagccattcacaagcattcaaaaccaaaccaaacagcagttcatatacctgcctgagataggctggtcctcacctccagagccagccagccccgtcaggggccaaacttactaccttgacttcatctctagctgcagaaacactaagtctcaagggcttcagccccatgctggtcccttggtgttcagggagggtcacttggaccgctgttcatctggccgcccttgttgagtgttctttggaattgtcgttttttgagcacaactacagcattttagactgcatgaaaccatgactgactgagagtcactctctgggtagatgataggcgcctttctggccccttccctcacagattctttcccctcccctccacctgaagagaaggcctccaagtccttttggtgccttgtgaggacttttagaaggggcgttcagctttaaaaagccggtcctaattacggccggacgcagtagcttacgcctgttatcccagcactttgggaggtcgaggtgggcagatcacctgaggttaggagttcaagaccagcctggccaacatggtgaaaccccatctctactaaaaatacaaaaaattaggtgtagtggcaggcacctgtaatcccagctactcgggaggctgaggcaggagaatcgcttgaacctagaaggcggaggttgcagtgagcggagattgtaccatggcactccagcctggacaacaagagcgaaattctgtctaaaaaaacaaaagtcccaattaagaacctccgaactctgttttgaggcaaaggggagtagttcttggtaggtgcaggaatagtagtgtcatttggaatactggtcatctttctgacatcacagtagaaaccaaaccttggatttagattcaaaaggggggaaatgggtcttttcatcaaggcaactccccttctccaagtcacttacatcatagataaattttagcttcccagtaactgagggatttgtttcctaacgccattggaggccttcatccctctctacgataaggttgcagaaatgggaagagctacccgtggttgcttttgattacccttaggaagtgagacagtgtttttgaaaatatgtatttcccccatttctccctctccttccctgacacttctctgggctgcacagcagaaacgttggtaaaagggcagtttggtttcaacacagcagacctgatatgggatcccttagccactttagtcaaacagccctgacagagtctataattgagttcaggccccccaccttgcctaataactgcaaatcgcatgttcagccagcagcctcctaagcccaccttcctcccccattagagaacacccatcctaggtgctctccaggctgtgtcattggcagggcttcacatgcaggaggcctctctcaggtgagtccaggttaaactgttgagttgtggcttcaacagatatgtatggcatgctgggatgtgccaggtgcctgcgttgtgccagttgctggagaggtagtgtgagcagagcagctgaaatcttgccatcaagcaaccctcattctcatgcctgtaggtttccattgctctgtcccaggacacttgcgtgccagagacgccacaacttcatgtccctgtctcttgcaagctccccgtgctgccagtacttcatgccttggatgtggtcccaccagcccagtggccggggtcagcttaggctctgcttcccagtggacgggtgtgctaagggtttattttatgtaaaaaaaaaaaaaaaaacaaaaaaaaaccctgagaccatgagtggggctggcatcttgccagcctgggcttcagggatgtttggggggggtggttagagggtagttgtagggtactttgtcacccccctccccctgccaccctccctggcacgtttatttcacagcagagccaagtctgtggcaggttgacacagactgtgttgccagagctgaaataattccacttcatcctatgagcgtgttgggctagcttgttctaattttggccactttggctgttttcttcagttttatgcattctctcctgccccaaagtgccaagccatttgtgaaggctctgccagacacctccaagcttgagagctcagcaccatgcaccaagagcaggagaaaagacgtaaacctaccccagcaactgtggcctctcgacagccctggctaactaacttacatttgtggggaagccaacagacacagcaggaggagagggaggtggcgctggtggaccaaggatctgtgctacccgctcccctccttggaggtgcagtgatgatgggagttatttttaccatccgggcgctgatagctgcactattaataaattgcatgtgttccttttgaaggtaggggatggttctgggtgagaggggagcaggctgagccggcgggggatctgctgtcctcccttttgagtcagttctaatcccatgtgtgtctgggccaccagaccgaaatggttgctgagaaacttgtctgttcatgtcccaaggcataacttcccaacatttaagaaaccccaatagacacctctgccctggccacgttcacagatccttctcttgaccggaaaccctgggaccctaagaacccctgaagcttggggtgggtgtgtgcttctggggtctcttttgggacctcctttgtcagtaccccttcttttttctaagcagctaataagaggttgggtgaaagagtgcatctcctcccaggattccacaacaaaattcttatcttccatggatgctttaattggaagtgggttgccgacccccttgtgcctagaaaaggccttcgcttgggtttcctttgtatgcttcagccttcctagttggtttttctaggcctggtgtgagaggtagggaagtctgcacataactaattcttttgcttaagggcctatggcacaagtgcacaaacttcaattcttgatgttctaagctctctcctctaacagagggagtgctgaaagcttttgagtcaagacaatggagtgctcttcctccctcactctgccttccgagcttatggttccttttctcaggagaggattttcaggattattggaggattaggtcattgtcagatgactggaaaacctaaataggatctctctccagctcaaggttgtcccagtgaggaagactttaccaacttctcactctaccccactactcacatgagtgttagctccaccttgcaaaggctgaagaccagttctccccagtgaaagctgcctcattcttttatggagttccctggagtggcagagctataaagacgagcattgggatttgcagtctccatgtagcctttcgtgcttggcaacccctgtagactttttgtcccaagcagattgcgtgcgtgcgcctgtgtgtgagaataagtgccttactttgctgtgtggttttcaacttgtactccgtggccagcccccagttgccagggctcgacggcagccaaggacaccatacctcagtatagttatatataaaagggacacggattgtgacagtttcaccccatttgtttctaaccccgctgcccaggattagggtctgtggtgtgttctgttttgtttttggtttctcccttgtgtcagttctcttctggcccagctgggtggctgtggaagtctgtgaggtggcccaaccacaagcatacctattaagagaagcccagagcttccagcccccacttcgaaaactctcctctggccccacatagcaaactccttctccgttattttccccacccccagattttttttaaaaggcccacttgccgtaacctcttttggtctattttgcttcccattcagcccaaagtttatatgataaaggtgtttacttttacttcccagtctccaagtgctaacacataaacacatacatgtctgactgttgcagaactgttcgagctcctaattcagtgttaccttgttttagtcgcagcaaccctctcccctaccccttgcccgcccacgtttttctcactcttccgggttgtgcaataactctcccagccagtggtcctttccacagcctttctgtcccttaaaacacctgcaactgggggagaaatgggacccatgggagggggagtcgtcatcccttacacaagaaatagccactttccttttgttgtcattcttgtgatcctgggtgggtttctgtggcactcttttagaacatgtagcatcatcttagaggtctatttttaaaaaatgtgttgaagaggaaaaaaccattctcacgatggggcttaagtcattgtccaggaataagattggcgtggtgcccatgacatcaccgtcactctgcctaaaagcactctagagctacttgttcacgtggagaggaaggatattttgcgaagcaacagccgcaggtggagagccctgttcacctgatagggtctagctgtgacagtaaatataataccgctgtttccttgggtacagatttgagtgttcatgtgatgagactgtaaacctcatttttcggttcctctgtttaaaaaaacatctgaaggatgaactaaggctgctggtgccctgagcaactgataatgcaaatgtggacaaagtgtctgttttctactctagcctgttcatatggaccaaatttcaacaaggaactcaaggaaaatttgtacctgccgtatttatgctttcatgtaaaaaagggttggggggaggggtgtctttttgcttttggtgaactttttttcaaaatcatttttccactgtttctgtctggttttaaaacaaattacagttttgtatggattttttaaatgtacattttggaacaaatgatcaaatattttctgaaataacaataaaaggcagaaaattatcagaaaaaaaaaa

SEQ ID NO: 3521 - DNA, 4349 bp, Homo Sapiens
  NM_012292
gagccgcaggctgaggccgggaagggtcgggggcgaggccgcgtcgccgcctccccgaagccttttcctgttggggggagggcccgccagtgacggccgggcctgtcacgtgggcctgacagctggggagggggtggccggcgacaatgtggtcccgaagcggccagcgccgggagctgcagcgctgagacccccagcccgccccctcgggctcccggccggggccccatcatgttctccaggaagaaacgagagctcatgaaaaccccttccatctcgaaaaagaaccgcgcgggaagccccagcccgcagccctcgggggagctgcccaggaaggatggggctgacgcggtgttccccggaccaagcctggagccgcccgctgggtcctccggcgtcaaggccacagggaccctcaagcggcccaccagcctgagccgccacgccagcgcggctggcttccccctgtcgggtgctgcctcctggacactgggccggagccaccggagcccactgacagccgccagcccgggcgagctgcccaccgagggtgccggcccggacgtcgtcgaggacatctcccatctgctggcggacgtggcccgcttcgctgagggccttgagaaacttaaggagtgtgtgttgcgtgacgacctccttgaggcccgccgcccgcgggcccacgagtgcctgggtgaggctctgcgtgtcatgcatcagatcatctccaagtacccgctgctgaacaccgtggagacgctcaccgcagccggcaccctcattgccaaggtcaaagccttccattatgagagcaacaatgatctggagaaacaggagttcgagaaggccctggagacgattgctgtggccttcagtagcacagtgtccgagttcctcatgggtgaagtggacagcagcaccctcctagcagtgcctcctggggactcgagccagtccatggaaagcctgtatggaccgggcagtgagggcacgcctcccagcctggaagactgtgacgccggctgcctgcccgccgaggaggtggacgtgctgctacagcgctgtgaggggggcgtggatgccgcactgctgtatgccaagaacatggccaagtacatgaaggacctcatcagctacctggagaagcggacgacgctggagatggagtttgccaagggcctgcagaagatcgctcacaactgcagacagagcgtcatgcaggagccccacatgccgctcctgtccatctactcgctggccctggagcaggacctggagttcggccacagcatggtgcaggcggtgggcaccttgcagacccagaccttcatgcagcccctgaccctgcggcggcttgaacacgagaagcgcaggaaggagatcaaggaggcctggcaccgtgcccagaggaagctgcaagaggcggagtccaacctgcgcaaggccaagcagggttacgtgcagcgctgcgaggaccacgacaaggctcgcttcctcgtggccaaggcggaggaggagcaggctggcagcgcgccgggagcaggcagcacggccaccaagaccctggacaagcggcggcggctggaggaggaggccaagaacaaggcggaggaagctatggccacctaccgcacctgcgtggccgacgcgaagacgcagaagcaggagctggaggataccaaggtgacggcgctgcggcagatccaggaggtcatccggcagagcgaccaaaccatcaagtcggccacgatctcctactaccagatgatgcatatgcagacggcgccgctgcccgtgcacttccagatgctgtgtgagagcagcaagctgtatgacccaggccagcagtacgcctcccacgtgcgccagctgcagcgggaccaggagcccgatgtgcactacgactttgagccccacgtctccgccaacgcctggtcccccgtcatgcgtgcccggaagagcagcttcaacgtgagtgatgtggcgcggccggaggctgccgggagccccccagaagaaggcgggtgcactgagggcacacctgccaaggaccacagggccgggcgaggacaccaggttcacaagtcatggccgctctcgatctcagactcggacagtgggctggaccccggccctggcgcaggggactttaagaagttcgagcggacgtcatccagtggtaccatgtcgtccacggaggagctggtggacccagacggtggagccggggcttcagcctttgagcaggctgacctcaacggcatgacccccgagctgccggtggccgtgcccagtggaccgttccgccacgaggggctgtccaaggcggcccgtactcaccggctccggaagctccgcacgcccgccaagtgccgcgagtgcaacagctacgtctacttccagggtgctgagtgtgaagagtgctgcctggcctgccacaagaaatgtctggagacgctggccatacagtgcgggcacaagaagctgcaaggccgcctgcagctgttcggccaggacttcagccacgcggcccgcagcgcccccgacggcgtgcccttcatcgtcaagaagtgcgtctgcgagatcgagcggcgggcgctgcgcaccaagggcatctaccgggtcaatggggtaaagacacgcgtggagaagctgtgccaggccttcgagaacggcaaggagctggtcgagctgtcgcaggcctcgccccacgacatcagcaacgtcctcaagctctacctgcgtcagcttcccgagccgctcatctccttccgcctctaccacgagctcgtagggctggccaaggacagcctgaaggcagaggccgaggccaaggcggcgtcccggggccggcaggacggctcggagagcgaggcagtggcggtggccctggcaggtcggctgcgggagctcctgcgggacctgccgcctgagaaccgggcctcgctgcagtacctgctgcgtcacctacgcaggatcgtggaggtggagcaggacaacaagatgacccccgggaacctgggcatcgtgttcgggcccacgctgcttcggccacggcccaccgaggccaccgtgtccctctcctccctggtggattatccccatcaggcccgcgtcatcgagactctcatcgtccactacggcctggtcttcgaggaggagccggaggagacccccgggggccaggacgagtcatccaaccagcgagctgaggtagtcgtccaggtgccgtacctggaggcgggcgaggcggtggtctacccgctgcaggaggcggcggcggacgggtgcagagaatcccgagttgtgtccaacgattcggactcggacctagaggaggcctccgagctgctgtcctcatcggaggccagtgccctgggccacctcagcttcctggagcagcagcagagcgaggccagcctagaggtggcttctggcagccacagcggcagtgaggagcagctggaggccacagcccgggaggacggggacggggacgaggacggcccggcccagcagctctcaggattcaacaccaaccagtccaacaacgtgctgcaggccccactgccccccatgaggctccgtggcgggcggatgacactgggctcctgcagggaaaggcagccggaattcgtgtgagctggggtggggctgggaccacaggtggcttctctcttgcctgctcctgtccctccagcacgtcccctgcaccacggcatagcttaggtgcgccgtcctggggtcgctgccgagagcgcctggacttcgacgtcccaccagcgggcgcctcctcccagaggcttccaggagcacgagggccttgcggcacaggactgtgccctgtgctgtcccctgcaccccggctcagctgagctggggaacactgctgtcgtgtgaagtcacagtggccttgttggtgcccacagggctgtgtggatggaggaagctgtccctgcccagtgcatcccccaggtcatcacggggacgcaggaggcaggccctgccctgccctctcctcacaggtctgttgcagggactccagaaaccattctgggagccgtggatgggggcggagctggggtttggtgcagtttccagggtgcagtacagcagggcctgaatactggccctggactcccttttccagaacaccaggtgtggccacctggggctcaggtacacagtggggtctctcggaagccaccgtgtggttctttcacaggcacgtttattttgctgaaataaaaagtttttaatcgggaaaaaaaaaaaaaaaaaaaaaaaaaaaaaaaaaaaaaaaaaaaaaaaaaaaaaaaaaaaaaaaaaaaaaaaaaaaaaaaaaaaaa

SEQ ID NO: 3522 - DNA, 7222 bp, Homo Sapiens
  NM_012295
agccggacggcgcggtggtcgggacagactggccgttgctgtggagacgcctggagagttgtggactggggcaacctttgccagtgatgagaagtgatgctcgtggcagtgctgaatctctctgaatatgattcgaattgcagccttaaatgccagctccaccattgaggatgatcatgaaggaagctttaaaagtcacaaaacccagacaaaggaggctcaggaagcagaggcttttgcattgtaccacaaggcccttgatctgcagaaacatgaccggtttgaggagtctgccaaagcctaccatgagctcttggaggcgagcctgctgcgggaggcagtttcatccggtgatgagaaagaggggttgaaacaccctgggctgatactgaaatattccacttataagaacttggcccagctggcagcccagcgggaggatctggagacagccatggagttctacttagaggcagtgatgctggactccacagatgtcaacctctggtataagattggacatgtggccctgaggctcatccggatccccctggctcgccatgcttttgaggaagggctgcggtgcaatcctgaccactggccctgtttggataacctaatcactgtcctgtacaccctcagtgattacacaacatgtctgtacttcatctgcaaagctttggagaaggattgccggtacagcaaagggctggtcctcaaggagaagatttttgaggagcagccttgtctccggaaggactctctcagaatgttcctcaaatgtgacatgtcgattcacgatgtttcggtgagtgcagctgagacacaggcgattgtagatgaggccttggggctgcgaaaaaagaggcaagcgctgattgtgcgggagaaggagccggacctgaaacttgtgcagcccattcctttcttcacctggaagtgcctcggagagagcttgctggccatgtacaatcatctcaccacctgtgagcccccacgtcccagccttggcaaaaggattgatttgtcggactaccaggaccccagccagcctcttgagtcctccatggtggtgacgccagttaacgtgatccagccaagcactgtcagcaccaacccagctgtggctgtcgccgagcctgtggtctcctacacctctgtggctacaaccagcttcccactgcacagtcctggtctgttggagacaggcgctcctgtgggtgatatttctgggggagataaatccaagaaaggggtaaaacggaagaagatttcagaagagagtggagaaacagcaaagcggcggtctgcccgtgtccgaaacaccaagtgcaaaaaagaagagaaagtagacttccaggagcttctgatgaagttcttgccgtccaggttaagaaagctggaccctgaggaggaagatgattcctttaataactatgaagtccagtcagaagccaaactggaaagcttcccaagcattgggcctcaaaggctgtcatttgactcagccacattcatggaatctgaaaagcaggacgtgcatgagttcctgctggagaacctaaccaacgggggcatcctggagctgatgatgcgctacctgaaagccatgggccacaagttcttggtaaggtggcctccaggcttggcggaggtcgtgctcagcgtctaccacagctggaggaggcacagcaccagcctgcccaacccgctgctgagggactgcagcaacaagcacatcaaggacatgatgctgatgtctctctcctgcatggaactccagctggaccagtggctgctgaccaaaggcagaagctctgcagtgtctcctcggaactgccctgctggtatggtgaatggcagatttggacctgacttcccagggacccactgcctgggtgacctcctacagctgtcatttgcctcgtcccagcgcgacctgttcgaggatggttggctggagtttgtggtccgtgtttactggctgaaggctcgcttcctggcgctgcagggagacatggagcaggccctggagaactatgacatctgcacagaaatgctccagagttccaccgccatccaggtggaggcaggggctgaacgaagagacattgtcatccggctgcccaacctccataatgactctgtggtttccctggaggagattgataagaacctgaagtcgctggagcggtgccagtccctggaggagattcagcggctgtatgaagcaggcgactacaaggctgttgtgcatctgctccgccccactttgtgcaccagtgggtttgaccgggccaaacacctggagtttatgacttccattcctgagaggccagcccagctgcttcttctgcaggactccttgctccggctgaaggactatcggcagtgttttgagtgttccgatgtggctctgaacgaggctgtccagcagatggtgaactcaggtgaggctgccgccaaggaggagtgggtggccacagtgacccaactgctgatgggcatcgagcaggccctctctgcggacagcagtggtagcatcctgaaggtatcatcctccaccactggccttgtgcggctcaccaacaacctcatccaggtcattgactgcagcatggctgtgcaggaggaggccaaggagccccacgtctcttcagtgctaccctggatcattctacaccggatcatctggcaggaggaagacaccttccattctctgtgccaccagcagcagctccaaaacccagcggaggaagggatgtcagagacgcccatgctcccatcctccctcatgctgctgaacacagcccacgagtatttgggcagaaggtcctggtgctgcaattcagatggggctctgctgcgattctatgtgcgagtactccagaaggaactggctgcatccacctctgaagacacgcacccttacaaggaggagctggagacagccttggagcagtgcttctactgcctgtacagcttccccagcaagaagagtaaggccaggtacctggaggaacactcggcccagcaggtggatcttatatgggaggatgcactgttcatgtttgagtattttaagcccaagacccttcctgaatttgacagctataagaccagcaccgtgtctgctgacttggccaacctactgaagagaattgccaccattgtgcctcgcacagagaggccagcccttagcctggacaaagtctctgcctacattgagggaacttcaactgaggtaccctgcctcccagagggggctgacccctcccctccagtggtgaacgagctttactacctcctggctgattatcatttcaaaaacaaggagcagtccaaggccatcaagttctacatgcatgacatctgcatctgccccaataggtttgattcctgggcaggcatggctctggcccgggccagccgcattcaggacaagctgaactccaatgagctgaagagtgatgggcccatttggaagcatgccacgcccgtcttgaactgcttccgtcgggccctggagattgacagctccaacttgtccctatggattgagtatggcaccatgtcctatgccttgcactcattcgcctcacgtcaattgaagcagtggagaggcgagctgccccctgagctcgtgcagcagatggagggccggcgcgacagcatgctagagacagccaagcactgtttcacatcagcagcccgctgcgagggtgatggtgacgaggaggagtggctcatccactacatgctgggcaaggtggctgagaagcagcagcagccacccaccgtttacttgctgcactacaggcaggctggccactacctgcacgaggaggctgcccgctaccccaagaagatccactaccacaacccacctgagctggccatggaggccctggaggtgtactttcggctccatgcttccatcctgaagctcctggggaagcccgattctggggttggtgcagaggtcctggtcaactttatgaaggaggctgcagaaggaccctttgccaggggcgaggagaagaacacacccaaagcttcagaaaaggagaaggcctgcctggtggacgaggactcccactcttcagctgggacactgccgggccccggagcctccctcccctcctcctctggcccaggtctgacatccccaccttacacagccactccgattgaccacgattacgtcaaatgtaaaaaaccccaccagcaggcaacgccggacgaccgaagccaggacagcacagccgtagcactctcagactctagctcaacgcaggacttctttaatgagcccaccagcttactggaaggctccaggaaatcctacacagagaagaggctgcccattctcagttcccaagcaggagcgacgggtaaagatcttcagggggccacagaagaaagaggaaaaaacgaggagtcattggagagtacagaaggcttccgggctgcagagcaaggtgtccagaagcctgctgcagaaaccccagcctctgcttgcatccctggcaagccctcagcatccacacccaccctgtgggatgggaagaagagaggggacctcccaggggagccagtggccttcccccaggggctgccggctggtgctgaggagcagcggcagtttctcacagagcagtgcatcgcctccttccgcctgtgcctgagccgcttcccccagcactataagagtctctaccgtctggccttcctctacacctacagcaagacccaccggaacctccagtgggcccgcgacgtgttgctaggcagcagtatcccgtggcaacaactgcagcacatgccggcacaggggctcttctgcgagaggaacaagaccaatttcttcaacggcatctggcggatccccgtggacgagattgaccggccgggcagctttgcctggcacatgaaccgctccatcgtgctgctgctcaaggtgctggcccagctgcgggaccacagcaccctgctgaaggtgtcctccatgcttcagcggaccccagaccagggcaagaagtatctgcgagatgctgaccgccaggtcctggcgcagcgggccttcatcctcactgtgaaggtgctcgaagacacgctgagcgagctcgcagaggggtcagaacgcccagggcccaaggtctgtggcctccccggagccaggatgaccaccgatgtctcacacaaggccagtcctgaggatggccaggagggcctcccccagccgaagaagccccctctggctgatggctcagggccagggcccgagccaggaggcaaagtgggcctcctcaaccaccggcctgtggccatggatgcaggagacagtgcagaccaaagcggggagcggaaggataaagagagcccacgggcagggcccactgagcccatggacacgagtgaggccactgtttgccactcagacttggagcggacaccacccctgctgccaggtcgccccgcaagggaccggggccccgagagccggcccactgagctgtccctggaggagctgagcatcagtgcccggcagcagcccaccccgctcaccccagcccagccagcccccgcccccgcccccgccaccaccacagggaccagggcagggggccacccggaggagccgctctcccggctcagccgcaagaggaagctcctggaggacacagagtcaggcaagacacttctgttggatgcctaccgtgtgtggcagcagggccagaagggtgtggcctatgacctgggccgtgtggagaggatcatgtcggagacctacatgctcatcaagcaggtggatgaggaggctgcgctggagcaggctgtgaagttctgccaggtccatcttggggctgccgcccagagacaggcctcgggggacacccccaccactccaaagcaccccaaagacagccgagagaacttctttcctgtgacagtggtgcccacagcccctgaccctgtgccagctgactctgtccagcggcccagtgatgctcacaccaagcctcgccctgcactagctgccgccacaactattatcacctgccctccgtcagcatcagcttccaccctggaccagtccaaggaccctgggcctccccggccacacaggcctgaagctacccccagcatggcctctctgggcccagagggagaagagctggcgagagtggcagagggcaccagcttcccgcctcaggagccacggcacagtccgcaggtgaagatggcccccacaagttccccggcagagccacactgctggccggcagaggctgccctgggcacaggcgctgagcccacctgcagccaggaggggaaactgaggcctgagccgagaagggatggggaggctcaggaggctgcgagtgagactcagcccctgagctctcccccaacagctgccagctccaaggcccccagcagtgggagtgcccagccaccagagggtcacccaggcaagcctgagcccagccgggctaagtcccgccccctgcccaacatgccaaagctggtcatcccctccgccgccaccaagttcccccctgagatcaccgtcacgccacccaccccaaccctgctctcccccaaaggcagcatctcggaggagaccaagcagaagctgaagtcagccatcctttctgcccagtctgctgccaacgtgaggaaggagagcctatgccagccagccctggaggtcctggagacatccagccaggagtcctcgctggagagcgagacagacgaggacgacgactacatggacatttgaggggccactgcagccccaccgccacgccccaggggaccagccaggcctggaatgccccctgggcaggaccctgggcaggaccagaggcccacatggatgccactccccacacagcccccaggcctgcccagcccacctcctcatggcatcctccctgtacccaggtcaggctgtccacaccacatgggagcccagaggaggaggggcccgccttagccatgtgaaggtggattggtcgccatctgcacgccaggcggcatccttttctatgaagtgttgactttgtaaatctgcccacacccagctggccatatccacccctcgacgccgggatgagccggctctgcctgtgtcacagtggaggggtcctttagggccaggctcacccctcaccctttttttggttgcttttctaataaagatggaacagtt

SEQ ID NO: 3523 - DNA, 4275 bp, Homo Sapiens
  NM_012297
acattccattcgcgctccgcggcgcgaggcaatcgtccggtgtgtgagcccgggagccggaggtgtagcggcagagacattgttcttgccggctccctacggtgccgtgtgtgcgtgagagaagaccagtctttcctctagcatttgacattgtgcagcaaagaaatggttatggagaagcccagtccgctgcttgtagggcgggagtttgtgaggcaatattatactttgctgaataaagctccggaatatttacacaggttttatggcaggaattcttcctatgttcatggtggagtagatgctagtggaaagccccaggaagctgtttatggccaaaatgatatacaccacaaagtattatctctgaacttcagtgaatgtcatactaaaattcgtcatgtggatgctcatgcaaccttgagtgatggagtagttgtccaggtcatgggtttgctgtctaacagtggacaaccagaaagaaagtttatgcaaacctttgttctggctcctgaaggatctgttccaaataaattttatgttcacaatgatatgtttcgttatgaagatgaagtgtttggtgattctgagcctgaacttgatgaagaatcagaagatgaagtagaagaggaacaagaagaaagacaaccatctcctgaacctgtgcaagaaaatgctaacagtggttactatgaagctcaccctgtgactaatggcatagaggagcctttggaagaatcctctcatgaacctgaacctgagccagaatctgaaacaaagactgaagagctgaaaccacaagtggaggagaagaacttagaagaactagaggagaaatctactactcctcctccggcagaacctgtttctctgccacaagaaccaccaaaggctttctcctgggcttcagtgaccagtaaaaacctgcctcctagtggtactgtttcttcctctggaattccaccccatgttaaagcaccagtctcacagccaagagtcgaagctaaaccagaagttcaatctcagccacctcgtgtgcgtgaacaacgacctagagaacgacctggttttcctcctagaggaccaagaccaggcagaggagatatggaacagaatgactctgacaaccgtagaataattcgctatccagatagtcatcaactttttgttggtaacttgccacatgatattgatgaaaatgagctaaaggaattcttcatgagttttggaaacgttgtggaacttcgcatcaataccaagggtgttgggggaaagcttccaaattttggttttgtggtttttgatgactctgaaccagttcagagaatcttaattgcaaaaccgattatgtttcgaggggaagtacgtttaaatgtggaagagaaaaaaacaagagctgcaagagagcgagaaaccagaggtggtggtgatgatcgcagggatattaggcgcaatgatcgaggtcccggtggtccacgtggaattgtgggtggtggaatgatgcgtgatcgtgatggaagaggacctcctccaaggggtggcatggcacagaaacttggctctggaagaggaaccgggcaaatggagggccgcttcacaggacagcgtcgctgaagctccactgttggcaaagtcttggcagtggtacattattcatcgtgtttgcattcttgttaattttttttttggctttggaatgtgacacagcctttttgatcatttctttgatgtgaaaagcatctttggttatcagttaaattgaggtggacattatttccccaatttcacaacaggattcacattgttaatttataaatctagacttggagaattaaggactgagaaatgaccatatcttaaactatctacgacaaagtgaacttaaaaggacatgcccactgaattcaggtcctttgagtaaaaaaaaaatcttctgctgcacattttgtttaagtgttactgtttctgcctgttaatgctgggaacacaaatagtgcaatttgtgcaattggagaatcttgccttttttcttggctccccccaaaaatacaaaccaacagaaacttgttatgcactcatcaaaatgtactaatgggtactctgaactcattaacattgacatctgcaacaggaggcaacagggaaaaaatctcatcttcttttccagtagaaaatagtttgtgaaatgatgagggcattttatctgcttgctgtgaccagcgtgtgtacacataaaccttaacaagactacaagtatattccagaaggaaatcattttagttatgaactaaataataaaaattagaacttcaaatgcgatggtcttgactattagaccagatttagtagctccatatctaagatttttctacctgcccctcttcagtacagggatggctggctgctcaacacactcctcctccccttttttcctttctttaagctgtgtacagtgaaaattgtctttactgtatttttgttctctggtaatgtaataagcatgatggtgccttctattaatacatcattccagtcttgctggtaattttgtacagtatagtgtatgaattgctgtgctgcaaagccaaacagctgcaaaatgttgaaaaatcatcgaaatgtataaaaattgcagtatctttaaaatcagtaaaatggactagcatattatttatcttgttcttcagttaacaactttgtgttctctgtgggagggagggagtcctgtgtgtttgtggggagagggaaggaggaagtcagttatttgagtaagcctctagttgacttttctcttagcctgaatgtggacgttgaaacatatcacttcagggcttggaaaagtcagtcaacttgacgtacatttttagtgacattttaaaagcagtcagattctataaatggcaagtaagcctgaagtgaggatactgcaattttcggagaaaagaacagcagctctttaagtgtttgcattttctatttggggggcagggaactgtcattcattttgcacaattcttgaactgatgtcagcacccgagtggctcctgaatttaagtctgggacgacatcttttatttttacatgaatctttaaacaattctgtgagcaaagtttgtagctgctggattattgtctgtctttatagcaagttccagtaaaccacaagtatggcaaagcttatccaattttatgcttggagcagtcagtacataccagtttctgatgtttcaggcaggagtggggtaaataagtgtgaccacttaaagctgctcgttagcatggaagacttctccattctatctttgtaaaacagacaagatatgcacttgacatagtagcaaattggttctgaattatgcaactgtttgctatttagtaaactagcaaatgatgcatgtattttgtttttcatgtactgggcaatatgagtaaaatctgtccctttttccccctttgaatgaggtcttccatgtttgagggaaagtcttgcactattgcatatattttggggacacagattttcatagtttccatttttggggggcttaaggattttttttttttctgtttgaaacagttttatactttctgatatagtacttgaaattcttaccagaaaattactttggagttttgaagcctttattaatactacttttaaagaagcagttgttttattgtcaatgttttttttcccccaagcatattttcttgtatttctgtttccatatatatatatatatatataatttccaattcaggatattgccctgccatccatgaaaactgttctggcaccaaaagtaatgacaaatgttaagtgtaataatagaaaagtagagcaaagagccattcagcttcagtctttacataccatgaataaaacattaaaacatcatatggagaagtttacatggtgattgttcacctgcagtactgtggagttttaacattttgtcctcttttcagtgaaacagagtaaaaatattcatctaccattactgttatttgctgattttgttttattttttgatggtaatattctatccttatgacactattgcaaccaaattggctttaccatcttggctttagtaggtatagaagacaatggattaccatctttattgctgtaatgtgttaagcattatatgctagtagaatctagtttaattgtttcaggtggaaagtattctttgagtttccatattgaatgtgtttggactaaacaaacaataaactactgatgtctgcagcatttatctatgtccctaa

SEQ ID NO: 3524 - DNA, 4616 bp, Homo Sapiens
  NM_012305
gcgccgtacgtgcgcgcgcgcggcggcccagaaagcggcgctgggaccctgaggcggccgtggttaggcggctccccggcggctcctccgcggcggtgacggcgaccgcactccccgcttcccgctccccgcgctcctccgcccgggtccgccagccgaggccgctcccgagcgtcggaagatgccggccgtgtccaagggggacgggatgcggggcctggcggtcttcatctcggatatccgcaactgtaaaagtaaagaagcagaaataaaaaggataaacaaggaactggcaaatatcagatcaaaatttaaaggtgacaaggctcttgatggctatagtaaaaaaaagtacgtctgcaagttgctcttcatctttctccttggtcatgacattgactttggacacatggaggctgtgaacctgctgagttcaaacagatacacggaaaagcagatcggctaccttttcatctctgtgttggtgaactcaaacagtgagctgatccgcctgatcaacaacgccatcaagaatgacctggccagccgcaaccccaccttcatgggcctggccctgcactgcatcgccagcgtgggcagccgggagatggccgaggccttcgccggggagatccctaaggtcctcgtagccggagacactatggacagcgtgaagcagagcgcggccctgtgcttgctgcgcctgtacaggacgtcccccgatcttgtccccatgggcgactggacatcccgagtggtgcacctgctcaatgaccagcacttgggtgtggtaactgcagccacaagtctgatcaccactttagcacagaagaacccagaagagtttaaaacctccgtgtctctggctgtctctaggctaagcagaatcgtgacgtctgcatccacagatctccaggattacacttactattttgtcccggctccctggctgtctgtcaaactgctgagactgctgcagtgctacccacccccagaccctgcagtgcgaggccgcctgactgagtgcctggagaccatcctgaacaaagcccaagaaccgcccaagtcgaagaaggtccagcactccaacgcgaagaatgccgtgctcttcgaggccatcagcttaatcattcaccatgacagtgagccgaacctgctcgtccgtgcctgcaaccagttgggccagtttctgcagcaccgcgagaccaacctgcgctacctggccctggagagcatgtgcacgctggccagctctgagttctcccatgaggctgtcaagacgcacatcgagacggtcatcaacgccctgaagactgagcgggacgtgagcgtgcggcagcgggccgtggacctcctctacgccatgtgcgaccgcagcaacgccccacagatcgtggccgagatgctgagctatctggagacagctgactactccatccgagaagagattgtgctgaaggtcgccatcctggctgagaagtacgcggtggactacacctggtatgtggataccatcttgaacttgatccgaattgctggtgattacgtgagtgaagaggtgtggtaccgagtcattcagatcgtcatcaaccgggacgacgtgcagggctacgcggccaagactgtgttcgaggctcttcaggctcccgcgtgccacgagaacctggtcaaagtgggcggctacatcctgggggagtttggaaacttgatagctggagacccgagatccagcccgctgatccagttccacctgctgcactccaagttccacctgtgcagcgtccccacccgcgcgctgctcctgtccacctacatcaagttcgtgaacctcttcccggaggtgaagcccaccatccaggacgtgctgcgcagcgacagccagctcaggaacgcagacgtggagctgcagcagcgtgctgtggagtacctgcggctcagcaccgtggccagcaccgacattctggcgaccgtgctggaggagatgcccccattcccggagcgggagtcctccatcttggcaaagctcaagaagaagaagggccccagcacggtgacagacctggaggacaccaagcgggacaggagtgtggacgtgaacgggggtcctgagcctgccccagccagtaccagcgccgtgtctacgccttctccgtcggcagacctgctgggtctcggggctgccccccctgcccccgcgggccccccaccctcctccggcggcagcgggctgctcgtggacgtgttctcagactcggcctctgtggtcgcgcctctcgctcctggctccgaagacaactttgccaggtttgtttgtaaaaacaatggtgtgttgtttgaaaaccagctgcttcaaattggacttaagtctgaatttcggcagaatttaggtcggatgtttatcttttatggtaataagacctccacgcagttcctaaactttaccccaacactaatctgttcagacgaccttcagcctaacctgaacctgcagaccaagcccgtggacccgaccgtggaggggggcgcgcaggtgcagcaggtggtcaacatagagtgcgtgtccgacttcacggaggcgccagtcctcaacattcagttcaggtatgggggcaccttccagaacgtgtctgtgcagctgcccatcactctcaacaaattcttccagccgacagaaatggcttctcaggatttctttcaacgttggaagcagttgagcaatccacagcaggaagtgcagaacatcttcaaagcaaagcacccaatggacacagaagtcaccaaagccaagatcattggatttggttctgcacttcttgaagaagttgatcctaatcctgcgaatttcgtgggagctggaatcatccacacgaaaaccacccagattggatgcctgctgcgcttggagccgaacctgcaagcccagatgtaccggctcacgctgcgcacaagtaaggaagccgtttctcagagattatgtgaattgctctcagcgcagttttagtcctgaggatggaagaccaggctcgtgtgtcttgtgttgtcttcgtctgtgccgtttgtcttcgtggccatcctgcagatgagcaccgtgtccagtgccacagcacaaggcgcctccccgccccgccgccccacacctctcccctttgggctggacgggaacacacgtgtgtggctcaggaggaaaagctcagcctggactgtggcagccacggcagaaggtggatcttgggatcaatttttataaaaatcgagacagttctgtggttaaatctacaaattaaagggaaattagaagttggcgtgaacgtggcgtttgtgggagtgtcactgagatggcccgtgctgccgcccaccccgcctcggagcctctgggagcagcagtgccactgtgcatggcgtgggctgagccttggtgtgtggccgtcctggtggctgcacacctggcgtcgtcctgggcccttgggaggagcacagctgaccctggttttgctgcagtcccagctggactgttttcccaggcaggattttaatctagaatttagaaacatttgtatttgtaatgacttctggcaaaagcacgtgtcctggccggatgtaactgttctcctttcccagctcctgtttgtgaagggcgtctgttatgctcctgcagtcgccgaggccttggatgtgcagccaggggaggagcgtcctgccggccccgcagggcccccaggactccagggtaaagtgtgggccggtggcgcaagactcagaggtgtgctcgtctctttcctgtcagagtgggcgtccccaggccacggtgcaggcctgagtccttccaccggccccgtccagtcgtccctggaggggctgtggaggagggacgcctctgtgtggtcaggaagtgaaggggccattggccgcatgccatgtgccacctgcggcttgtgtctcacctgtcatctggactcagcacccaggctgcacgtctgacacctgagaggcgagagagtggggccggcctaggagccaaggctggggccttgcgctctgtccccaggatggtggccttgtttgtcctaaacacacccagcacaggttctggcttcctgacatgctgtggaggcagggagggtgggtggccacatgtgcttgagggttttcaccctggccctcagttgcctgctgtgcgggtccctggggcagctgcaggggctcatggacccatcagggtctccacagctcccctgcagtgtgtgcaccccacaatgtctgcggctcttcttccggcgtgtcgggctttgatcacagcatagccacgtcagtggcgtgcgcctctcgcacaggccattctgggtctggtggtgccaggtgccgtgacacgccgtgctgggcttgtgctgcagctgggtggtgtggccctcattctcatgttccagctgctgggcagtgctctgcctgtgtgctgcgcctgcaggctgcgtgtgctgccgtggatctcctgcatcccttgacccctcccgccatcagaggaaaggctgctccccgaggcaccgcttccctgtgcggcgctgcagaggggccctcagtgtggcactcctcgtcaaagaaaaataaaggctagaactgca

SEQ ID NO: 3525 - DNA, 4446 bp, Homo Sapiens
  NM_012307
cgcaccgccgccgaggacgcgcgcccgagcctagtccccacgccgcggcgcgcccgggctccctgctgatcccagaacaatcaaccatgacgaccgaatctggatcagactcggaatccaagccggaccaggaggccgagccccaggaggcggcgggggcgcaggggcgcgcgggggcgcccgtgccggagccgcccaaggaggagcagcagcaggccctggagcagttcgccgccgctgcagcgcacagcaccccggtgcggagggaggtcactgacaaggaacaggagtttgctgccagggctgcaaaacagctcgaatatcagcaattagaagacgataaactttctcagaaatcatctagcagtaaactctctcggtctccattaaagattgtcaaaaagcctaaaagcatgcagtgcaaagtgatacttctcgatggatcagaatatacctgtgatgtagagaaacgctccagaggacaagtgctgtttgataaagtgtgtgaacacttgaacttgctagagaaagactactttgggcttacgtatcgagatgctgaaaaccagaagaattggttggaccctgctaaggaaataaaaaaacaggttcgaagtggtgcttggcacttttcatttaatgtgaaattttatccaccagaccctgcccaactatctgaagatatcaccaggtactacctctgcttgcagttgcgagatgacatcgtgtccggaaggctgccctgctcctttgttaccctggccttgctgggctcctacactgtccagtcagagctcggagactatgacccagatgaatgtgggagcgattacattagtgagttccgctttgcaccaaaccacactaaagaactggaagacaaagtgatcgagctgcacaagagccacagaggaatgacgccagcagaagcagagatgcatttcttggaaaatgccaaaaaattatcaatgtatggggtagatttacatcatgctaaggactcagaaggggtagaaattatgttaggagtttgtgcaagtggtctgttgatatatcgcgaccggctgcgaataaacagatttgcctggcccaaggttctaaagatttcatacaaacggaacaacttttacattaagatccggccgggagagtttgaacaatttgaaagcaccattgggtttaagctgccaaaccatcgagctgccaagcgtttatggaaagtatgtgttgagcatcatacatttttcagactactgttaccagaagcacctcccaagaaattcctaaccttgggttccaagtttcgttatagtggcaggacacaagcgcaaacgagaagagccagtgcgttgatagatcgcccagcaccttactttgaacgctcatccagcaaacgttataccatgtctcgcagcttggatggagaggttggtactggccagtacgccacaacaaaaggcatctctcagaccaacttgatcaccactgtgactccggagaagaaggctgaggaggagcgggacgaggaagaggacaaacggaggaagggggaagaagtcacgcccatctcggccatccggcacgagggaaagtcacctgggcttggcactgactcatgtcccttgtcacccccatccacccattgtgcccccacatctcccacagagctccgtaggaggtgtaaggagaatgactgcaaactgccaggttatgagccgtccagagctgagcacctgcctggagagcccgccttggactctgatggcccagggaggccttacctaggggatcaagatgtggcttttagctacagacagcaaactggcaaggggaccaccctgttctccttctccttgcagctccctgagtcattcccctccctcctagatgatgatggatacctctctttccccaacctttctgaaaccaacctcctgccccagagcttgcagcattacctcccgatccgctcaccgtcccttgtgccctgtttcctcttcatctttttctttctgctgtctgcctccttctcagtgccatacgctctcactctctccttccctctggctctgtgcctctgctacctggagcccaaggcggcctccttgagcgcctccctagacaatgacccgagtgacagttcagaggaagagactgacagtgagcgcacggacaccgcagccgacggggagaccaccgccactgagtcggaccaggaggaagatgcagagctcaaggcacaggagctagaaaaaactcaagatgacctgatgaaacatcaaaccaacattagcgagctgaaaagaaccttcttagaaacctcaacagacactgccgtaacgaatgaatgggagaagaggctttccacctcccccgtgcgactggccgccaggcaggaggatgcccccatgatcgaaccacttgtccctgaagagactaagcagtcttctggggaaaagctcatggatggctctgaaatcttcagtttattagagtctgcgcgaaaaccaacagaattcataggaggggttacttctacttctcaaagctgggttcagaaaatggaaaccaagacggagtccagtggaatagagacggaacccaccgtgcaccacctgccgcttagcactgagaaggtggtgcaggagaccgtgttggtggaggagcggcgtgtggtgcacgcgagtggggatgcttcttactcggcgggagacagcggggatgctgcagcacagcccgcattcacaggcattaaagggaaagagggctctgccttgacggagggggctaaagaggaaggaggggaggaggtcgctaaagctgtcctggaacaggaagagacagccgctgcttcccgtgagcgacaagaggagcagagtgcagccatccacatttcagaaactttggaacaaaaacctcattttgagtcctcaacggtgaagacggaaaccatcagttttggcagtgtttcaccgggaggagtaaagctagaaatttccacgaaggaagtgccagtagttcacaccgaaaccaaaaccatcacatatgaatcatcacaggtcgatccaggcacagatctggagccaggcgtgctgatgagtgcacagacgatcacatctgaaaccaccagtaccaccaccactacgcacatcaccaaaactgtgaaagggggcatttcagagacaagaattgagaagcgaatagtcatcacgggggatgcagacattgaccatgaccaggcgctggctcaggcaattaaagaggccaaagagcagcaccctgacatgtcagtgaccaaagtagtggtccataaagagacagagatcacaccagaagatggagaggattgaccagaggaataacttagcttgcacatgaatgcagtcatgcaaaccgttaggaaaaccagagcctatatggagttccctcttctaacccaactgacttgtatctgtccgtggaaaatttcagtccagaagaattgaccttgaccattaataaagacactggcagagagatcttcccataataaagcaatctgattcagcatcactaaaccgataatgcatgaagcaacgataaaattacaaaagagcagcatttttaattttcacaaaatgtctcagttttcagctatacctgcacgttcataaccaacaatataaaccgtggtctcatgtaacacataaacaattcatgcctttcatagtttattattattaaagtctaaacaaaattgcaatttcttaggtaaccttatatttacaataaatgaagattaccctcaaatgctagaagctgtctaggtccgtccggtgtgtcagattttcctcagattagatgtgccaataaccaagtttattcagtaaacaacttgtacttgtttcatctggttttattactctcacccataaacagtaatgactctctgaccctctggaaatatgtaatgcttccaatcttgctttgtgtatctcatttaatttgttataaggtagtactgattttagcatattaatgcgatttcttccttgttgtttgctttggtctgtgttcaatccagagagcttaaattgtcattattttgggaagaaaacctgtatttttgttagtttacaatattatgaaatttcacttcaggagaaactgctgggcttcctgtggctttgttttcttagttactttttccgtgccgtgtattttttaattgatttttcttcttttacttgaaaagaaagtgttttattttcaaatctggtccatatttacattctagttcagagccaagccttaaactgtacagaatttccactgtaattaaaactatttagtgttagttataaatagccttcaaaaagagagattctccattacacgatcacctgcatcacagcccatggtgaatgtatgtttctgcatagcgaaataaaaatggcaaatgcactg

SEQ ID NO: 3526 - DNA, 1388 bp, Homo Sapiens
  NM_012317
ctggccaccaagcgcctccgtggacacgcacttcctgcgaggcctccgtgcgcaccttggccgagccgaaccgagccgagtcctgtccttccaggccgttcgcaatggtggatgagttggtgctgctgctgcacgcgctcctgatgcggcaccgcgccctgagcatcgagaacagccagctcatggaacagctgcggctgctggtgtgcgagagggccagcctgctgcgccaggtacgtccgccgagctgcccggtgcccttccccgaaacgtttaatggcgagagctcccggctccccgagtttatcgtgcagacggcgtcttacatgctcgtgaacgagaaccgattctgcaacgacgccatgaaggtggcattcctaatcagcctcctcaccggggaagccgaggagtgggtggtgccctacatcgagatggatagccccatcctaggtgattaccgggccttcctcgatgagatgaaacagtgctttggctgggatgacgacgaagacgacgacgacgaagaagaggaggatgattattaggccctcgaccctcgggcctcgggggggagggccctgcacgccgccaccccctccccgcagccctcaccccgccaggagccactgctctcccccttgccctccggtccccttacctacccgcgcccgtctgctctctctcttcatttctccgtagtgcttgtctttgttccaggaatagcgctccagttacctgctgctggggtcggggctggagcctcactcactcggaagtgcttggaagtgtcatctaccctggccatccccgggatccctcccctgctaatctgaactgtgtcctgaaccccagctattggccaggcccctgttacaaactgcgcagaccacccatagccctgctgctgccacctgccctgctgccaggcttacatcttcccagagaactatgctgccacttcacatccactcaccacatcccacctacagactaccacctttcgagatcaggaccaacctggaaaatgccagagttggctatgccttttcagacattgatttggacagctcaccaacccctgaaggggccgttcagcctggttagttttctacctactccgagtgtcctcccctgccccaccagattgctgcaggggcgcggtgtgcctggcagccaaattgttgacacttcttttttcctatgcactggttttacacagctgtcatttttctttcaaaattgcagcagtcccacagatgtgtgcatttggacaaatagtacttaaaaacaaaacaaacaagcactcagcccagctcctcaatactacctggaaaaagcattggcattattttcaataaatatcaagcactaaaaaaagaaaaaaaaaa

SEQ ID NO: 3527 - DNA, 3637 bp, Homo Sapiens
  NM_012319
agtcctgggcgaagggggcggtggttccccgcggcgctgcgcgcggcggtaattagtgattgtcttccagcttcgcgaaggctaggggcgcggctgccgggtggctgcgcggcgctgcccccggaccgaggggcagccaacccaatgaaaccaccgcgtgttcgcgcctggtagagatttctcgaagacaccagtgggcccgttccgagccctctggaccgcccgtgtggaaccaaacctgcgcgcgtggccgggccgtgggacaacgaggccgcggagacgaaggcgcaatggcgaggaagttatctgtaatcttgatcctgacctttgccctctctgtcacaaatccccttcatgaactaaaagcagctgctttcccccagaccactgagaaaattagtccgaattgggaatctggcattaatgttgacttggcaatttccacacggcaatatcatctacaacagcttttctaccgctatggagaaaataattctttgtcagttgaagggttcagaaaattacttcaaaatataggcatagataagattaaaagaatccatatacaccatgaccacgaccatcactcagaccacgagcatcactcagaccatgagcgtcactcagaccatgagcatcactcagaccacgagcatcactctgaccatgatcatcactctcaccataatcatgctgcttctggtaaaaataagcgaaaagctctttgcccagaccatgactcagatagttcaggtaaagatcctagaaacagccaggggaaaggagctcaccgaccagaacatgccagtggtagaaggaatgtcaaggacagtgttagtgctagtgaagtgacctcaactgtgtacaacactgtctctgaaggaactcactttctagagacaatagagactccaagacctggaaaactcttccccaaagatgtaagcagctccactccacccagtgtcacatcaaagagccgggtgagccggctggctggtaggaaaacaaatgaatctgtgagtgagccccgaaaaggctttatgtattccagaaacacaaatgaaaatcctcaggagtgtttcaatgcatcaaagctactgacatctcatggcatgggcatccaggttccgctgaatgcaacagagttcaactatctctgtccagccatcatcaaccaaattgatgctagatcttgtctgattcatacaagtgaaaagaaggctgaaatccctccaaagacctattcattacaaatagcctgggttggtggttttatagccatttccatcatcagtttcctgtctctgctgggggttatcttagtgcctctcatgaatcgggtgtttttcaaatttctcctgagtttccttgtggcactggccgttgggactttgagtggtgatgcttttttacaccttcttccacattctcatgcaagtcaccaccatagtcatagccatgaagaaccagcaatggaaatgaaaagaggaccacttttcagtcatctgtcttctcaaaacatagaagaaagtgcctattttgattccacgtggaagggtctaacagctctaggaggcctgtatttcatgtttcttgttgaacatgtcctcacattgatcaaacaatttaaagataagaagaaaaagaatcagaagaaacctgaaaatgatgatgatgtggagattaagaagcagttgtccaagtatgaatctcaactttcaacaaatgaggagaaagtagatacagatgatcgaactgaaggctatttacgagcagactcacaagagccctcccactttgattctcagcagcctgcagtcttggaagaagaagaggtcatgatagctcatgctcatccacaggaagtctacaatgaatatgtacccagagggtgcaagaataaatgccattcacatttccacgatacactcggccagtcagacgatctcattcaccaccatcatgactaccatcatattctccatcatcaccaccaccaaaaccaccatcctcacagtcacagccagcgctactctcgggaggagctgaaagatgccggcgtcgccactctggcctggatggtgataatgggtgatggcctgcacaatttcagcgatggcctagcaattggtgctgcttttactgaaggcttatcaagtggtttaagtacttctgttgctgtgttctgtcatgagttgcctcatgaattaggtgactttgctgttctactaaaggctggcatgaccgttaagcaggctgtcctttataatgcattgtcagccatgctggcgtatcttggaatggcaacaggaattttcattggtcattatgctgaaaatgtttctatgtggatatttgcacttactgctggcttattcatgtatgttgctctggttgatatggtacctgaaatgctgcacaatgatgctagtgaccatggatgtagccgctgggggtatttctttttacagaatgctgggatgcttttgggttttggaattatgttacttatttccatatttgaacataaaatcgtgtttcgtataaatttctagttaaggtttaaatgctagagtagcttaaaaagttgtcatagtttcagtaggtcatagggagatgagtttgtatgctgtactatgcagcgtttaaagttagtgggttttgtgatttttgtattgaatattgctgtctgttacaaagtcagttaaaggtacgttttaatatttaagttattctatcttggagataaaatctgtatgtgcaattcaccggtattaccagtttattatgtaaacaagagatttggcatgacatgttctgtatgtttcagggaaaaatgtctttaatgctttttcaagaactaacacagttattcctatactggattttaggtctctgaagaactgctggtgtttaggaataagaatgtgcatgaagcctaaaataccaagaaagcttatactgaatttaagcaaagaaataaaggagaaaagagaagaatctgagaattggggaggcatagattcttataaaaatcacaaaatttgttgtaaattagaggggagaaatttagaattaagtataaaaaggcagaattagtatagagtacattcattaaacatttttgtcaggattatttcccgtaaaaacgtagtgagcacttttcatatactaatttagttgtacatttaactttgtataatacagaaatctaaatatatttaatgaattcaagcaatatatcacttgaccaagaaattggaatttcaaaatgttcgtgcgggtatataccagatgagtacagtgagtagttttatgtatcaccagactgggttattgccaagttatatatcaccaaaagctgtatgactggatgttctggttacctggtttacaaaattatcagagtagtaaaactttgatatatatgaggatattaaaactacactaagtatcatttgattcgattcagaaagtactttgatatctctcagtgcttcagtgctatcattgtgagcaattgtcttttatatacggtactgtagccatactaggcctgtctgtggcattctctagatgtttcttttttacacaataaattccttatatcagcttgaaaaaaaaaaaaaaaaaa

SEQ ID NO: 3528 - DNA, 1167 bp, Homo Sapiens
  NM_012321
cccgccctactccgcgtggattggttgaccgcccttcgagcccggtgctgactggcttgcgtctctgccactttctttcagcttagtggcgcgcggcgcggcgacgaccgccgggagcgtgtgcagcggcggcggcggaagtggccggcgagcccggtccccgccggcaccatgcttcccttgtcactgctgaagacggctcagaatcaccccatgttggtggagctgaaaaatggggagacgtacaatggacacctggtgagctgcgacaactggatgaacattaacctgcgagaagtcatctgcacgtccagggacggggacaagttctggcggatgcccgagtgctacatccgcggcagcaccatcaagtacctgcgcatccccgacgagatcatcgacatggtcaaggaggaggtggtggccaagggccgcggccgcggaggcctgcagcagcagaagcagcagaaaggccgcggcatgggcggcgctggccgaggtgtgtttggtggccggggccgaggtgggatcccgggcacaggcagaggccagccagagaagaagcctggcagacaggcgggcaaacagtgagcgcccacccagaccggctgctgcgccccctcctgccagggtggcgattccgctccacagtctcggacggatctgctcagaaaggaagaggcaggcgccagggggaacccccttcgtgttttgtgaccctcccttttaggtgaagcccctttttcttgctaaaaccggcaattctccggttagaaatgttacttggtgttttttggttttgtgaaacggccgtcccaaaactggctggattcctagaagagtctgtgttgaaggcatctttcaagccctcgctctggttctcagggcagcattttccaggcgggtttgttttgcatttcttggagcctctccgagcagcaaccagacgggagatttttattttaagctgttcatgctgggactgacagcctgcagggtttccttgggcgcggccccaaaattgccttcaaaacaaacccgggacggttgaaagccttcgaaccgtgcaggggatgcctcgggccctggcccttcgcttcctctcttgtgttatggaaataaaaacaaataaaactacacactgcacaaaaaaaaaaaaaaaaaaaa

SEQ ID NO: 3529 - DNA, 2450 bp, Homo Sapiens
  NM_012323
cgggtcggtgacgtcaccgcatgactgggtttttatgaatgaaaggaatcctgtgagtgagtaattccgggaagctcgccttacaactccgcgcggcctcggccccctgcgccgcccgccccacaacaaaactcagcgcagcgctcccgggcgcccggttcagagcgacctgcggctcagagcggaggggagactgaccggagcgcggatcgggacagcggccgggacagcggcgagacgcgcgtgtgtgagcgcgccggaccaagcgggcccagaagcgggtctgcagcccagagggcaccttctgcaaacatgtctgtggatcccctatccagcaaagctctaaagatcaagcgagagctgagcgagaacacgccgcacctgtcggacgaggcgctgatggggctgtcggtgcgcgagctgaaccggcatctgcgcgggctctccgccgaggaggtgacacggctcaagcagcggcgccgcacactcaaaaaccgtggctacgccgccagctgccgcgtgaagcgcgtgtgccagaaggaggagctgcagaagcagaagtcggagctggagcgcgaggtggacaagctggcgcgcgagaacgccgccatgcgcctggagctcgacgcgctgcgcggcaagtgcgaggcgctgcagggcttcgcgcgctccgtggccgccgcccgcgggcccgccacgctcgtggcgccggccagcgtcatcaccatcgtcaagtccaccccgggctcggggtctggccccgcccacggcccggaccccgcccacggcccggcctcctgctcctagtgcccgcccccgccatgcctcagccacgcccctccggcctcagctccctccccaaagtgcctgagcgccgcctctgtgcccaggtcccatttctctgcagcactggccccttggtgcacacacattcccttcgtgggccctgtcttcctcttgcagccccccaaactgggaccgaatgaccctgggaaggggaacttgggtaggttggggatggggcagaggtctggatctgggatcgcccttggctgaaagtttagcctttttagattgagagatacagagccggcttagagaacagctgttgggggagaagagggcacccctcatcttggaaactgctcttattgtgccaatatgccctccaaaccctcccaggattcaaagctaggtttggctgtctgtgacttacgggaccgtcctgctgagaaattgcactgaagagatgcccccacctctggttgggcctgggggtgcctggccttccgaaactaaaagagtgggtgggaagactagtgaaacccagttcacggatggggaaacaggcctgaggtcacatttcacttagtggttgtgttgggaccaaaacctgggtgtcctcactgctgccctgagtccagccatggttttcagggggacagtggacagggactcagaaatgtggtgggagggcctccctggcttgggagaccgctctctgcaagggagggggagagaagcagagggagagagaaggtgacacggatggaagagtgggaaggagctggcctggctcagccctaggctgtccctgcagccagggtgtccgggggctggccagtcagagaaagggggccatggactgctgtggcaaatagggagacaaggagacagaccctgcagtcctactacagtctggagtggggtcctaagaagaagggtcccacctcaacccctgtcagtgtccactgtggggtgggggctgacccctgcctttgattgtcattctcctgggaagcccagtctcagtccctcccccaacactgtccacactgcccctccccactgtttatttattgcacggatctaagttattctccccagccagagcccgagctcctgctccctgggaaaagtggcgtatggccctgagctgggctttatattttatatctgcaaataaatcacattttatcttatatttagggaaagccggagagcaacaacaaaaaatgtttaagccgggcgcggtggctcacatctgtaatcccagcactttgggagtccaaggagggggatcgcttgagtccaggagtttgagaccagcctggacaacatggtgaaaccccatctctacaaaaaatacaaaaattagccatgcatggtggctcatgcctgtagtcccagctacttgggaggctgaggcaggaggatcacttaagcccagaaggcagaggttgtagtgagctgagatcgcaccactgcactccagcctgggcaacatagcaaaatcctgtctcaaaaaaaaagttaaaaaatattgcccggctcctagaatttatttatttcctgacttacagcaagcgagttatcgtcttctgtattttgtagactttctaaataaagtcaaattctttctttttccacagagaataaaaaaaaaaaaa

SEQ ID NO: 3530 - DNA, 2640 bp, Homo Sapiens
  NM_012325
ctttacgtcggcgcgtaacgagggggtgcgtgtgaggtcatcgcgcgggcgggcgggcggggtctggcggtttgaacgagacgaagacggaaccggagccggttgcgggcagtggacgcggttctgccgagagccgaagatggcagtgaacgtatactcaacgtcagtgaccagtgataacctaagtcgacatgacatgctggcctggatcaatgagtctctgcagttgaatctgacaaagatcgaacagttgtgctcaggggctgcgtattgtcagtttatggacatgctgttccctggctccattgccttgaagaaagtgaaattccaagctaagctagaacacgagtacatccagaacttcaaaatactacaagcaggttttaagagaatgggtgttgacaaaataattcctgtggacaaattagtaaaaggaaagtttcaggacaattttgaattcgttcagtggttcaagaagtttttcgatgcaaactatgatggaaaagactatgaccctgtggctgccagacaaggtcaagaaactgcagtggctccttcccttgttgctccagctctgaataaaccgaagaaacctctcacttctagcagtgcagctccccagaggcccatctcaacacagagaaccgctgcggctcctaaggctggccctggtgtggtgcgaaagaaccctggtgtgggcaacggagacgacgaggcagctgagttgatgcagcaggtcaacgtattgaaacttactgttgaagacttggagaaagagagggatttctacttcggaaagctacggaacattgaattgatttgccaggagaacgagggggaaaacgaccctgtattgcagaggattgtagacattctgtatgccacagatgaaggctttgtgatacctgatgaagggggcccacaggaggagcaagaagagtattaacagcctggaccagcagagcaacatcggaattcttcactccaaatcatgtgcttaactgtaaaatactcccttttgttatccttagaggactcactggtttcttttcataagcaaaaagtacctcttcttaaagtgcactttgcagacgtttcactccttttccaataagtttgagttaggagcttttaccttgtagcagagcagtattaacacctagttggttcacctggaaaacagagaggctgaccgtggggctcaccatgcggatgcgggtcacactgaatgctggagagatgttatgtaatatgctgaggtggcgacctcagtggagaaatgtaaagactgaattgaattttaagctaatgtgaaatcagagaatgttgtaataagtaaatgccttaagagtatttaaaatatgcttccacatttcaaaatataaaatgtaacatgacaagagattttgcgtttgacattgtgtctgggaaggaagggccagaccttggaacctttggaacctgctgtcaacaggtcttacagggctgcttgaaccctcataggcctaggctttggtctaaaaggaacatttaaaaagttgccctgtaaagttatttggtgtcattgaccaattgcatcccagctaaaaagcaagaggcatcgttgcctggataatagaggatgtgtttcagccctgagatgttacagttgaagagcttggttttcattgagcatttctctatttttccagttatccccgaaatttctatgtattatattttttggggaagtgaggtgtgcccagttttttaatctaacaactacttttggggacttgcccacatctctgggatttgaatggggattgtatcccattttactgtcttttaggtttacatttaccacgtttctcttctctgctccccttgcccactggggactcctctttggctccttgaagtttgctgcttagagttggaagtgcagcaggcaggtgatcatgctgcaagttctttctggacctctggcaaagggagtggtcagtgaaggccatcgttaccttgggatctgccaggctggggtgttttcggtatctgctgttcacagctctccactgtaatccgaatactttgccagtgcactaatctctttggagataaaattcattagtgtgttactaaatgttaattttcttttgcggaaaatacagtaccgtgtctgaattaattattaatatttaaaatacttcattccttaactctccctcatttgctttgcccacagcctattcagttcctttgtttggcaggattctgcaaaatgtgtctcacccactactgagattgttcagcccctgatgtatttgtattgatttgtttctggtggtagcttgtcctgaaatgtgtgtagaaagcaagtattttatgataaaaatgttgtgtagtgcatgctctgtgtggaattcagaggaaaacccagattcagtgattaacaatgccaaaaaatgcaagtaactagccattgttcaaatgacagtggtgctatttctcttttgtggccttttagacttttgttgccctaaaattccattttattgggaacccattttccacctggtctttcttgacagggtttttttctactttaaacagtttctaaataaaattctgtatttcaagagtaaaaaaaaaaaaaaaaaa

SEQ ID NO: 3531 - DNA, 8550 bp, Homo Sapiens
  NM_012330
caacgacaacaacagggggacacaaaatggcggcggcttagctcctacccctggcggcggcggcagcggtggcggaggcgacggcacctcctccaggcggcagccgcagtttctcaggcagcggcagcgcccccggcaggcgcggtggcggtggcgcgcagccagatttgcctgaagacctggataatctccatttttgtcatggactgttaaaacgtttgaagttccaattctggtcttgatttcccagttaaagatgttcttcacccgaatgcagtctttcctgttggtaaaataagacaaccatcaacattgcctgtttgtctgcttttgaatctcttaaggatggatgtttgtaagatgttgcttaatacagtctggaatactctgtccatttgttgaattgtaaatgactttcaaatgtgcaagttctgttaaatacaaagagaacctctatgggtaacttttgtgttgaagaagtcatttgtcaaccatggtaaaacttgcaaacccactttatacagagtggattcttgaagctatacagaaaataaaaaagcaaaagcaaaggccctctgaagagagaatctgccatgcggtcagtacttcccatgggttggataagaagacagtctctgaacagctggaactcagtgttcaggatggctcagttctcaaagtcaccaacaaaggccttgcctcctataaggacccagacaaccctgggcgcttttcatcagttaaaccaggcacttttcctaagtcagccaaggggtctagaggatcatgtaatgatctccgcaatgtggattggaataaacttttaaggagagcaattgaaggacttgaggagccgaatggctcctccctgaagaacatagagaagtatctcagaagtcaaagtgatctcacaagcaccaccaacaacccagcctttcagcagcggctgcgactgggggccaaacgcgctgtgaataatgggaggttactgaaagacggaccgcagtacagggtcaattatgggagcttagatggcaaaggggcacctcagtatcccagtgcattcccatcctcgctcccacctgtcagccttctaccccatgagaaagaccagccccgtgctgatcccattccaatatgtagcttctgtttggggactaaagaatcaaatcgtgaaaagaaaccagaagaactcctctcttgtgcagattgtggcagtagtggacacccatcctgtttgaaattttgtcctgaattaacaacaaatgtaaaggccttaaggtggcagtgcatcgaatgcaagacatgcagtgcctgtagagtccaaggcagaaatgctgataatatgcttttttgtgattcctgtgatagaggatttcatatggaatgctgtgacccaccactttccagaatgccaaaagggatgtggatttgccaagtctgcagaccaaagaaaaagggaagaaaactacttcatgagaaagctgcacaaataaaacgacgatatgcaaaacccattggacgaccgaaaaataaattaaagcaacgattgttgtctgtaaccagtgatgaaggatccatgaatgcattcacaggaagggggtcacctggtaggggtcaaaagactaaagtctgtaccacaccttcatctggtcatgctgcatctgggaaggactcaagcagcagattggctgttacagaccccactcggcctggtgccaccaccaaaatcaccaccacctccacctacatttctgcctctacacttaaagttaacaagaaaaccaaagggctcattgatggccttactaagttttttacaccatcacctgatggtcgcagatcacgaggtgaaattatagacttttcaaagcactatcgtccaaggaaaaaggtctctcagaaacagtcatgcacttctcatgtgttggctacaggtaccacacaaaagctaaaacctccaccttcttcacttccacccccaacccccatctccggtcagagccccagttcacaaaagtccagcacggccacttcttctccctctccccagagttcttccagccagtgcagtgtgccctccctgagcagccttaccactaacagccagctgaaggcactctttgatgggctttctcatatctataccactcagggacagtctcgcaaaaagggacacccgagttatgcaccacccaaacgtatgcgtcgtaaaactgaattatcttccacggcaaaatctaaagcccacttctttggcaaaagagatattagaagtcggtttatttctcactcctcctcctctagctgggggatggctagaggaagtatttttaaagcaattgctcacttcaagcgaacaactttccttaaaaagcacaggatgctaggcagattaaaatataaagtgacccctcagatggggaccccctcaccagggaaggggagcttgacagacggaaggattaaacctgatcaggatgatgatactgaaataaaaataaacatcaaacaagaaagtgcagatgtaaatgtgattggaaacaaggatgtcgttactgaagaggatttggatgtttttaagcaggcccaggaactttcttgggagaaaatagagtgtgagagtggggtggaagactgtggccggtacccttctgtgattgaatttggtaaatatgaaatccaaacctggtactcctcgccttacccacaggaatatgcaagattaccaaagctttacctgtgtgaattctgtcttaaatatatgaaaagtaaaaatattttgctaagacactccaagaagtgtggatggtttcatcctccagcaaatgaaatttaccgaaggaaagacctttcagtatttgaggttgatgggaatatgagcaaaatttattgccaaaacctttgcttgttagccaagctcttcctggaccacaaaacgttgtattatgatgtcgagccattccttttttatgtccttacaaaaaatgatgaaaagggctgtcatctggttggatacttctctaaggaaaagctttgccagcagaagtataatgtctcctgcataatgatcatgccccagcaccaaaggcaaggatttggacggtttctcattgatttcagctatttgctttctagaagagaaggccaagcagggtctcctgaaaagcctctctccgatctgggccgtctctcctacctggcatattggaagagcgtcatcttggagtatctctaccaccaccatgagaggcacatcagcatcaaggcaattagcagagcgacgggcatgtgcccacatgacattgccaccactctgcagcacctccacatgatcgacaagagagatggcagatttgtcatcattagacgggaaaagttgatattgagccacatggaaaagctgaaaacctgttccagagccaatgaacttgatccagacagtctgaggtggaccccaattttaatttctaatgctgcagtgtctgaagaagagcgagaagctgagaaagaggctgagcggctaatggaacaagctagctgctgggagaaggaggaacaagaaatcctgtcaactagagctaacagtaggcaatcacctgcaaaagtacaatcgaaaaataaatatttgcattccccggagagccggccagtcacaggggagcgagggcagctgctggagctgtctaaagagagcagtgaagaagaagaggaggaggaggacgaggaggaggaagaagaggaggaagaagaggaagaggatgaagaggaggaagaagaggaagaagaagaagaagaagaagaaaatattcaaagctctcccccaagattgacgaaaccacagtcagttgccataaagagaaagaggccttttgtactaaagaagaaaaggggtcgtaaacgcaggaggatcaacagcagtgtaacaacagagaccatttcagagacgacagaagtactgaatgagccctttgacaactcagatgaagagaggccaatgccacagctggagcctacctgtgagattgaagtggaggaagatggcaggaagccagtcctgagaaaagcattccagcatcagcctgggaagaaaagacaaacagaggaagaggaaggaaaagacaatcattgcttcaagaatgctgacccttgtagaaacaatatgaatgatgattcaagtaacttgaaagaaggcagtaaagacaatcccgaacctctaaagtgcaaacaagtgtggccaaaaggaacaaagcgcggtctatctaagtggaggcaaaacaaagagaggaagaccggatttaaactgaatttgtacaccccgccagaaacacccatggagcctgacgagcaggtaacagtggaagaacagaaggagacttcagaaggaaaaaccagccccagtcccatcaggattgaggaggaggtcaaggaaactggggaagccctgttgcctcaagaggaaaacagaagggaagaaacatgtgcccctgtaagtccaaacacatcaccaggtgaaaaaccagaagatgatctcatcaaacctgaggaagaggaagaggaggaggaggaggaagaggaagaagaggaagaagaggaaggggaagaagaagaaggaggaggaaatgtagaaaaagatccagatggtgctaaaagccaagaaaaagaggaaccagaaatctccacggaaaaagaagactctgcacgtttggatgatcacgaagaggaggaggaagaggatgaagagccatcccacaacgaggaccatgatgccgatgacgaggatgacagccacatggagtctgccgaagtggagaaggaagagctgcccagagaaagcttcaaagaagtactggaaaaccaggagacttttttagaccttaatgtgcagcctggtcactcgaacccagaggtcttaatggactgtggcgtcgacctgacagcttcttgtaacagtgagcccaaggagcttgctggggaccctgaagctgtacccgaatctgacgaggagccacccccaggagaacaggcacagaagcaggaccaaaagaacagcaaggaagtcgatacagagttcaaagagggaaacccagcaaccatggaaatcgactctgagactgtccaggccgttcagtctttgacccaggagagcagcgaacaggacgacacctttcaggattgtgccgagactcaagaggcctgtagaagcctacagaactacacccgtgcagaccaaagtccacagattgccaccacgctcgacgattgccaacagtcggaccacagtagcccagtttcatccgtccactcccatcctggccagtccgtacgttctgtcaacagcccaagtgtccctgctctggaaaacagctacgcccaaatcagcccagatcaaagtgccatctcagtgccatctctgcagaacatggaaaccagtcccatgatggatgtcccatcagtttcagatcattcacagcaagtcgtagacagtggatttagtgacctgggcagtatcgagagcacaactgagaactacgaaaacccaagcagctacgattctactatgggaggcagcatctgtggaaacggctcttcacagaacagctgctcctatagcaacctcacctccagcagtctgacacagagcagctgtgctgtcacccagcagatgtccaacatcagcgggagctgcagcatgctgcagcaaaccagcatcagctcccctccgacctgcagcgtcaagtctcctcaaggctgtgtggtggagaggcctccgagcagcagccagcagctggctcagtgcagcatggctgctaacttcaccccacccatgcagctggctgaaatccccgagacgagcaacgccaacattggcttatacgagcgaatgggtcagagtgattttggggctgggcattacccgcagccgtcagccaccttcagccttgccaaactgcagcagttaactaatacacttattgatcattcattgccttacagccattccgctgctgtgacttcctatgcaaacagtgcctctttgtccacaccattaagtaacacagggcttgttcaactttctcagtctccacactccgtccctgggggaccccaagcacaagctaccatgaccccaccccccaacctgactcctcctccaatgaatctgccgccgcctcttttgcaacggaacatggctgcatcaaatattggcatctctcacagccaaagactgcaaacccagattgccagcaagggccacatctccatgagaaccaagtcagcgtctctgtcaccagccgctgccacccatcagtcacaaatctatgggcgctcccagactgtagccatgcagggtcctgcacggactttaacgatgcaaagaggcatgaacatgagtgtgaacctgatgccagcgccagcctacaatgtcaactctgtgaacatgaacatgaacactctcaacgccatgaatgggtacagcatgtcccagccaatgatgaacagtggctaccacagcaatcatggctatatgaatcaaacgccccaataccctatgcagatgcagatgggcatgatgggcacccagccatatgcccagcagccaatgcagaccccaccccacggtaacatgatgtacacggcccccggacatcacggctacatgaacacaggcatgtccaaacagtctctcaatggctcctacatgagaaggtagacaacgtgggcagtccacaaaacctacggggcatcactattggattgatctgcacaaatacctttgaagagtacgatttcaaaaccagcaattggtgtgaatgcaaaaacatttgttggcaccatttatttaaaaaaaaaaaaagctgtatgcagcagaaagccttatacaagttgtttttctttttttcctttttcttttttttggtaccttcatttctgttacttttatataaaattctctgcaaaggaaggcctctctttggactacaatttggaggcagccacttgttgtgcctgcttctgttaaacaatgtggatatcaagcccccccaaattatctgttttaatattgaacctagagctttttttttcccttccctgtccactccatgtaaatgcctttagcatttcagttattgtatattttgtttaaggtgacacttcagcatgccgctaatgtctttgttagtgacagtgcattttgtagtactgtacaagtgttgtgctaacagtaagccatttcttaagttttttgccttgattagggtgccctaatttgagggttttaaaaaaaactatatttttgttaattataaaactgtaaagagctataaaagctattcccatttggttagtcaaaagggttttattgctaaatgtttggtgtaaagttgagacccttttccattttggtgacagatttctttggggaaaaaaggcagctttctgttttataaatgcagacttctgtttattgaatgaagcatatctcagtgtttatctgtcaggttttgaaacatttcatatatgtccaaatacttggcaggatttaaaaaaaaatagtgaatttggtgtaaagttgctattttatggaaatgcctctaactttacattttcattccatctgtagatttttctatctttataaaatattggagttattttttaaggaaaaatagaaaagtagcttgtgaatagctcaaactaagcttacaaatcgcatgtaaaaaagcaaaaaagttatttgtgtctgtttatattgcttccttttttgtagcctttgtacctgtacagggtgacagtaagggccaagcaggagaggcgtaatccttgtataaaataggatccagcgacactcttgtatttatctgttctctttttagtcagtcacttcaaaaaaacaaaaaacaaacaaaaaaaagctgtacattttaacataaaataaattatgatgagccatttttagcctcttgtgtcctgtcatattatgattgatagagaatgaccaatggaactgtatcatgtgtcacgcctcagaacacatacacattttgggaaaataaattatttagtgtaaattggagttatgggattttctgatttgttttgactttgggggaggggttggcaataaataagagtaatatctaataaaaccatcacatataccaaatacctatttaataaattaatttataatggattttaatgcttttcatgaaagtttattttatgcgagtgcataccttctgtatgccaatcattgtctttaaaataaagtgaaattgtttttttcttttggactttgatcttcatttgcaaagagatcccgcacaaatatccagctgcctcactcgcacagtctgtagaaacatccctccaagcctcgcaccagggtagcaaacttcctttttataaagattcataccaaaaaaagcacccaatttgggattgtatgtttgaaaaatcattttctttttaaaaagtgtgaacgttttgctctgttgtgaatgattaattgtatgttttctttagagtctaaagtttagaccc

SEQ ID NO: 3532 - DNA, 1492 bp, Homo Sapiens
  NM_012331
cagccggtacggccccgggtttgggcaacctcgattacgggcggcctccagccccgccagcagcgccccgcgcccgcccgcccgcgcccctgccgccccccggttccggccgcggaccccactctctgccgttccggctgcggctccgctgccggtagcgccgtcccccgggaccacccttcggctggcgccctcccatgctctcggccacccggagggcttgccagctcctcctcctccacagcctctttcccgtcccgaggatgggcaactcggcctcgaacatcgtcagcccccaggaggccttgccgggccggaaggaacagacccctgtagcggccaaacatcatgtcaatggcaacagaacagtcgaacctttcccagagggaacacagatggctgtatttggaatgggatgtttctggggagctgaaaggaaattctgggtcttgaaaggagtgtattcaactcaagttggttttgcaggaggctatacttcaaatcctacttataaagaagtctgctcagaaaaaactggccatgcagaagtcgtccgagtggtgtaccagccagaacacatgagttttgaggaactgctcaaggtcttctgggagaatcacgacccgacccaaggtatgcgccaggggaacgaccatggcactcagtaccgctcggccatctacccgacctctgccaagcaaatggaggcagccctgagctccaaagagaactaccaaaaggttctttcagagcacggcttcggccccatcactaccgacatccgggagggacagactttctactatgcggaagactaccaccagcagtacctgagcaagaaccccaatggctactgcggccttgggggcaccggcgtgtcctgcccagtgggtattaaaaaataattgctccccacatggtgggcctttgaggttccagtaaaaatgctttcaacaaattgggcaatgcttgtgtgattcacaatcgtggcatttaaagtgcacaaagtacaaaggaatttatacagattgggtttaccgaagtataatctataggaggcgcgatggcaagttgataaaatgtgacttatctcctaataagttatggtgggagtggagctgtgcagtttcctgtgtcttctggggtctgagtgaagatagcagggatgctgtgttcacccttcttggtagaagctaaggtgtgagctgggaggttgctggacaggatgggggaccccagaagtcctttatctgtgctctctgcccgccagtgccttacaatttgcaaacgtgtatagcctcagtgactcattcgctgaaatccttcgctttaccaaatctagacatacataaggggctttctctcccttttcagccctctctgtgcagagaaaagatgtgagtccgcttgatgaattctaatgctttgcttagagctatgagaaatgtttgttttaataaaaacctacagtccaataatgccaaaaaaaaaa

SEQ ID NO: 3533 - DNA, 11436 bp, Homo Sapiens
  NM_012334
gagagctggctgagccgcggcgcgggactgctcacctccaagcgctcgcgcggggatcgcggctcctgctcactttgcggcccgctgtcctcctgcccgccccgagggcccccggccggagcgcagagggagggggccgcgctcgccagcaccccgccgccttcccccgcctgggggaagaatgtgccaccagctgttctccgcttgcgagcgctgcgcccagtagtgaggaacttggaggaagaagagacaaaggctgccgtcgggacgggcgagttagggacttgggtttgggcgaacaaaaggtgagaaggacaagaagggaccgggcgatggcagcaggggagccccgcgggcgcgcgtcctcgggagtggcgccgtgacacgcatggtttccccggacccgcggcggcgctgacttccgcgagtcggagcggcactcggcgagtccgggactgcgctggaacaatggataacttcttcaccgagggaacacgggtctggctgagagaaaatggccagcattttccaagtactgtaaattcctgtgcagaaggcatcgtcgtcttccggacagactatggtcaggtattcacttacaagcagagcacaattacccaccagaaggtgactgctatgcaccccacgaacgaggagggcgtggatgacatggcgtccttgacagagctccatggcggctccatcatgtataacttattccagcggtataagagaaatcaaatatatacctacatcggctccatcctggcctccgtgaacccctaccagcccatcgccgggctgtacgagcctgccaccatggagcagtacagccggcgccacctgggcgagctgcccccgcacatcttcgccatcgccaacgagtgctaccgctgcctgtggaagcgccacgacaaccagtgcatcctcatcagtggtgaaagtggggcaggtaaaaccgaaagcactaaattgatcctcaagtttctgtcagtcatcagtcaacagtctttggaattgtccttaaaggagaagacatcctgtgttgaacgagctattcttgaaagcagccccatcatggaagctttcggcaatgcgaagaccgtgtacaacaacaactctagtcgctttgggaagtttgttcagctgaacatctgtcagaaaggaaatattcagggcgggagaattgtagattatttattagaaaaaaaccgagtagtaaggcaaaatcccggggaaaggaattatcacatattttatgcactgctggcagggctggaacatgaagaaagagaagaattttatttatctacgccagaaaactaccactacttgaatcagtctggatgtgtagaagacaagacaatcagtgaccaggaatcctttagggaagttattacggcaatggacgtgatgcagttcagcaaggaggaagttcgggaagtgtcgaggctgcttgctggtatactgcatcttgggaacatagaatttatcactgctggtggggcacaggtttccttcaaaacagctttgggcagatctgcggagttacttgggctggacccaacacagctcacagatgctttgacccagagatcaatgttcctcaggggagaagagatcctcacgcctctcaatgttcaacaggcagtagacagcagggactccctggccatggctctgtatgcgtgctgctttgagtgggtaatcaagaagatcaacagcaggatcaaaggcaatgaggacttcaagtctattggcatcctcgacatctttggatttgaaaactttgaggttaatcactttgaacagttcaatataaactatgcaaacgagaaacttcaggagtacttcaacaagcatattttttctttagaacaactagaatatagccgggaaggattagtgtgggaagatattgactggatagacaatggagaatgcctggacttgattgagaagaaacttggcctcctagcccttatcaatgaagaaagccattttcctcaagccacagacagcaccttattggagaagctacacagtcagcatgcgaataaccacttttatgtgaagcccagagttgcagttaacaattttggagtgaagcactatgctggagaggtgcaatatgatgtccgaggtatcttggagaagaacagagatacatttcgagatgaccttctcaatttgctaagagaaagccgatttgactttatctacgatctttttgaacatgtttcaagccgcaacaaccaggataccttgaaatgtggaagcaaacatcggcggcctacagtcagctcacagttcaaggactcactgcattccttaatggcaacgctaagctcctctaatcctttctttgttcgctgtatcaagccaaacatgcagaagatgccagaccagtttgaccaggcggttgtgctgaaccagctgcggtactcagggatgctggagactgtgagaatccgcaaagctgggtatgcggtccgaagaccctttcaggacttttacaaaaggtataaagtgctgatgaggaatctggctctgcctgaggacgtccgagggaagtgcacgagcctgctgcagctctatgatgcctccaacagcgagtggcagctggggaagaccaaggtctttcttcgagaatccttggaacagaaactggagaagcggagggaagaggaagtgagccacgcggccatggtgattcgggcccatgtcttgggcttcttagcacgaaaacaatacagaaaggtcctttattgtgtggtgataatacagaagaattacagagcattccttctgaggaggagatttttgcacctgaaaaaggcagccatagttttccagaagcaactcagaggtcagattgctcggagagtttacagacaattgctggcagagaaaagggagcaagaagaaaagaagaaacaggaagaggaagaaaagaagaaacgggaggaagaagaaagagaaagagagagagagcgaagagaagccgagctccgcgcccagcaggaagaagaaacgaggaagcagcaagaactcgaagccttgcagaagagccagaaggaagctgaactgacccgtgaactggagaaacagaaggaaaataagcaggtggaagagatcctccgtctggagaaagaaatcgaggacctgcagcgcatgaaggagcagcaggagctgtcgctgaccgaggcttccctgcagaagctgcaggagcggcgggaccaggagctccgcaggctggaggaggaagcgtgcagggcggcccaggagttcctcgagtccctcaatttcgacgagatcgacgagtgtgtccggaatatcgagcggtccctgtcggtgggaagcgaattttccagcgagctggctgagagcgcatgcgaggagaagcccaacttcaacttcagccagccctacccagaggaggaggtcgatgagggcttcgaagccgacgacgacgccttcaaggactcccccaaccccagcgagcacggccactcagaccagcgaacaagtggcatccggaccagcgatgactcttcagaggaggacccatacatgaacgacacggtggtgcccaccagccccagtgcggacagcacggtgctgctcgccccatcagtgcaggactccgggagcctacacaactcctccagcggcgagtccacctactgcatgccccagaacgctggggacttgccctccccagacggcgactacgactacgaccaggatgactatgaggacggtgccatcacttccggcagcagcgtgaccttctccaactcctacggcagccagtggtcccccgactaccgctgctctgtggggacctacaacagctcgggtgcctaccggttcagctctgagggggcgcagtcctcgtttgaagatagtgaagaggactttgattccaggtttgatacagatgatgagctttcataccggcgtgactctgtgtacagctgtgtcactctgccgtatttccacagctttctgtacatgaaaggtggcctgatgaactcttggaaacgccgctggtgcgtcctcaaggatgaaaccttcttgtggttccgctccaagcaggaggccctcaagcaaggctggctccacaaaaaaggggggggctcctccacgctgtccaggagaaattggaagaagcgctggtttgtcctccgccagtccaagctgatgtactttgaaaacgacagcgaggagaagctcaagggcaccgtagaagtgcgaacggcaaaagagatcatagataacaccaccaaggagaatgggatcgacatcattatggccgataggactttccacctgattgcagagtccccagaagatgccagccagtggttcagcgtgctgagtcaggtccacgcgtccacggaccaggagatccaggagatgcatgatgagcaggcaaacccacagaatgctgtgggcaccttggatgtggggctgattgattctgtgtgtgcctctgacagccctgatagacccaactcgtttgtgatcatcacggccaaccgggtgctgcactgcaacgccgacacgccggaggagatgcaccactggataaccctgctgcagaggtccaaaggggacaccagagtggagggccaggaattcatcgtgagaggatggttgcacaaagaggtgaagaacagtccaaagatgtcttcactgaaactgaagaaacggtggtttgtactcacccacaattccctggattactacaagagttcagagaagaacgcgctcaaactggggaccctggtcctcaacagcctctgctctgtcgtccccccagatgagaagatattcaaagagacaggctactggaacgtcaccgtgtacgggcgcaagcactgttaccggctctacaccaagctgctcaacgaggccacccggtggtccagtgccattcaaaacgtgactgacaccaaggccccgatcgacacccccacccagcagctgattcaagatatcaaggagaactgcctgaactcggatgtggtggaacagatttacaagcggaacccgatccttcgatacacccatcaccccttgcactccccgctcctgccccttccgtatggggacataaatctcaacttgctcaaagacaaaggctataccacccttcaggatgaggccatcaagatattcaattccctgcagcaactggagtccatgtctgacccaattccaataatccagggcatcctacagacagggcatgacctgcgacctctgcgggacgagctgtactgccagcttatcaaacagaccaacaaagtgccccaccccggcagtgtgggcaacctgtacagctggcagatcctgacatgcctgagctgcaccttcctgccgagtcgagggattctcaagtatctcaagttccatctgaaaaggatacgggaacagtttccaggaagcgagatggaaaaatacgctctcttcacttacgaatctcttaagaaaaccaaatgccgagagtttgtgccttcccgagatgaaatagaagctctgatccacaggcaggaaatgacatccacggtctattgccatggcggcggctcctgcaagatcaccatcaactcccacaccaccgctggggaggtggtggagaagctgatccgaggcctggccatggaggacagcaggaacatgtttgctttgtttgaatacaacggccacgtcgacaaagccattgaaagtcgaaccgtcgtagctgatgtcttagccaagtttgaaaagctggctgccacatccgaggttggggacctgccatggaaattctacttcaaactttactgcttcctggacacagacaacgtgccaaaagacagtgtggagtttgcatttatgtttgaacaggcccacgaagcggttatccatggccaccatccagccccggaagaaaacctccaggttcttgctgccctgcgactccagtatctgcagggggattatactctgcacgctgccatcccacctctcgaagaggtttattccctgcagagactcaaggcccgcatcagccagtcaaccaaaaccttcaccccttgtgaacggctggagaagaggcggacgagcttcctagaggggaccctgaggcggagcttccggacaggatccgtggtccggcagaaggtcgaggaggagcagatgctggacatgtggattaaggaagaagtctcctctgctcgagccagtatcattgacaagtggaggaaatttcagggaatgaaccaggaacaggccatggccaagtacatggccttgatcaaggagtggcctggctatggctcgacgctgtttgatgtggagtgcaaggaaggtggcttccctcaggaactctggttgggtgtcagcgcggacgccgtctccgtctacaagcgtggagagggaagaccactggaagtcttccagtatgaacacatcctctcttttggggcacccctggcgaatacgtataagatcgtggtcgatgagagggagctgctctttgaaaccagtgaggtggtggatgtggccaagctcatgaaagcctacatcagcatgatcgtgaagaagcgctacagcacgacacgctccgccagcagccagggcagctccaggtgaaggcgggacagagcccacctgtctttgctacctgaacgcaccaccctctggcctaggctggctccagtgtgccatgcccagccaaaacaaacacagagctgcccaggctttctggaagcttctggtctgagggaggtgtctccgaggatccttttgcctgccgccttcattgatcctgtattaagctgtcaactttaacagtctgcacagtttccaaagctttactactcttagaggacacatgccttaaaaaaggaggggaggaaccacgctgccaccaaagcagccggaagtgccttaacttgtggaaccaacactaatcgaccgtaactgtgctactgaagggaactgcctttcccccttctgggggagacttaacagagcgtggaaggggggcattctctgtcaatgatgcactaacctcccaacctgatttccccgaatctgagggaaggtgagggagtgggaagggggatggagagctcgaggggacagtgtgtttgagctggagtgctgcgggcagcctttctcatggaatgacatgaatcaacttttttctttgtttcatcttttaagtgtacgtgcttgcctgttcgtgcatgtgttcataaactcaacactttaatcatggtttcatgagcattaaaaagcaaagggaaaaaggatgtgtaatggtgtacacagtctgtatattttaataatgcagagctatagtctcaattgttactttataaggtggttttattaacaaacccaaatcctggattttcctgtctttgctgtattttgaaaaacacgtgttgactccattgttttacatgtagcaaagtctgccatctgtgtctgctgtattataaacagataagcagcctacaagataactgtatttataaaccactcttcaacagctggctccagtgctggttttagaacaagaatgaagtcattttggagtctttcatgtctaaaagatttaagttaaaaacaaagtgttacttggaaggttagcttctatcattctggatagattacagatataataaccatgttgactatgggggagagacgctgcattccagaaacgtcttaacacttgagtgaatcttcaaaggaccctgacattaaatgctgaggctttaatacacacatattttatcccaagtttataatggtggtctgaacaaggcacctgtaaataaatcagcatttatgaccagaagaaaaataatctggtcttggactttttatttttatatggaaaagttttaaggacttgggccaactaagtctacccacacgaaaaaagaaatttgccttgtccctttgtgtacaaccatgcaaaactgtttgttggctcacagaagttctgacaataaaagatactagctaacacgctgtgtgtttcctttatcagaggaggctctaaaaaccatggaggggaggcttatttttgttttggctttttggtggttttttttttttttctttagagacagagtctcactctgttacccaggctggagtacagtggcgtgatctcggctcactgcagcctctgcctcctgggttctagcgattctcctgcctcagcctcccaaggagttgggagtacaggcatgcatcaccacgcctggctaggttttgtatttttagtagagatggggtttcaccatgttggccaggctggtctcgatccacctgcctcagcctcccaaagtgctgggattacaggtgtgagctaccgcacccggccggctttttggtgttaatgctatggtttcagtgtctgggctttgtgtttgtttcatggacttgctcatcaggtctaaacacagatctgcagctgtctccactgctcttgtagacactgagtgtgacttcaagaaagcaaaagaagggactggtaaatgaagtcacacacagctgaggacttgaaatgtgtttatgtcagacagtcccctatgtcagccccaaagtgtgcctgatcttgcaaccctggatcctagaacctgcctgcacctccctgtggaccagaacacacaggtaggcagtttggttgccaatgtacccaaaccaccaggccaggcgtctagcatgagcaagcgccacttctcttgcagaccactgactcccaccctctgctcatgctcacggatggcttcttcccattctgcagggattgggatggaacctgaagccaggtgctgcctgaagcctgtggccccgccaggcacccaaggaaagccggcaaagacttggatgtgtgttgtctttgtttttattttaggctcagaaagaatttgacagaagtcttctttctactgctcacctctcaggattccctctgtgacttaatttactctggaaggctgtcgcccgccctcaattatagatggggaaataggcaaggaaaggcatgactcagattgggggggttagagcagcaccatagttagaacatagatttacatgtgagcctttacatggcatagttgtggttttgttttagccttttatttagaaataattacagactcagagaaagttgcaacagaacgtacagggaggcctgcgtgcccttcagtttccccagtggtagcatcccccatcactgtagagcagcatcacagctgacaaagtaccgttgagcttcccctagccacagaacctattccaattttactgcttttacatgcactcattggtgtgtgtgatgtcagttgctttcaacaaggtcagtgaagtgcagtcgtcccttggtatccaagggagattggttccaggaccccctccccccacccctgaggatacaaaattcacagatgctcaagtccctgctatacagtggtataatatttgcatagaacctgcacacatctttccttaccctttaaatcatctccaggttacagatacctagcacaacataaatgctgcataaatagctgttataccgtgtgtgtctgtgttttaaacattgtttatttgagacagggtctcactctgtcaccaggctacagtgcagaggcacagtcacagctcattgcagcctcaacctcctgggctcaagcagtcctccacctcagcctcccaaagtgctaggatgacaggtgtgagccactgtgccccaccaaaaaaagttttttcaaatattttctatctgtggttggattcagaccacatgaacactgagggctgactgtagttttgaatgtctgttactgaggaggcaccagcataaagtattttatcacttcagacgctgacaatctagtatttttaatttttaaatcttttgaaagctaatacatataggtgatttgtaaaaaaaaaaaaaaaaaaaaaaaaaaaaaaaaaaaaaaacaactagaagtaaaatgttacttttttccagctgtagccctaattacccattttcctttcccagaaacagctatttttactgttttattgaatattctctcaaaaataatttaagctgtccaatcatttactcatacatacatatatatccccatcctcatttttaatagatggaaacaaactgttgtagcttacttttttctcagcatagtattttagctctaatcctacattaatacctatagaattgccttattctttttgatgattatatagtacctcagatagctctgtggaaaaacaggataaggccatctgtattagtccattctcacactgctagaaggacatgcctgagactgggtaatttataaagaaaaagaagttgaatggactcagtctcacatgcctggggaggcctcacaatcatggtggacagcaaaggaggagaaaaggcacatcttatatggcagcaggcaagagagcttgcacaggggaactcccttttataaaaccattagctcttccgagacatactcactatggacaagaacagcatgggaaaacccacccccatgattcaattacctcccatcaggtccctcccgtgacaggtggggattatgggagctataattcaagatgagatttgggtggggacagagccaaaccatatcaccacctaagttctctgtaaaaatagtttcagccaggcatgctggctcacgcctgtaatcccagcatgttggaaggccgaggcaagaggatcgcttgagctccggagttcaagaccagtctgggcaacatgacaagaccctgtctccacagaaaattaacattagccaggtgtggtggtgcgcatctgtagtcccagctactggggaggctgagatgagaaaatcgtttgaacccaggaggtcaaagctgcagggagccatgatggtgccactgcattctggtgtgggtgacagagcaagactctgtctccaaaaaaaaaaaaaaaaaaaaaaaatagttcagaaatctaagacagcactttttttagttactaagccttttattcagatagcacactaaattggggtcaaaaatctgctatagtaaagttctgtatttgtgtgtattgggtataaaaataagcgctttaattaatttgaaaatccctattcaccaaaagtttatactgtaataggggacaaaacaagtgcataaagctaaatttagccagtacatttataactgtttcattcagttgatcagagaagcatcacgattgctggaaaatatcggacctggattcaaggtttggcattgctgttttcaaagtatgtaatcttttagatcaggggtcagtgaactacagtacagagaccaaatctaccctgccacctgtttttgtgaataaagttttattgaaacagaaaaaaa

SEQ ID NO: 3534 - DNA, 2537 bp, Homo Sapiens
  NM_012341
ggaagtcccacctgcgcccgacggcggaagttccgggagtgccaagtacccgcgtgcatacggctgccggcatggcacattacaacttcaagaaaattacggtggtgccgtccgccaaggacttcatagacctcacgttgtcgaagactcaacgaaagactccaaccgttattcataaacattaccaaatacatcgcattagacatttttacatgagaaaagtcaaatttactcaacagaattaccatgatagactttcacaaattctaacagatttccccaaattggatgatattcatccgttctatgctgatttgatgaatattctctacgacaaggatcattacaagttggctctggggcaaataaatattgccaaaaatttagtggacaatgttgctaaagattatgtgcgactgatgaagtatggcgactctctctaccgctgcaaacagctgaagcgtgcggccctgggacggatgtgcacagtgatcaagaggcagaagcagagtttggagtatttggagcaagtgcgtcagcatttatcccgtttgccaaccattgatccgaataccaggaccctgcttttgtgtgggtacccaaatgttgggaagtccagcttcatcaacaaggtgacgagagcagacgtggatgtccagccctatgcgttcacaaccaagtctctgtttgttgggcacatggattataagtatctacgttggcaggttgtagacactcctgggatcctggaccaccctctggaggataggaacaccatcgagatgcaggccatcactgccctggcccacctccgtgctgcggtcctgtatgtgatggatttgtctgagcagtgtgggcatgggctgagggagcagctagaactcttccagaacatcagacctctcttcatcaacaagcctctcatagttgtagccaacaaatgtgatgtgaagagaatagctgaactttctgaagatgatcagaaaatatttacagatttgcagtctgaaggattccctgtaatagagaccagcaccctgactgaggaaggtgttattaaagttaaaacagaggcttgcgataggcttttggctcatcgagtggaaaccaaaatgaagggaaataaagtgaatgaggtgctgaatagactgcacctggctatcccaaccaggagggacgataaggagaggccccctttcatccctgaaggagtggtggctcgcaggaagaggatggaaactgaggagtccaggaagaagagggaacgagatcttgagctggaaatgggagatgattatattttggatcttcagaagtactgggatttaatgaatttgtctgaaaaacatgataagataccagaaatctgggaaggccataatatagctgattatattgatccagccatcatgaagaaattggaagaattagaaaaagaagaagagctgagaacagctgctggagagtatgacagtgtatctgagagtgaagacgaagagatgctggaaatccgacagctggcaaagcaaattcgagagaaaaagaagttgaaaattctggagtccaaagaaaagaatacacagggacccaggatgccgcgaactgctaagaaggttcagaggacagttttggagaaggagatgcgtagtcttggtgttgacatggacgataaagacgatgcccattacgcagtccaggcaagaagatcccggagcatcactaggaaaagaaagcgggaagactctgctcccccgtcctctgtggcccggagtgggagttgctctcgaactccacgtgacgtttctggtcttagggatgtcaagatggtgaagaaagccaagactatgatgaagaatgctcagaagaagatgaatcggttggggaagaaaggggaggcggatagacacgtgtttgatatgaagcccaagcacttgctgtctgggaagaggaaagctggtaaaaaggacaggagatagtatccgtttggttggcgtggcttcgctagagtgttgctgtttatttcctggtttggcacagtatggtttcatgaaattggagctctgtataaactgaaaaagacaaaataagtaaagcacttgttgctttgctgaaaactatggttaaccctatataggtgtgggaaatttttgtcactgcataatattacaaatattttgagtagacagtgtttccacatttaatggagtatcagttgcttcagattttcagaactgggaagatttactggtgtaactgggttgtttttgatggagaaaaaccttattttcttttgtaagagctgggagcaaacacgtttatgagtgtgtcggaatcccgtgcttaaaatacgctcttaaattattttctagtcttattttacaatgtctcattgtagtctgtcttcaactattttatccaaaataaacctccagaagaaagtagttttcatttacttagctcatgttttggtttagttatagtcgctatggatttggccaaataaaaaggcaaacaacaaaaaaaaaaaaaaaaaaaaa

SEQ ID NO: 3535 - DNA, 1732 bp, Homo Sapiens
  NM_012342
tttacggcgcggagccggagagacctgggctggcgcgggcgggagctgcggcggatacccttgcgtgctgtggagaccctactctcttcgctgagaacggccgctagcggggactgaaggccgggagcccactcccgacccggggctagcgtgcgtccctagagtcgagcggggcaagggagccagtggccgccgacgggggaccgggaaacttttctgggctcctgggcgcgccctgtagccgcgctccatgctccggcagcggcccgaaacccagccccgccgctgacggcgcccgccgctccgggcagggcccatgccctgcgcgctccgggggtcgtaggctgccgccgagccggggctccggaagccggcgggggcgccgcggccgtgcggggcgtcaatggatcgccactccagctacatcttcatctggctgcagctggagctctgcgccatggccgtgctgctcaccaaaggtgaaattcgatgctactgtgatgctgcccactgtgtagccactggttatatgtgtaaatctgagctcagcgcctgcttctctagacttcttgatcctcagaactcaaattccccactcacccatggctgcctggactctcttgcaagcacgacagacatctgccaagccaaacaggcccgaaaccactctggcaccaccatacccacattggaatgctgtcatgaagacatgtgcaattacagagggctgcacgatgttctctctcctcccaggggtgaggcctcaggacaaggaaacaggtatcagcatgatggtagcagaaaccttatcaccaaggtgcaggagctgacttcttccaaagagttgtggttccgggcagcggtcattgccgtgcccattgctggagggctgattttagtgttgcttattatgttggccctgaggatgcttcgaagtgaaaataagaggctgcaggatcagcggcaacagatgctctcccgtttgcactacagctttcacggacaccattccaaaaaggggcaggttgcaaagttagacttggaatgcatggtgccggtcagtgggcacgagaactgctgtctgacctgtgataaaatgagacaagcagacctcagcaacgataagatcctctcgcttgttcactggggcatgtacagtgggcacgggaagctggaattcgtatgacggagtcttatctgaactacacttactgaacagcttgaaggccttttgagttctgctggacaggagcactttatctgaagacaaactcatttaatcatctttgagagacaaaatgacctctgcaaacagaatcttggatatttcttctgaaggattatttgcacagacttaaatacagttaaatgtgttatttgcttttaaaattataaaaagcaaagagaagactttgtacacactgtcaccagggttatttgcatccaagggagctggaattgagtacctaaataaacaaaaatgtgccctatgtaagcttctacatcttgatttattgtaaagatttaaaagaaatatatatattttgtctgaaatttaatagtgtctttcataaatttaactgggaaacgtgagacagtacatgttaattatacaaatggccatttgctgttaataatttgttctcaactctaggatgtggcttggtttttttttttctcttttcttttttaaacaagaccaagatcttgcttattcttccatgaaaaaaaa

SEQ ID NO: 3536 - DNA, 936 bp, Homo Sapiens
  NM_012365
atgacaaaaaatcagacatgggtcacagaattcattctcctgggatttccactcagcctaaggattcagatgctcctctctgggcttttctccctgttatacgtcttcaccctgctgggaaatggggccatcctggggctcatctggctggactccagactgcacacccccatgtacttctttctctcacacctggccatcattgatatttcgtatgcttccaacaatgtccccaagatgctgacaaaccttggcttgaacaagagaaaaacaatctcctttgtcccatgcacaatgcagacctttttatacatggcttttgctcacactgagtgtctcatcttggtaatgatgtcctacgatcggtacatggctatctgccaccctctgcaatattctgtcatcatgagatggggagtgtgcacagtcctggctgtcacttcttgggcatgtggttcccttctggccctggtccatgtggttctcatcctgaggctgcccttctgtgggccccatgaaatcaaccacttcttctgtgaaatcctgtctgtcctcaagttggcctgtgctgacacctggctcaaccaggtggtcatctttgctgcttcagtgttcatcctggtggggccgctctgcctggtgctggtctcctactcgcgcatcctggcggccatcttgaggatccagtctggggagggccgcagaaaggccttctccacctgctcctcccacctttgcatggtgggactcttctttggcagcgccattgtcatgtacatggcccccaagtcccgccaccctgaggagcagcagaaggtcctttccctgttttacagccttttcaacccgatgctgaaccccttgatctatagcctgaggaacgcagaggtcaagggtgccctgaaaagagtgttgtggaaacagagatcaaagtga

SEQ ID NO: 3537 - DNA, 5519 bp, Homo Sapiens
  NM_012382
gacttctgggatttgtggtcccggagaagagattggcggaggggaaagactgagtcgtctttcctttgcccgcttctgtggactgttcgaacgcccaggggtgggccaaacccgtttcttaggaaaccaggaatccagggaaggcagaatggcttcctttgggtggaagaggaaaattggtgagaaggtctcaaaggtcacttcccagcagtttgaagctgaagctgctgatgagaaggatgtagttgacaacgatgaagggaactggcttcatgccattaaacgtaggaaagaaattcttcttgaaggctgtgctgagaaaagtaaacagctgaaggatgaaggagccagtttggctgaaaataaaagatatcgggaggcaattcagaagtgggatgaagcactacagttaactccaaatgatgctaccctatacgagatgaaatcacaggtgctaatgtctcttcatgaaatgttcccagcagtacatgcagcagaaatggccgtccagcaaaatccacattcatgggagtcttggcagactttgggacgtgctcaacttggtttaggagagataatcctggcaattcgaagttttcaagtagcccttcacatctatccaatgaaccctgaaatatggaaagaagacctctcttgggcaagaacgctccaggagcagcagaaggtagcacagaggattaaaaaaagtgaagcaccagctgaagtaacacacttttcaccaaagtcaattccagactatgactttgaaagtgatgagattgttgctgtttgtgcagctattgctgagaaagagaagacagtttcagcaaataaaacaatggttattgtgtctgcttctggggccatagagactgtaactgaaaaggaggatggtgctacaccaccagatggctctgtttttatcaaagcccgatgaagcagtatgcataggattatttgaatctgtctttttgattgcctcttgaagttttgacatagagacatttactctggagatagataggagaacgcctggttgtaaaatatgtttttcagatgaggcatataaaaactaaaatggcaggattattgtatagtgtttggaatatgctttgataagttatgatttatatttctcaaggttaaaattctgagtaaaatggtctttgattaataaacttagtttaatctgaatatgtaaatgaatacattttaaagacaaaacttgaaaaatgtattcttgaatagtgaataatttgatcaatgttactgaaatgctgtctcaacttttgttttatgataaaggaagtgtgtgatttccctccctctgagaaatatactgcgcttaatatttgctgtctttttcttgcttcattagagtaagtctgtcagaaagcttgaatatttttgacattcattttgattcaaagttgtcatttggttatatgtggaatctttgaaagtttggctgaaaatgcacacaaatgtgtacattctgaacattttctgaagtttctcttaattctgatttgtgtttctgttttgactttgaagttgtaacaatgatagttgtctccttcagtatttggtaaaagtgtaaagtattgataaatatgagaatgatggttttattttttaattgttacagtaagtaatccttaccacaaatgagtcatttttaaaatatgcatttttaaatgaatggcttttacagataggttaatgacaattgtactgctatattatcccagtcaaaaccaatactttcttttctttattttacaaagctttaaaaaccctggaaacaacttacttcttgcttgtgtctttccatttgatgactgggaattacttttctagataactttttttgaaactactcagtgaaatgaaaaataattacaattttaaatagctaattatatctttctaaaaataaaaaagtagggctgttattagagtgccaatgaataaataacttaagcacaaaatacatagaaattggaatgtgatttatagtacaatctcatgagtatgaaaaggctatattaaaaaaaattttattgaaagtccacagtcatattcacaaaccaatactgtcattgctaatctgaactattatttttatactatatattgtagtacaataatatagaactgttgggttctgttacttctgacactcaggaagatactattggtgtattaattttatctttgttagagatgaaagtagcccactttatgttaaagatcttactactgttggagcttataagtaatgatctacattttttatgaagatggtttttaaaacttttgttttattggaatgcatatctcttttcagggttggagaaattagcacttgccttgaaaagaatattctttccttaagttatatcatcagaaaattagctctggttagagaggttagtttcagagtgctccaaaaaatatgttaattattttattttgtttaataaagaacattctcaaaacgtaaataggtatctagagaagtgagtactcaacatttggtatattgttttgagtaatggatgtttgttttttgtgtaatttgtgaataaatagtttttttctgcattttgaagattttcctattattttatgttgttagcttttgaaaaattagattgatctacttagtgtctttcttatatgaacttaatatatttaaagtaccttgcatggtgcctcacacatgaagtaatgccagctatttcagtaaatgctagctatttctatgaagaacttgagttagtttggagatatttaacctcaatttcctctgattttaaaaaaggagaactttttttgtaatcctttccttatctgaaagtaagaagtctctgattccagtattataggagagatagtgggatttttcttgacagggtctatagctcaagtcccaaagaggcaagactcaggatggaatgcatgtggccactaggccctgttataagaacctagtgtttcctctgtactggcatggtaggccaagttagtctctttcttacccagatataagacataaaatagtttagacataagacagaggagaaaaagaaacagtaagttatggagaaggaaggcagctcatttctgcaggcccctcaaaatgcttattttagctcatactcttctatgcgtgaagagaaaaatgcacccattattttacaaggatgtgaatactgatatacaaacatagactaagcttgttaattttaataacaaatctttatgaatctgaagagaattgatgttcatgataatgatatagatgtttaatatactttctgaaataacactgtttactgttcaagttatattgactataatttacattattcttgtttgagaattgtatggcatagacactcattagtcagagtgtctagacatccagaccatgcctgataacacaagaatcatatatcattctctagaaaacaggctgtttggttatagagtatttatcttaaatatattaacagacactacataaacattgaaaagccatgcaagttatagctcacaggagccagatctactgcaactggggcctacatacaaaattttatggcagtggtttcagtatgacaatcttttgaattgatgccgtatggtaaaactataaagattttttaaaagctctgtctcagctagaatttttaagattataactgaacagtatagcccttttagttgtttgaaaattacataatgattcaaaagcttgtttcactgcctttcccagcactaagaaaattaacaatcatttcttttaatttccttgaatcagagccattctaaagtgactctggaccagcaattctgagctatgatttcatgatacatgtattaatatctaaatgagttgtgagttgacataagaaccatagttccataataattatcttcaaatcaatggatatcttaaatgtgtttttttcttccttagagattattattaaactgatgtatttgataataaagaattttaggactgagaaagttaagtttttcttaccaataataagatattgaaatatataaattataaaacagaaataaaatgaaataaaggaggttatccctaaagtcatttaccttagtcacttgcaattaaatatggttacttcggaagaagaagtgtggccctaaagctactgtaacatgaatcatgccctaatgtgcactatatatgaactactttggtcagaaggcagcggcgggtaaggatggcttcctctcacagtgcttcttaggctatccatttaccaaggaattctaatctctttctctcacttcaccaggaaaggagggagtttaagatatagaactgggcatgctagcctcttttttcccttttgtggatttgtcataactgcagagaaccgatgttgtggtctcttgccagctacattgtgaaccttgcagtgaaagttctttgcctctgcaaagggagatttgtgcttgtgcagaactgcccatgccttagtaagcaggtctgtctaattctaagttcaatatctggtggctattgttggcataaacttaaagtacatcctctaacctagcctttttcagcagtaaacttaaaatattgaatctccatctgtctgtgtctcaagtggttcagaggtcaggagaggagagggacattattttatgactccctcaaactttaacaaagactagtgcagattatatttcgaagtaagcatgagatatattaaaaaccacatgtgggaattctttcctaattttagaggttttttttaaataatggaaattctattgaaattgagtagtgttaattacaaggcaacaggtaaacatttgttcaggatatttaaaaggtctgctgagttggaattgtgacagaccacattgttgactctagattgaattggaagggaagaatgtgaaatgaattaggatatcctctgttcacctctattaactttcttaaatgagtataacttagaaataataaaatgcaagtattttaacgttatagttgggagagttttgacaaatgtaaacacccacttcaccaccactaccatcctgatatagtgtgtgtccatcacccaaaaagttctctaaagcccttttgcagttggttcccctccacctgaacagccatccctagtcaactacttttctgctttctgtggctatacgttagatttgacttcagaattctagagtttgaaataaataggccatataatatgcactctttttgtgtctgactttttttttgcttaacatgatgcttttgaaacccatccatgttgagattcatccatgttatcatgtgtatcaataataagttcctttttattgctgaatagtattctagtatatagatataccacaatttgtttagctgttcacctattgatggacatttaggttgtttcaagttttgatctattatgaataaagctgctatatatataaatcacaaaaaaaaaaaaaaa

SEQ ID NO: 3538 - DNA, 1313 bp, Homo Sapiens
  NM_012383
actgctccggcggccgcggggcggggcggagcactcggcggagccgctctgcctgcgtccgctcttcccgcagccaagggtgggcgccggtcctaggaggcgcacggttgtaagccagacaaaaagaactggggtgcccggagtgccaggtggcgggcaagcggtgggcttttcggcggggtctttaggatttgcagctccaggaagcgagatgtcgaagccgccacccaaaccagtcaaaccagggcaagttaaagtcttcagagccctgtatacgtttgaacccagaactccagatgaattatactttgaggaaggtgatattatctacattactgacatgagcgataccaattggtggaaaggcacctccaaaggcaggactggactaattccaagcaactatgtggctgagcaggcagaatccattgacaatccattgcatgaagcagcaaaaagaggcaacttgagctggttgagagagtgtttggacaacagagtgggtgttaatggcttagacaaagctggaagcactgccttatactgggcttgccacgggggccacaaagatatagtggaaatgctatttactcaaccaaatattgaactgaaccagcagaacaagttgggagatacagctttgcatgctgctgcctggaagggttatgcagatatcgtccagttgcttctggcaaaaggtgctagaacagacttaagaaacattgagaagaagctggccttcgacatggctaccaatgctgcctgtgcatctctcctgaaaaagaaacagggaacagatgcagttcgaacattaagcaatgccgaggactatctcgatgatgaagactcagattaattcctttctggagctttgagatctaaaacttctgttgcttttgccattccaaaactttgtctttgccagaaaagtgttggtaactataaagaaaattatatatgaacacggcagtgttgcactgtgtttgagtagaacgtgtaaatgaattgttcccacctttggtttgccagtaagtgactggattcttggcacatttatgttcaccaaagtagaacaagaagatattatttctatttatcaagcaaaaggaattttaagatttttttttttctttaaaaacaaattaggattttttttttttttttttttttagttaaaatgctttacctcaatggttgagatattttgaatggatttttcaagggggggaaatgcttattataataataaaccaaaatacttaacagaaaattgtcagctattctgacaaaaataaacattttgagagacttta

SEQ ID NO: 3539 - DNA, 4210 bp, Homo Sapiens
  NM_012384
ccgcccgccgccgccgcagctcccgacgccgccgcccccgccgggtgcctaagcaggcccggcgcggccccaggacttgggaccctggaggactgacgctgctggcctgggcgtccccttccgctgagccatggcgactcccgacgtgagtgtgcacatggaggaggtggtggttgtgacaactccggacactgcagtggacggcagtggtgtggagggggtgaagaccgtgttggtgacgaccaacttggcccctcacgggggcgacctgacggaagataacatggagacagaaaatgcagcggcagcagctgccgcggccttcacagcctcctcccagctcaaggaagccgtgttagtgaagatggctgaagagggggagaacctggaagctgagattgtgtaccccatcacctgtggagacagcagagccaacctcatctggaggaagtttgtgtgtcccggcatcaatgtgaaatgtgttcagtacgacgagcatgtaatcagcccaaaggaatttgtgcacctggccgggaagtccaccctgaaggactggaagagagccatccgcatgaacggcatcatgctcaggaagatcatggactccggggaactggacttctaccagcatgacaaggtctgctccaacacctgccgcagcacaaagattgacctctcaggagcccgtgtgtccctgagcagccccacgtcggccgagtacattcccctcacgcccgccgcagccgacgtgaatgggtctcctgcgaccatcaccatagagacctgtgaagaccctggcgactggaccgcggccattggagatgacacatttaccttctggcgggggctgaaggacgccggcctgctggacgaggtcatccaggagttccaccaggagctggtggagaccatgagaggcctgcagcagcgggtccaggaccctcccctgcagcttcgagatgctgtacttctcaacaacatcgtgcagaacttcggcatgctggacctggtgaagaaggtgctggccagccacaagtgccagatggaccgctcgcgggagcagtacgcccgggacctggcagccctggagcagcagtgtgatgagcatcgtcgccgagccaaggagctgaagcacaagtcccagcacctcagcaacgtgctcatgacgctgacgccggtctccctgccaccgcctgtgaagcggccccggcttgcacgtgccacatcaggaccggccgccatggcctcgcaggtgctcacccagtctgcccagctggcgcttggcccgggcgtgcccgtcccccagctgaccagcgtgccccttggtaaagtggtgtccaccctgccgtccaccgtcctgggcaagggttcccttcaggcgccccccgccagctccccggcctccccgctgctcgggggatacacagtcttggcctcttccggctccacctaccccagcacagtggagatccacccggacgcgtccagcctcacggtcctgagcacggccgccgtgcaggacggtagcacggtgttcaaggtggtcagcccgctacagctgctcacgttgcctggcctgggccccaccctgcagaacgtggcccaggcctcgcctggctccagcacaattgtgacagtgcccgcaggggctgcccccgggcctgaggagcacacggccaccattgaggtggctgccatggcagaggaccacgagcggaagtagccgacaggagggcgaggcccctgggacggacagggctggctgtctctcagccgcggcagcagggagcgggcagaggccgcagggctggctcgggcaggtgggtcacgtggtctgcagaaccaaagagaggaatcgccaaaacaaatcacgagaagagagaaggggacagaacagcgagagcaacctggaaaatcggtcttcaggtcccacgtttcctcccccttttttcttgggaaatatatttttccatctgttgcttattaatactgtttacacattgggccttgatcaggagccaggtgggcgggggctagggggagcctgggtgcagcagagacagaggaagcagagccaggtgccgagcgcgaccctgcaggtgctggacgcggtgcagcaggtcacgaggcccccatgtctgcacccagccaggtccctggggacgttactaactcatgacttgggagctaagcccaagtgtgaaacctctggatcctatggatttggtttcttcccacagttttctgtaggtttagtgtggctggcgccccgttctcctccagttgggaacatgcacccggagcttggggtgcagatcctgatgggtgcctgcctcccccgcccccagccggtgctcaggtggcccaggggccgcacagacgaggcgtggtccaggcattgttgcacatgtactgagggtgtttttaagtgaattgcttagtaggcttctaggaagagtcagatttatagcattttcaaccaaaataatggtgagtgcctaggcttcccgagttagctctttgggtggcccctgagcccctgtgagtgcacttgaccgggtgcggaggtcctgggcagcctgtccctgagccggcccctcccaggggtctgagatccatgaggtgtgtccctagggcttcagtcctggggcagaggcataaacagaaccagtcactatggaggtcgaggattcccatgtgggcccttcagcttgggctgcttggccacggaacagcccttggctccctggcccccggcccccatgcagcccctgggctggcccttggtggtctctgtccaagggagagcccctgggtgttcaggaggctgccccgggtgggctgctcagggcagctgccgaaggtggagcccagagcctgtctggaagggctgtctgtggctgtcctgagacctggccttggactcacaaggaagaccaggctgaggcccctccaggccagggtcctggggcaggcatctcagggagcagccagcccaggcctcctgccgtctccaacagggcatgtcccgggaggaccctgagtgccagattcccctggacgctcctgctgattctgtcggcagttgaaggcccgtctgaggccccgcaatgcgagggtcctgtgtcccacttcactgctccgaagggaactggctggctgtccgtccagtgagcggcccagaccccacctctgcgccattgtcaccagggccctgtcctggctgccctcacccatgtcaagctactgaggctgtgtcttgtttgttttctctgttacatttttgtttgctgttgtcacagtcagctggtttcggcgtgatgttgatcttttgatgtacatactccgttttaaactcatttccactctagttgagttctgcagcatgcagcggtatgaccctacgggggtcaggagagccctgcggcccccacccaccagctcagaacctgtcactaatacagctgcctgtgaccctgggacccgcaaccttccagctgcttccctttgtcaaagtcacgagtgcgtctgccttgacagccctcgtcaacagaacttccagtgggttgtgggttcatttcctttctttttaagaacagggttgggaccttttctgcccctgccccttagctactgaggcatagggagaggaagttaatttcagagccatacaaaaataagccacaaccagcttcagaattaattcccaatcccccattccaccagggctgggagcccattcccagtgcttcccaaggccctcggggacatctaccgccaacccagctgcttctggcaggggctccaagccccagcgtggggaagggccctggagaagccctcatcctcatgggaaccacactgcagtgggtggggaaggttgttgtcagcaccgcccccggctcctccaggtcctgctggctcctcgggggcagggttccctggacctcccagttctgcgccttggggccagccagtactcagagaggaggaccttctcaaccacgtacagaacacgggttttcatggctgcctttggtttggttttctgagaagataggattggattggattttgcagagggtgagaacttctctgtgcctgctcagaggcgccctagggaagggccatgtttgagttttgctttgtatgttgttttgcaagtatctgcctggtactttgatttaaaataaaaacaattttcatagtt

SEQ ID NO: 3540 - DNA, 2265 bp, Homo Sapiens
  NM_012387
acagccagagggacgagctagcccgacgatggcccaggggacattgatccgtgtgaccccagagcagcccacccatgccgtgtgtgtgctgggcaccttgactcagcttgacatctgcagctctgcccctgaggactgcacgtccttcagcatcaacgcctccccaggggtggtcgtggatattgcccacggccctccagccaagaagaaatccacaggttcctccacatggcccctggaccctggggtagaggtgaccctgacgatgaaagtggccagtggtagcacaggcgaccagaaggttcagatttcatactacggacccaagactccaccagtcaaagctctactctacctcaccggggtggaaatctccttgtgcgcagacatcacccgcaccggcaaagtgaagccaaccagagctgtgaaagatcagaggacctggacctggggcccttgtggacagggtgccatcctgctggtgaactgtgacagagacaatctcgaatcttctgccatggactgcgaggatgatgaagtgcttgacagcgaagacctgcaggacatgtcgctgatgaccctgagcacgaagacccccaaggacttcttcacaaaccatacactggtgctccacgtggccaggtctgagatggacaaagtgagggtgtttcaggccacacggggcaaactgtcctccaagtgcagcgtagtcttgggtcccaagtggccctctcactacctgatggtccccggtggaaagcacaacatggacttctacgtggaggccctcgctttcccggacaccgacttcccggggctcattaccctcaccatctccctgctggacacgtccaacctggagctccccgaggctgtggtgttccaagacagcgtggtcttccgcgtggcgccctggatcatgacccccaacacccagcccccgcaggaggtgtacgcgtgcagtatttttgaaaatgaggacttcctgaagtcagtgactactctggccatgaaagccaagtgcaagctgaccatctgccctgaggaggagaacatggatgaccagtggatgcaggatgaaatggagatcggctacatccaagccccacacaaaacgctgcccgtggtcttcgactctccaaggaacagaggcctgaaggagtttcccatcaaacgcgtgatgggtccagattttggctatgtaactcgagggccccaaacagggggtatcagtggactggactcctttgggaacctggaagtgagccccccagtcacagtcaggggcaaggaatacccgctgggcaggattctcttcggggacagctgttatcccagcaatgacagccggcagatgcaccaggccctgcaggacttcctcagtgcccagcaggtgcaggcccctgtgaagctctattctgactggctgtccgtgggccacgtggacgagttcctgagctttgtgccagcacccgacaggaagggcttccggctgctcctggccagccccaggtcctgctacaaactgttccaggagcagcagaatgagggccacggggaggccctgctgttcgaagggatcaagaaaaaaaaacagcagaaaataaagaacattctgtcaaacaagacattgagagaacataattcatttgtggagagatgcatcgactggaaccgcgagctgctgaagcgggagctgggcctggccgagagtgacatcattgacatcccgcagctcttcaagctcaaagagttctctaaggcggaagcttttttccccaacatggtgaacatgctggtgctagggaagcacctgggcatccccaagcccttcgggcccgtcatcaacggccgctgctgcctggaggagaaggtgtgttccctgctggagccactgggcctccagtgcaccttcatcaacgacttcttcacctaccacatcaggcatggggaggtgcactgcggcaccaacgtgcgcagaaagcccttctccttcaagtggtggaacatggtgccctgagcccatcttccctggcgtcctctccctcctggccagatgtcgctgggtcctctgcagtgtggcaagcaagagctcttgtgaatattgtggctccctgggggcggccagccctcccagcagtggcttgctttcttctcctgtgatgtcccagtttcccactctgaagatcccaacatggtcctagcactgcacactcagttctgctctaagaagctgcaataaagtttttttaagtcactttgtac

SEQ ID NO: 3541 - DNA, 1997 bp, Homo Sapiens
  NM_012392
aattacgtcactatcatgcgtcccatttgccaggttataacatggctaccgcagcaacaccccacccaggcttctcactaaatttcccaacctgaccacctcttcggcccactccacctcaggaaaaggaggaacattagcgctggtacagccgccaagacttccggaagctccatcaatcacttagctcccctggtctctcgggtaggcatccgcccaccgcccccatcgtcacttccgtcggccgacagcacccaagattgacaggcgcggacgtccaatcagatgcgggcccagccccaaagccgagacgaggggcgggtttgagagcggaaagccccaccccttgcctgagtgtgacgtcagaatcaccatggccagctatccttaccggcagggctgcccaggagctgcaggacaagcaccaggagcccctccgggtagctactaccctggaccccccaatagtggagggcagtatggtagtgggctaccccctggtggtggttatgggggtcctgcccctggagggccttatggaccaccagctggtggagggccctatggacaccccaatcctgggatgttcccctctggaactccaggaggaccatatggcggtgcagctcccgggggcccctatggtcagccacctccaagttcctacggtgcccagcagcctgggctttatggacagggtggcgcccctcccaatgtggatcctgaggcctactcctggttccagtcggtggactcagatcacagtggctatatctccatgaaggagctaaagcaggccctggtcaactgcaattggtcttcattcaatgatgagacctgcctcatgatgataaacatgtttgacaagaccaagtcaggccgcatcgatgtctacggcttctcagccctgtggaaattcatccagcagtggaagaacctcttccagcagtatgaccgggaccgctcgggctccattagctacacagagctgcagcaagctctgtcccaaatgggctacaacctgagcccccagttcacccagcttctggtctcccgctactgcccacgctctgccaatcctgccatgcagcttgaccgcttcatccaggtgtgcacccagctgcaggtgctgacagaggccttccgggagaaggacacagctgtacaaggcaacattcggctcagcttcgaggacttcgtcaccatgacagcttctcggatgctatgacccaaccatctgtggagagtggagtgcaccagggacctttcctggcttcttagagtgagagaagtatgtggacatctcttcttttcctgtccctctagaagaacattctcccttgcttgatgcaacactgttccaaaagagggtggagagtcctgcatcatagccaccaaatagtgaggaccggggctgaggccacacagataggggcctgatggaggagaggatagaagttgaatgtcctgatggccatgagcagttgagtggcacagcctggcaccaggagcaggtccttgtaatggagttagtgtccagtcagctgagctccaccctgatgccagtggtgagtgttcatcggcctgttaccgttagtacctgtgttccctcaccaggccatcctgtcaaacgagcccattttctccaaagtggaatctgaccaagcatgagagagatctgtctatgggaccagtggcttggattctgccacacccataaatccttgtgtgttaacttctagctgcctggggctggccctgctcagacaaatctgctccctgggcatctttggccaggcttctgccctctgcagctgggacccctcacttgcctgccatgctctgctcggcttcagtctccaggagacagtggtcacctctccctgccaatactttttttaatttgcattttttttcatttggggccaaaagtccagtgaaattgtaagcttcaataaaaggatgaaactctggagttcaaaaaaaaaaaaaaaaaa

SEQ ID NO: 3542 - DNA, 5400 bp, Homo Sapiens
  NM_012393
gatgacgtaacaaacgcgcgcgacgattcgaggtgctctgtggccgcgagtgcatcttccacgaacctaattcatctctccagcaaaggacacatctctccagcaaaggacacctctctccagcaaaggacacctgcagagatgtccccagtccttcacttctatgttcgtccctctggccatgagggggcagcccctggacacactcggaggaaactgcaagggaaactgccagagctgcagggcgtcgagactgaactgtgctacaacgtgaactggacagctgaggccctccccagtgctgaggagacaaagaagctgatgtggctgtttggttgccccttactgctggatgatgttgctcgggagtcctggctccttcctggctccaatgacctgctgctggaggtcgggcccaggctgaacttctccaccccaacatccaccaacatcgtgtcagtgtgccgcgccactgggctggggcctgtggatcgtgtggagaccacccggcgctaccggctctcgtttgcccaccccccgtcagctgaggtggaagccattgctctggctaccctgcacgaccggatgacagagcagcacttcccccatcccatccagagtttctcccctgagagcatgccggaacccctcaatggccctatcaatatactgggtgagggccggcttgcgctggagaaggccaaccaggagcttggtctggctttagactcttgggacctagacttctacaccaagcgcttccaggagctacagcggaacccgagcactgtggaggcctttgacttggcgcagtccaatagcgagcacagccgacactggttcttcaagggccagctccacgtggatgggcagaagctggtgcactcactgtttgagtccatcatgagcacccaggaatcctcgaaccccaacaacgtcctcaaattctgtgataacagcagtgcaatccagggaaaggaagtccgattcctacggcctgaggaccccacacggccaagccgcttccagcaacagcaagggctgagacatgttgtcttcacagcagagactcacaactttcccacaggagtatgcccctttagtggtgcaaccactggcacagggggccggattcgagatgtccagtgcacaggccgcggggcccacgtggtggctggcactgccggctattgctttggaaatctgcatattccaggttacaatctgccctgggaggatccaagcttccagtatcctgggaattttgcccggcccctggaggttgccattgaagccagtaatggagcttctgactatggcaacaagtttggggaaccagtgctggctggcttcgcccgctccttgggcctccagctcccagacggccagcggcgtgagtggatcaagcccatcatgtttagtgggggcattgggtccatggaagctgaccacataagcaaggaggccccagagccaggcatggaagttgtaaaggttggaggtcccgtctacaggattggagttggaggtggagctgcttcatctgtgcaggtgcagggagataacaccagtgacctggactttggggctgtgcagcgaggagacccggagatggaacagaagatgaaccgtgtgatcagggcttgtgtggaggcccccaagggaaaccccatctgcagccttcatgatcagggcgctggtggcaatggcaatgtcctaaaagagctgagtgacccagctggagccatcatttacaccagccgcttccagcttggggacccaaccctgaatgccctggaaatctggggggctgagtaccaggaatcaaatgctcttctgctgaggtcccccaaccgggacttcctgactcatgtcagtgcccgtgaacgttgcccggcttgcttcgtgggcaccatcactggagaccggagaatagtgctggtggacgatcgggagtgtcctgtcagaagaaatggccagggggatgcccccccgacacccctgccaacccctgtggacctggagctcgaatgggtgctgggcaagatgcctcggaaggagttcttcctgcagaggaagccccccatgctgcagcctctggccttgcccccagggctgagcgtgcaccaggctctggagagggttctgaggctgcccgccgtggccagcaagcgctacctcaccaataaggtggaccgctctgtgggaggcctggtggcccagcagcagtgcgtggggcccctgcaaactcctctggcagatgtagcggttgtggcactgagccatgaggagctcataggggctgccacagccttgggagaacagccagtcaagagcctgctggacccaaaagtcgccgcccggctggccgtggccgaagccctcaccaacctggtgtttgctctggtcactgacctccgggatgtgaagtgtagcgggaactggatgtgggcagccaagctcccaggggagggcgcagctttggcggatgcctgtgaggctatggtggcagtgatggcagccctgggtgtggcagtggatggtggcaaggactccctcagcatggctgctcgggttggcactgagaccgtgcgggctcctgggtcactggtcatctcagcctatgccgtctgcccagacatcacagccactgtgaccccagacctcaagcatcctgaagggagaggccatctgctctatgtggctctgagccctgggcagcaccggctcgggggcacagctctggcccagtgcttctcccagcttggggaacaccctccagacctggaccttcctgagaacttggtgcgggccttcagcatcactcaggggctgctgaaagaccgcctcctctgctcaggccacgatgtcagtgacggaggcctcgtcacatgcctgctggagatggcctttgctggaaattgcgggctacaggtggatgtgcctgtccccagggttgatgtcctgtctgtgctgttcgctgaggagccaggcctcgtgctggaggtgcaggagccagacctggcccaggtgctgaagcgttaccgggatgctggcctccattgcctggagctgggccacacaggcgaggccgggccccacgccatggtccgggtgtcagtgaacggggctgtggttctggaggagcctgttggggagctgcgagccctctgggaggagacgagtttccagctggaccggctacaggcagagcctcgctgtgtggcagaggaggaacggggcctgagggagcggatggggcccagctattgcctgccccccacctttcccaaagcctccgtgccccgtgagcctggtggtcccagcccccgagtcgccatcttgcgagaggagggcagtaatggagaccgggagatggccgatgccttccacttagctgggtttgaggtatgggacgtgaccatgcaggacctctgctctggggcaattgggctggacactttccgtggcgtggccttcgtgggcggcttcagctatgcagatgtcctgggctctgccaaagggtgggcagctgctgtgacctttcatcccagggctggggctgagctgaggcgcttccggaagcggccagacaccttcagcctgggcgtgtgtaatggctgtcaactgctggctctgctcggctgggtgggaggcgaccccaatgaggatgctgcagagatgggccctgactcccagccagcccggccaggccttctgctacgccacaacctgtctgggcgctacgagtctcgctgggccagcgtgcgtgtggggcctgggccagccctgatgctgcgagggatggagggcgccgtgctgcccgtgtggagtgcgcacggggaaggttacgtagcattttcttctccggaactccaagctcagattgaggccaggggcttggctccactgcactgggctgatgatgacgggaaccccacagagcagtaccctctgaatcccaatgggtccccagggggcgtggctggcatctgctcctgtgatggccgccacctggctgtcatgcctcaccctgagcgggccgttaggccttggcagtgggcatggcgaccccctccatttgatactctgaccacctccccctggctccagctctttatcaatgcccgaaactggaccctggaagggagctgctgactggccacaggggctcacctgggccccatggcttttcacctaagtgggtcctgccccctcccccatgaccttcaggagcaccccatattatttccaaaaatatcttggacagacaaggaccaaaatgccaaaatctcagcggactcgataatctgcctgctgatgttccttctgtggctgtgtctattttcagttctgctctaacatggcatgccctttctcagcccaggaaacagcatgtggttcagagaaaagagcgacaaggaaaagttaggactcctgaggtccgaacaggggcttctgttgcccacttcacaacacccagtgatcaccggtgtgcaattgcctccttggctctgagggatgttttgcgctcccttttctcatcattggggttagcgggtgcagacaaattcagcaatagtatgcagatcagcccctcaccacctcattgttctcatctggaactgaaactttctggatttctcttgaagtgctacactgcactgaatgtaaggaattgttgcttgtggaagtttctcagcgtttctggctgtcttagggctggcctcagaacccagcattcctgttatttgcttctaaattagcagctctctttttttttttttttttgaggcagtctcactctgtcacccaggctggagtacaatggcgtgatctcggcccactgcaacctctgcctcctgggttcaagcaattttcctgcctcagcctcccgagtagctgggagtacaggcacacaccaccacacccagctaatttttgtatttttagtagagatagggtttcaccatgtctcccaggctggtctcaaactcctaacctcaagtgattcgcctgcctcggcctcccaaagtgctgggattacaggtgggagccactacagctggcccagcagctctgtttctgatagaggtggttggggctctcatccctagatcctaaccctttagtatgctggaattctactcttcacttactgcattgactgttgttgattagttattattgcaaagcactgtcaccggcctcagggagtttatgtgtaatagaattaaaaataatagctgtgtataacacttagctcaagccacgcatgtgtgaggcatttggtatgtatctgaattaattctcactaaaattcagcaaaggacttgatagcccctccccgccttttcaataaaggatgaatgaaggttgactgcaaaaaaaaaaaaaaaa

SEQ ID NO: 3543 - DNA, 4953 bp, Homo Sapiens
  NM_012395
gcatccccttgattaaatgtttttcctcctatgcaatcaccattagctgtttggctcccattctgtattcttctgaagcagccctgcattgcaaatcaatatctttctgaaaagacagtgtgttgtgaattgccttgacagcatatgcacggttactttggctgcaatgctgctgcagagcccggttactctgccttcgtgggaactccacagatatgtgtcacaaagatgtctacacggaactgccagggaatggactcagtgatcaaacccctggacacaattcctgaggataaaaaagtcagagttcagaggacacagagcacttttgacccatttgagaaaccagctaatcaagtaaagagggtgcattctgagaacaatgcttgcattaactttaagacctcctccactggcaaagagtcacctaaagttaggcggcactccagccccagctcgccaacaagtcccaaatttggaaaagctgactcatatgaaaagctggaaaaactaggggaaggatcttatgctacagtatacaaagggaaaagcaaggtaaatgggaagttggtagctctgaaggtgatcaggctgcaggaagaagaagggacacctttcacagctatcagggaagcttctcttttaaaaggactaaaacatgctaacatagtgctacttcatgacatcatccataccaaggagacgctgacacttgtgtttgaatatgtgcacactgatttatgtcagtacatggacaagcaccctggggggctgcatccagataatgtgaagttgtttttatttcagttgctgcgaggtctgtcttacatccaccagcgttatattttgcacagagacctgaaaccacagaaccttctgatcagtgacacgggggagttaaagctggcagatttcggtcttgcaagagcaaaatccgtccctagccacacatactccaacgaagtggttaccttgtggtacagacctccagatgtccttctaggctcaacagaatattccacctgccttgacatgtggggagtaggttgcatctttgttgaaatgatccaaggagttgctgcttttccaggaatgaaagacattcaggatcaacttgaacgaatatttctggttcttggaacaccaaatgaggacacatggcctggagttcattctttaccacattttaagccagaacgctttaccctgtacagctctaaaaaccttagacaagcatggaataagctcagctatgtgaaccatgcagaggacctggcctccaagctcctacaatgttccccaaagaacagactgtcggcacaggctgccttgagccacgagtattttagtgacctgccgccacggctatgggaactcaccgacatgtcttctatttttactgtcccaaatgtgagattgcaaccagaagctggagaaagcatgcgggcctttgggaaaaacaatagttatggcaaaagtctatcaaacagcaagcactgacaagcagcacattctcaagagcacacaggattaagttgtcatcattctgggaagaaaaaaaaaacattaatgaagaggccaataatatgaagggaatcatggatcagttttctttcgctccctgtggtggatttcacttacaagaaaattgaagctggcaagaccctgttttctctgcaatttatttaaaaccttgcacgcatttggataccttgtgatttccaagaactacgtgaagattaagctttgcttactgatacatggcatgtattcttttcagtcttttgtgtttgattttgtttgatttccctctgcagcacagcgtctctgtaaaggtttttatgctttcaccagccatgtcttaaatacattaagacaacacatttggtgttcacacttcttcagtaatgtctgaacttgaaagccacagagtggcataaaacaatgtgtgttttctttgagagcagtgcacattttgcaaccactaggaaggaaattttctgctaaagcaaacccctgttctctgacttgacaacttggccccggactgtggggccccacctgttgcttaccttttgaggtaattttgcaaatgtggtttttttacttggaaataactgcacatttatatataggatattggactctgcttagcattttcaagccacatagcatgactgttttttgaataggttggaattgaaaaaacaattatcaaacgttaagaacaaagacagggataaattgcttacatttcaacctctagagattgaggtaactttttgtgtctgggtcttgtcaacatctaatttttttccatccattctgttacactttgtattttctaactggagaaaagagtgaggaacagaatgttttaaatctggtgcaaaagaactatatctgctggatgagccttgaaagcagtcttggcctgttagggcttacaaagtaaattacaaagtgatccagttcaaagtttgcttagttacaacaaagcacctttaaaaaaaatacattttaaaaaaacattccaagccaattggaagacatcattgggttcttactttaagacatctcctggaataactgttcaaatgcaggttttagaaacaatgcaggaatcttgctttaaagatgaaaaagggaatgggccagcttcccttactcaaggagttgagggaccttggaggatgaaggcgagtatgtgacactggagaaaagtggaccaggcatgtcttttgctttgatctggagggagggctgcctgatgcaggccggctcccagtggggcaggcctcgctgcagaatgcccagtagtactgcggccaaggggacagttaggagacttcatctaaagcatgaaacctagctcctctacacacaaattcctatggaaatacctttgtgtacagtgtcttacattttcctattagtcagaaagaaggagagaatgagtgagtgcttgaaatgtgtcatactgttttaggatcaagactaggaattaggagccaggttgacaaggactttttctgagagttgggtgagggtaaagcttttctataatcaagctcaatacaccaaggaaactggatccagaattcctaaactttaaaatggtactgtctgcggagtggagtatggatggttatgtcaaagtcatagttcatcctatccagatgtagcattcatggtaaacttttaagtgctaagcaaggaattatttactgattggttttaaagagagcagaaaacacccaagtgtagaatgtctactgtttgctacctagaaatcttttccattcctctttcatacattccaacccactggaagtctttagaggtattttgatttaaagtatacttaaattaggatttcttaaagaaaacatagggagaaaactttacatgcaattaaaaatggactttcctgtgatttgtttttaatcattcatttggagaagaggcatgacctttgtatttcactaagtttaaagcaagagcaactgatgattaaatgttgctttttaataaggtttttaacttgaaaatttgaaaatatttaatgttgaaagacttcaattagggctattagagttatatctccctgtcgtaggcagcttcttcggagaagtgaaatataacattactcagtggacggagaagtctgttttgttacagagacatgcctctcagaaggtcaggaggttttgagtacctatccttgccacccatacaggaaatccaaagtttggtgtctctctctctctgtctctttctttctctttctccccccaaacccctctcactccctccctccctctctccttcccctatttgcaatcatattctccctctgcttcttttctcttctgccctccttgtgggcagtcatgaaaatcaattcagactgtgttcattagcagatttattattctattgagaaagcactggaatgttttgtgagattatttttatatgaaggaatagcctgaactcaaacagatggtaagaatagtacaaacaccttagcacatcactgcacacacagtattctgaaaggagatttgacacttaattcccattttcttaaaataacagttttgttgacttaaaaatatgagatacataggatgtgaaaaaaaatgtttgcagtactcagcaaaaaatagggtacataaagcagggtggctgtccatccactgattctggggtgagaagcgatttctacctcgcaagagtgactagaaagtttctaggagcacctccaggcttgcaaagaaagtgaggcctcttggtatcctttcctcagtgtgtatatgacagccagtataatcaataccctaggttatgcgtctatatgatactcatctgtgaatattattggttttgtaatctttgttatataagaggatgtttaggctgtatatactggggtagattattgcctgccccttatacataggaatatgctgcataattgcgcataacttccatctcccttactggcttgtaggcagaggaaactgtatatgttactgccttgtacttttctcatacaccaaaaacacaccaaaaaaatcaataaaataagcaatcttctattctcattccttttcccacagcagcatattttagaggcacatacaaaacctacattctctagttgggagtggatttttaaagttttccttttatcttttatttttttttgtatgatgcactgagatgtgtactttctaacaggggattggtacctaagaaatgtggtagcattattcagaaaactattatactttcaaatgacacatagtaaggagaatggaataatacatgttgcatatttgttaccagttgtaatttgtctgtattatgaaagatgtaatggtttgtcagctgtcactgttgttttcttgtaacatgatatggaataaagtatagcagaatctccgt

SEQ ID NO: 3544 - DNA, 5082 bp, Homo Sapiens
  NM_012398
ctcccttggccggcggcgcttgttgttcggcggcggcggtcgcagctcgggtccccctcgggcgcccccgccgccgtccgcgcgcggccatggagctggaggtaccggacgaggcggagagcgctgaggcgggggccgtgccctcggaggcggcgtgggcggcagagagcggggcggcggcaggtttggctcagaagaaggcggccccaacagaggttctgtccatgacggcacagccgggccctggccatgggaagaagttgggccatcgaggtgtggacgcatccggcgaaaccacctacaagaagaccacctcctccaccctgaagggtgccatccagctgggcatcggctacaccgtgggccacctgagctccaagcccgaacgcgacgtgctcatgcaggacttctacgtggtggagagcatcttcttccccagcgaaggcagcaacctcacccccgcccaccacttccaggacttccgcttcaagacctatgcacctgtcgccttccgctacttccgggagctctttgggatccggccagatgattacttgtactccctgtgcaatgagccgctgatcgagctgtccaacccgggcgccagtggctccctcttctacgtcaccagcgacgacgagttcatcatcaagaccgtcatgcacaaggaggccgagttcctgcagaagctgctccctggctactacatgaacctcaaccagaacccgcggacgctgctgcccaagttctatgggctgtactgcgtgcagtcggggggcaagaacatccgcgtcgtggtcatgaacaacatcctgccccgcgtggtcaagatgcacctcaagttcgacctcaagggctccacctacaagcggcgcgccagcaagaaggagaaggagaagagcttccccacctacaaggacctggacttcatgcaggacatgcccgaggggctcctgctggacgccgacaccttcagcgccctggtcaagacgctgcagcgggactgcctggtcctggaaagtttcaagatcatggactacagcctgctgctgggcgtgcacaacatcgaccagcacgagcgcgagcggcaggcgcagggcgcccagagcacctcagatgagaagcggcctgtgggccagaaggcgctctactccacggccatggagtccatccagggtggcgccgcgcgcggggaggccatcgaatcggatgacacgatgggcgggatccccgctgtgaacggccgcggggagcggctgctgctgcacattggcatcatcgacatcctgcagtcctacaggttcatcaagaaactggagcacacctggaaggccctcgtccacgatggggacacggtgtccgtccaccgccccagcttctatgccgagcgctttttcaagttcatgagcaacacggtctttcggaagaactcctccctgaagtcctcgccctccaagaaggggcgcggcggagccttgctagctgtgaaaccgctggggcccaccgctgccttctcggccagccagatccctagcgagcgggaggaggcccagtacgacctgcggggggcccgcagctaccccacgctggaggacgaaggccggcccgacctcctgccctgcacgccaccttctttcgaagaagccactacagcctccattgccacgactctgtcatccacatccctctccattcctgagcggtccccctcggagacgtcggagcagccgcggtacaggcggcgcacacagtcgtctggacaggatggcaggccgcaggaggagccacccgcggaagaggatctgcagcagattacagtgcaggtggagcctgcgtgcagcgtggagattgtggtccccaaagaggaggacgcaggggtggaggcttccccggccggtgcctctgctgctgttgaagtagaaactgccagccaggcctcagacgaggagggcgcacctgccagccaggcctcggacgaggaggacgcgcccgccaccgacatctactttcccaccgatgagaggagctgggtgtactccccgctccactatagcgcccaggcccccccggcctccgacggcgagagcgacacataatttctatgcagcccccgacccagagccgagctccacttctgctccggctgcccccgaaggcgctgcccaccccgctgaggcccagagctcgggagatgcccgcctcgccgccccaccggacctcgtcctccccctgcacggatgccgacggccgggcccctccccgacaagcctcccagggccccggcaccccggtcggcagcctgcccctgtgagacccaccctcccgagcggccaatcgcatttgagtccttatttggcacagagacggaagcacgtgtgtgccgttttaggaaaagaacaaaaaagacacaaacaaaccaaccagagggagaagagcccctgcccactgcactctttggttctctgctgtgcctgcctgtgtcctgaggaagaagccaggctgttcgcggtggcctctggggacctgagccccgggggccccatcggcctgcagaggggacggctggggtcccgagcaactctgcctccatccacgtgggaagcggaccctcctgccctcagcttgggtttgggggcctcagtgcaggacatctggcctgaacatcgactgtggggacagccctcgccctgccaagcactgcggccactcagcagctatgttcccgccgcagtggggccctgacgcccacctcccaggtgcccctcgagcaaaaacctctggcgcctccaatccagacccaccacagctggagggccaggcctcctcttccccaggctgccacccacgctggcggagctcagggctggggacttgtccttctcttccaacgtaggccactcagcaactggcatggagggcccaggcaacggagacgttttctccatggcaggacagagcgggaggccgggccttgggccacaggagaccagctcagggcggaaggtcaggctccccgccccctccacgtggagacatggcctagggggccaggcccggctccacaggagtctccttcaggactggtgtggatgtccgccgcctctttcttgtttaagtgatgtgatgtctccgaggaggggagagaagactttgtttccgactcatcaccctccaagagggcagcgctcccagtggtgggactcagcccagactgccctggggcagcttcctgggcccgctgcgctcagagggtgctggttggaggccagagctcggcagagtcacccaccctgcccttccccaggacccctgagaggggcttattggtgatggctgtgggaatcccccacttccaagatgtgcccaggatgtgaggagctggagtggaagctgcacctttgggaagaattcctctccagacctggcagagcctggtgtggggtctgagacggccggagaacctcccaggcagggctctgtgttttgtctgttacaacctccgtatgacgccacgccacccgctgttcacgtcccgtcggcctcctgcacagcccacacgctgcgcccggaaggcccctgctgtggagaagccggacccatccccgaggtccccagcgaggacacacactccacgagagcagcccctccactctgcccaggagaggggccgaccctcctcgggaaccggccagccgcgtggctcccagcatccatcaggacaagcccacgtggggtcctccctgcgtgctcagagggtctgtccagccctgggaagcgaccttggcctcagttcacagcctggtgctcatctgctggcaccgggcatccacccatcagcccccgccctgtccctccgaaggacacccagcaggcaccccccggggaggcaggggcagaggtcagaaggggtgtctgggacctggatggccagcagggacaggggcattgtcatctcaaaggcccaacccccagaggccacaccagtcctcccagggagtcctcgagtcgccctgcccagagccctggcaccagagacgccaagagcctgtggggtgactcggagcagcaggtgtggccccgggcgggcggcaccgcgtccagggcagcctccctccgctgagtgacacgggacaccagtgcccggccgacgcgcctttgcaggagaaatgtgcaaacctctgtggataccatttcatttccattcttgtgttgtctccaaggcccttttggagatatacttggtgttggttgtgttttttggttccttttcagagaactgtaaaccgaggctgacgtgctccactgactgtgccgaggggcgggggcaggaggacggcaagacctatttataatatttagcgaactcggtctccctcagatcccccgcgagggaggctgctggacccaccccgctgtcccccatgatagaagtctgtaaataccttggtgaccaatgcccacttcccctcctgggtcacctctgatggctgctgtccactgagaacgtgggcagtgtccaaattcctgtactgtaaagactaaaaggcgtttgctctgagactgacaaggcggaaacttccatgtgtctcctgccaggctctgtccccctacgccatcccgacacgtccccgttcccccgaaacctggctcagtgcaatactcccattgccatggggtccttcaccatggtactgtctccacagccctcagtccccaccccaggagaggcgcctgccacctcctcctcatctccggtggttcaatcgctccgcctgtccccaacccagtcccatttttatggccaaactgattctgaaacaaaatgaaactgcaaacctcgtgtgtcttaactccccccagggatgccactccattcctccgccccgtggtctggtgcgtgacaatccaaagcgccgagacgagggtgctgtgtccctcaaacccagagtggtgggcgcctctgaaaccatacagccactcctggccccaaacactggtttgcatcccaggttcctcgcccacctacccccgccacaccccgtctttttagagatctctctaataaatcgggtaataagcatc

SEQ ID NO: 3545 - DNA, 6369 bp, Homo Sapiens
  NM_012401
cccacgcgtccggccttggcggcggacgtgcagagaatctcgatgctggcctggagcagaaactgagctggaccactggagcctcggtgagggggtgcggggggcaatggcactgcagctctgggccctgaccctgctgggcctgctgggcgcaggtgccagcctgaggccccgcaagctggacttcttccgcagcgagaaagagctgaaccacctggctgtggatgaggcctcaggcgtggtgtacctgggggcggtgaatgccctctaccagctggatgcgaagctgcagctggagcagcaggtggccacgggcccggccctggacaacaagaagtgcacgccgcccatcgaggccagccagtgccatgaggctgagatgactgacaatgtcaaccagctgctgctgctcgaccctcccaggaagcgcctggtggagtgcggcagcctcttcaagggcatctgcgctctgcgcgccctgagcaacatctccctccgcctgttctacgaggacggcagcggggagaagtctttcgtggccagcaatgatgagggcgtggccacagtggggctggtgagctccacgggtcctggtggtgaccgcgtgctgtttgtgggcaaaggcaatgggccacacgacaacggcatcatcgtgagcactcggctgttggaccggactgacagcagggaggcctttgaagcctacacggaccacgccacctacaaggccggctacctgtccaccaacacacagcagttcgtggcggccttcgaggacggcccctacgtcttctttgtcttcaaccagcaggacaagcacccggcccggaaccgcacgctgctggcacgcatgtgcagagaagaccccaactactactcctacctggagatggacctgcagtgccgggaccccgacatccacgccgctgcctttggcacctgcctggccgcctccgtggctgcgcctggctctggcagggtgctatatgctgtcttcagcagagacagccggagcagtggggggcccggtgcgggcctctgcctgttcccgctggacaaggtgcacgccaagatggaggccaaccgcaacgcctgttacacaggcacccgggaggcccgtgacatcttctacaagcccttccacggcgatatccagtgcggcggccacgcgccgggctccagcaagagcttcccatgtggctcggagcacctgccctacccgctgggcagccgcgacgggctcagaggcacagccgtgctgcagcgtggaggcctgaacctcacggccgtgacggtcgccgccgagaacaaccacactgttgcttttctgggcacctctgatggccggatcctcaaggtgtacctcaccccagatggcacctcctcagagtacgactctatccttgtggagataaacaagagagtcaagcgcgacctggtactgtctggagacctgggcagcctgtacgccatgacccaggacaaggtgttccggctgccggtgcaggagtgcctgagctacccgacctgcacccagtgccgcgactcccaggacccctactgcggctggtgcgtcgtcgagggacgatgcacccggaaggccgagtgtccgcgggccgaggaggccagccactggctgtggagccgaagcaagtcctgcgtggccgtcaccagcgcccagccacagaacatgagccggcgggcccagggggaggtgcagctgaccgtcagccccctccctgccctgagcgaggaggacgagttgctgtgcctttttggggagtcgccgccacaccccgcccgcgtggagggcgaggccgtcatctgcaactccccaagcagcatccccgtcacaccgccaggccaggaccacgtggccgtgaccatccagctcctccttagacgaggcaacatcttcctcacgtcctaccagtaccccttctacgactgccgccaggccatgagcctggaggagaacctgccgtgcatctcctgcgtgagcaaccgctggacctgccagtgggacctgcgctaccacgagtgccgggaggcttcgcccaaccctgaggacggcatcgtccgtgcccacatggaggacagctgtccccagttcctgggacccagccccctggtgatccccatgaaccacgagacagatgtgaacttccagggcaagaacctggacaccgtgaagggttcctccctgcacgtgggcagtgacttgctcaagttcatggagccggtgaccatgcaggaatctgggaccttcgcctttcggaccccaaagctgtcccacgatgccaacgagacgctgcccctgcacctctacgtcaagtcttacggcaagaatatcgacagcaagctccatgtgaccctctacaactgctcctttggccgcagcgactgcagcctgtgccgggccgctaaccccgactacaggtgtgcgtggtgcgggggccagagcaggtgcgtgtatgaggccctgtgcaacaccacctccgagtgcccgccgcccgtcatcaccaggatccagcctgagacgggccccctgggtgggggcatccgcatcaccatcctggggtccaatttgggcgtccaagcaggggacatccagaggatctctgtggccggccggaactgctcctttcagccggaacgttactccgtgtccacccggatcgtgtgtgtgatcgaggctgcggagacgcctttcacggggggtgtcgaggtggacgtcttcgggaaactgggccgttcgcctcccaatgtccagttcaccttccaacagcccaagcctctcagtgtggagccgcagcagggaccgcaggcgggcggcaccacactgaccatccacggcacccacctggacacgggctcccaggaggacgtgcgggtgaccctcaacggcgtcccgtgtaaagtgacgaagtttggggcgcagctccagtgtgtcactggcccccaggcgacacggggccagatgcttctggaggtctcctacggggggtcccccgtgcccaaccccggcatcttcttcacctaccgcgaaaaccccgtactgcgagccttcgagccgctacgaagctttgccagtggtggccgcagcatcaacgtcacgggtcagggcttcagcctgatccagaggtttgccatggtggtcatcgcggagcccctgcagtcctggcagccgccgcgggaggctgaatccctgcagcccatgacggtggtgggtacagactacgtgttccacaatgacaccaaggtcgtcttcctgtccccggctgtgcctgaggagccagaggcctacaacctcacggtgctgatcgagatggacgggcaccgtgccctgctcagaacagaggccggggccttcgagtacgtgcctgaccccacctttgagaacttcacaggtggcgtcaagaagcaggtcaacaagctcatccacgcccggggcaccaatctgaacaaggcgatgacgctgcaggaggccgaggccttcgtgggtgccgagcgctgcaccatgaagacgctgacggagaccgacctgtactgtgagcccccggaggtgcagcccccgcccaagcggcggcagaaacgagacaccacacacaacctgcccgagttcattgtgaagttcggctctcgcgagtgggtgctgggccgcgtggagtacgacacacgggtgagcgacgtgccgctcagcctcatcttgccgctggtcatcgtgcccatggtggtcgtcatcgcggtgtctgtctactgctactggaggaagagccagcaggccgaacgagagtatgagaagatcaagtcccagctggagggcctggaggagagcgtgcgggaccgctgcaagaaggaattcacagacctgatgatcgagatggaggaccagaccaacgacgtgcacgaggccggcatccccgtgctggactacaagacctacaccgaccgcgtcttcttcctgccctccaaggacggcgacaaggacgtgatgatcaccggcaagctggacatccctgagccgcggcggccggtggtggagcaggccctctaccagttctccaacctgctgaacagcaagtctttcctcatcaatttcatccacaccctggagaaccagcgggagttctcggcccgcgccaaggtctacttcgcgtccctgctgacggtggcgctgcacgggaaactggagtactacacggacatcatgcacacgctcttcctggagctcctggagcagtacgtggtggccaagaaccccaagctgatgctgcgcaggtctgagactgtggtggagaggatgctgtccaactggatgtccatctgcctgtaccagtacctcaaggacagtgccggggagcccctgtacaagctcttcaaggccatcaaacatcaggtggaaaagggcccggtggatgcggtacagaagaaggccaagtacactctcaacgacacggggctgctgggggatgatgtggagtacgcacccctgacggtgagcgtgatcgtgcaggacgagggagtggacgccatcccggtgaaggtcctcaactgtgacaccatctcccaggtcaaggagaagatcattgaccaggtgtaccgtgggcagccctgctcctgctggcccaggccagacagcgtggtcctggagtggcgtccgggctccacagcgcagatcctgtcggacctggacctgacgtcacagcgggagggccggtggaagcgcgtcaacacccttatgcactacaatgtccgggatggagccaccctcatcctgtccaaggtgggggtctcccagcagccggaggacagccagcaggacctgcctggggagcgccatgccctcctggaggaggagaaccgggtgtggcacctggtgcggccgaccgacgaggtggacgagggcaagtccaagagaggcagcgtgaaagagaaggagcggacgaaggccatcaccgagatctacctgacgcggctgctctcagtcaagggcacactgcagcagtttgtggacaacttcttccagagcgtgctggcgcctgggcacgcggtgccacctgcagtcaagtacttcttcgacttcctggacgagcaggcagagaagcacaacatccaggatgaagacaccatccacatctggaagacgaacagcttaccgctccggttctgggtgaacatcctcaagaacccccacttcatctttgacgtgcatgtccacgaggtggtggacgcctcgctgtcagtcatcgcgcagaccttcatggatgcctgcacgcgcacggagcataagctgagccgcgattctcccagcaacaagctgctgtacgccaaggagatctccacctacaagaagatggtggaggattactacaaggggatccggcagatggtgcaggtcagcgaccaggacatgaacacacacctggcagagatttcccgggcgcacacggactccttgaacaccctcgtggcactccaccagctctaccaatacacgcagaagtactatgacgagatcatcaatgccttggaggaggatcctgccgcccagaagatgcagctggccttccgcctgcagcagattgccgctgcactggagaacaaggtcactgacctctgacctacaatctccagtgctgccttgggacataggtacctgaggtacctgagagcccctcaggggaggaggccgagtggctgtggctgaggcccccaccctcccctggaacgcgccccaagccggagtgggtgcagccggaacccgcccagcgtctagactgtagcatcttcctctgagcaataccgccgggcaccgcaccagcaccagccccagccccagctccctccggccgcagaaccagcatcgggtgttcactgtcgagtctccagtgatttgaaaatgtgccttacgctgccacgctgggggcagctggcctccgcctccgcccacgcaccagcagccgcctccatgccctaggttgggcccctgggggatctgagggcctgtggcccccagggcaagttcccagatcctatgtctgtctgtccaccacgagatgggaggaggagaaaaagcggtacgatgccttcctgacctcaccggcctccccaagggtgccggcactctgggtggactcacggctgctgggccccacgtcaaaggtcaagtgagacgtaggtcaagtcctacgtcggggcccagacatcctggggtcctggtctgtcagacaggctgccctagagccccacccagtccggggggactgggagcagttccaagaccaccccacccctttttgtaaatcttgttcattgtaaatcaaatacagcgtctttttcactctgaaaaaaaaaaaaaaaaaaaaa

SEQ ID NO: 3546 - DNA, 4815 bp, Homo Sapiens
  NM_012405
tgcgcaggcgcagccggcgcgtttctccgggctacagccggcgccgccgcccgctagtccgccgcccggcgccatggcgggctgcgcggcgcgggctccgccgggctctgaggcgcgtctcagcctcgccaccttcctgctgggcgcctcggtgctcgcgctgccgctgctcacgcgcgccggcctgcagggccgcaccgggctggcgctctacgtggccgggctcaacgcgctgctgctgctgctctatcggccgcctcgctaccagatagccatccgagcttgtttcctggggtttgtgttcggctgcggcacgctgctaagttttagccagtcttcttggagtcactttggctggtacatgtgctccctgtcattgttccactattctgaatacttggtgacagcagtcaataatcccaaaagtctgtccttggattcctttctcctgaatcacagcctggagtatacagtagctgctctttcttcttggttagagttcacacttgaaaatatcttttggccagaactgaagcagattacctggctcagtgtcacagggctgctgatggtggtcttcggagaatgtctgaggaaggcggccatgtttacagctggctccaatttcaaccacgtggtacagaatgaaaaatcagatacacatactctggtgaccagtggagtgtacgcttggtttcggcatccttcttacgtcgggtggttttactggagtattggaactcaggtgatgctgtgtaaccccatctgcggcgtcagctatgccctgacagtgtggcgattcttccgcgatcgaacagaagaagaagaaatctcactaattcacttttttggagaggagtacctggagtataagaagagggtgcccacgggcctgcctttcataaagggggtcaaggtggacctgtgacgggcagtggccccggtgaccttggggcctccgaccctgtgcagcctgggacaaaactgtttccggttggccgctgccacatggattttcttaatcgttttatgtcattagtcactcttctggaatgtcactcaagaccaagcggtcagaaggcctgaggacccaaggccccactggagcagtctgtccttatgccgaatcaaggcggaacatgggtgaaagacgagtaaggggcaaatcacagcaatattccacagcgccctccagagttacctggggaggaccgaggccacacgccactgcccccgaggccagagtgtaagtaaaggataaccaggactcgctgggagagatggactctgtcctcagcaacactccacagcagaaaggggtagcaggtaccccttcttatcagcggtaaaaatgcatttacaacctttcatttaaccgaaaaacacagaccgctttaacctctttatttctgtcccccactgcatgaacatctatacaattttaaaaatacttcctcataggatgctttggcccttcatctatttaatcatagctacatacctattttttataagtagcagtacacattcaaaggggtattcctagctcaatgcttggtgttctagttcaacttttatcctgcagcaagtaagcctagataactctacacgatttggctgagtggctttgtgtgaccgtggccccaggccaaggggatcatggccctggctggctttcccgggggtctcagctcctgttgtcagtgataggcggctcaaaggagcatcagtttcttttgatccaagaagtgcttactgaatgcctgccctgtgcgtggccttaaacattgagaagtgctgctctccgtttatttgggatttgattctcattttaccatagcttatattctcaatttcaatgccagtctcagaactcttgttttctgtgttctgttctcaaaattacattgtccctcatgtcatttcaaactgttttccaaagggatttgagcatatacaactacaaatccaagcagattgactctcaaaaataatcttaaatactgcaaatagtcccaactaagattcagtcagtatgtttgttttgcaagtttgggagagtaagttggctttgagtcacacatcgaagctttaagaggtgagacgctggcttcattctggactagacaggaacttggcctcagcgtgagatcctgccatgcagtgttgcggtggcactgaagaagtgtgaatgtgaaggcggcgtcggcgcggggccagagcaccactctgctgccccaccacgcggcctgtgaggagccactaaacctttccgtgcctagacctccccatctgtggaatggggtcaataccacctacctcacaggggtgttgtgaggactgagaagaacaatgtcaaatgtttttaatactcagatgtgggagcgacatcaatgaaatctgtactgtatgaaagctacacaaaaatgggcagacatttggttaattgtgccagatacctaaaatgtatgttcagaaaagcattttatcaactcagaaatatgacttatttctagatttcatggcttaatgaattttttcattgttatatataccaaagaggcttacgggttcattgattggtttgaaaaccagacagacggccgggcgcggtggctcacgcctgtaatcccagcaatttgggaggccaaggcgggtggatcatgaggtcaggcgttcgagaccagcctggccaacatgataaaaccccgtctctactaaaaatacaaaaaaatagctgggcgtgctggcgggtgcctgtaatcccagctactcaggaggctgagacaggagaatcctttgaacccaggaggcggaggttgcagtgagttgagatcgggcctttgcacttcagtctgggcaacagggcgagactccatctcaaaaaacaacaacaacaacaaaaaaaaccggacggacttgcccatcggccctcacgacacgcgtgcagtgggactctagccaaggcggtggccgagccatcattacaatttttctggagtaaaggatccacggtgggacatcaactggcacttactctgtttaggaacttgagttgaatcatttctaaacttgtcctttagaccacgcctagggcagcaaattccacttcctagaactgcaaaccgggagaggatgtagttagattctggcatcctgccccggctctttgagggaaaagttctttcccctgctctaagtagggcgggcccagcctccattcccattgggagccatgaagttgtcttgttgataggtctagggcagctgttggcagctgctggccttgtggatggtaagctgactgtgttggcatttaatgccatcctccatctgccagaggcccaggaagcccaccttcacaccaggcccaccagctggaaggagcccaggaggcaggtcttagggtttcatggtgaaatgctgtctgacaccagggaaaacttgacgtactctgctttggagaggaattccaggggtagggatggtgggagaacattcccaccctgtttataatcccagagcagaagtcagcaattacttagggataaaagatgaactccattttttttattttcttaagacagtcttgctctgtggcccaggctggaggctggagtgcagtggcaccatttcggctcaccgcaacctctgcctcccgggttcaagcgattctcctgcctcagcctcctgagtagctgggattacaggcttgggccaccatgcccagctaatttttttgtatttttagtagagacggggtttcaccatgatggccaggctggtctcgaactcctgacctcaagtgatccacgcgcctcggcctcccaaagtgctgggattacaggcgtgagccaccacgcccagccaagatgaactccttaaggacaggatttggtaagtgattgacttctttttagttccatgatcttgagattatttttagctttataaatttagcagtggcagggcccgtggagaatcaggttaatgaggtaaaggctttctgggtatttgctgccaaggccacatcaccaattttctcgatttaaaaaactgtcaagagatttatttttccattgcaggttttaaagtggagattctgaagtggaaaataggtactgtcagaacaaagctacctggaaacagcatagagtgaagcctttcgtgagggcttgcaggccgctgctgagtggcagtttacagaagaggtcgcggggtgagcctcttagcaggacagaaaacaaggcagcagcgcacctgccaccccttcacgagctgctccttgagcctaaaaagtaggctttattcatcccttctgttcatttaccaacctgggggattgatacgaccggggaaaatgttcctaaaccaggaagctgcgttagccgatcaggctttgtaagatctcgccaacagctagctgcttaggagtacccccacgatacgcacagcacaccactgtcccttcactgcactttcttcctgccttaggtagttgggcttgcccaccctagtttgcttttgtagtggtttggcaaggttagaaggcctcggcctctctgtcatgctgggaagtgcctactctctgggccactgctgcagaggccgtggcacttgtcatgggtttggaagacccagccatctgcagcagaggcagcctatcccattgcaaggagaggaactgaacggagtaattattctactcttctttttacataaatgtttatttaaatattctaaattggattttctttcacagatactgattattctttccagttcttaaataaaactgcacttgatttcactcaa

SEQ ID NO: 3547 - DNA, 4225 bp, Homo Sapiens
  NM_012406
gcagagggtgcggcccagaggaggccgcgggccgggaagggccgggcgggacgggaaacgttagggcagcggcccccggggtgagggggccgagcggacgggcagggccccgaggcgaactctgcccggatgaggaacaaagcagtggggcaggcgcgtgcgcccccagcgcagctggcaggttgggcagcccccttcccgaagcttctggacggaaggccccaggtgttccccgagatgccccaacccgtggcggggtgcacggccaccggccctcgggagaagttgggcggccccgggcgaccccggggacgagtggccgcgtcggtgcagcggttgtgagcaagatgtggtagcacgtgaccctggaacgcaaaccctgatgcctgttccccaccacccgagcgctcctttctctgatatttggccccaagccgatgcatcacaggatgaatgaaatgaacctgagtccagtggggatggagcagctgacttcatcctctgtgagcaatgccttgccagtctcaggaagtcacctgggattggctgcctcacccactcacagtgccatccctgccccaggcctcccagtggcaattccaaacctgggtccctccctgagctctctgccttctgctctgtctttaatgctaccaatgggtattggggatcgaggggtgatgtgtgggttacctgaaagaaactacaccctacctccaccaccttaccctcacctggagagcagttatttcagaaccattctacctggcattttatcttatttagctgacagaccacctccacagtacatccaccctaactctataaatgttgatggtaatacagcattatctatcaccaataacccttcagcactagatccctatcagtccaatggaaatgttggattagaaccaggcattgtttcaatagactctcgctctgtgaacacacatggtgcccaaagtcttcatcccagtgatggccatgaggtggccttggacacagcaatcactatggagaacgtttctagggttaccagcccaatttcgacagatggaatggcagaggagcttacgatggacggtgttgcaggcgagcattcccaaatcccaaatggctccagaagtcatgaacctctgtctgtggattctgtgagcaacaaccttgcagcagacgctgtaggacatggtggtgtgatacccatgcatgggaatggcctggagctccctgtggtcatggagacagaccacattgcaagtcgggtcaatggcatgtctgacagtgccctcagtgactccattcacactgtggccatgagcaccaactctgtaagcgtggcactctctacctcacacaaccttgcctccctagaatctgtttccctccatgaagttggcctcagcctagaacctgtggctgtctcctccatcacccaggaggttgctatggggacaggtcatgtagatgtatcttcagacagtctttcttttgtatcaccttcactgcaaatggaagactccaattcaaacaaggagaacatggcaaccttgtttacaatttggtgtactctgtgtgaccgcgcctatccctcggactgtcccgaacatggaccagtgacttttgttcctgacactccaatagagagcagagcaaggctttctctcccaaagcagcttgttctccgtcagtcaattgtgggagcagaagttggtgtatggactggagaaaccattcctgtgcggacttgctttggacctctaattggccagcagagtcactccatggaagtagcagaatggacagacaaggcagttaaccatatctggaagatataccacaatggtgtcctagaattctgcatcattacaactgatgaaaatgaatgtaattggatgatgtttgtgcgcaaagccaggaaccgggaagagcagaatttggtggcttatcctcatgatggaaaaatctttttctgcacctcacaagatatccctcctgaaaatgaactgcttttttattatagccgagattatgctcaacagattggtgttcctgaacacccagatgtgcatctctgtaactgtggcaaggagtgcaattcttacacagagttcaaagcccatctgaccagccacatccataaccatcttcctacccagggacatagcggcagccatgggccaagtcacagcaaagaaaggaagtggaagtgctcaatgtgcccccaagcttttatctctccttccaaacttcatgtccactttatgggtcacatgggtatgaagccccacaagtgtgatttctgtagcaaggcttttagtgatcccagcaacctgcggacccacctcaagatacatacaggtcagaagaactacaggtgtaccttgtgtgacaagtctttcacccagaaggctcacctggagtcccacatggttatccacactggggagaagaatcttaagtgtgattactgtgacaagttgtttatgcggaggcaggacctcaagcagcacgtgctcatccacactcaagaacgccagatcaagtgtcccaagtgtgataagctgttcttgagaacaaatcacttaaagaagcatctcaattctcatgaaggaaaacgggattatgtctgtgaaaaatgtacaaaggcttatctaaccaaataccatctcacccgccacctgaaaacctgcaaagggcccacctccagttcgtcagcaccagaggaggaagaagaggatgactcagaagaggaagatctagcagactctgtggggacagaagactgtaggattaacagtgctgtgtattcagcggatgagtctctttctgcacataaataaaaggaaaagaaacaagcaattttggatgaaaatgcaaatggaaaaatacacataaccagttatctactataatggtttttatataaaatggttcctgatttattttcagccagtaatcaaaacagactgggaatgaataaagcacttacagaagagtatcctaatgaaaacactttaaaacagattgggaaaactgagcatgtgtcctgttttaagtggtggactgggagggaagtgtcaacttctgaggtctttatttacatgataatctgggagatgcatttatgcctgaatcaaagctgccttctgctcaaacaaatcagatttatttcacattcttccattattccattttcctgctggtcctgtgacttggtaacattctaaacggtccttgccccatagccatcctgattgctgatagtgttttatgcagactcttgtgacttatactcaccacagaatggattgggacacagcagcataagtgtgctacttggcagctagtaagtttaaagcaggacctgccttaactgctcctggccacttggaagtttagggtagatcttgttttccaaagtttcggcaggtgcctggagggcaaataaaaaagcagcagtcagtcagtagtcagtgatggagagaacaagaggagagatgcctggcctctgcccaagaaattagctttgatggaagcctgagcaagtcacctggttattgtaacgtggagatctttgtaggtttagacatggctccctgtctccagtaaacatccagccattcagacaaagggggcctggagatacagagagcccaaataatgcctgctggattgtctcctgatgagtacatgtggactcacctgaggaagggaaggaagggaataatcttttatgtttcatttaccttatgaaaagtgttaaaacattgccaactcaaaataacattatttaatgcatgtgcaaagttaggtcttcccagttgtctcagtgctgaggaacctcatcagagaagcatggaagatgccaaaggatttttggaaggtaaagaaggctgaatagtgaccacatgggcctgttttcagggtcccagcttagttaagtcacccatgcacctggtcattgtgtctcccatgcacatccagcgtttctcagaagcagacccacccttaagttgacaggattgatggaacatgctctcctgctcaaggcacaacctctgggctggagtagaggactctggtgggaaggttttgctgctaatgtatttatggaatgaatgtatttcattcaaatctgtattcctctaggaaggattaaaattaaacttttttaaaatacaggaaaaaaaaaaaaaaaaaaaaaaaaaaaaaaaaaaaaaaa

SEQ ID NO: 3548 - DNA, 3507 bp, Homo Sapiens
  NM_012411
agtaaaccacagccttcagcatgctctgctcaggcggcagcagtggctttttggaggtgtctcggccatgacacacatttgacatgccctccctcaacctacttatagactatttttcttgctctgcagcatggaccaaagagaaattctgcagaagttcctggatgaggcccaaagcaagaaaattactaaagaggagtttgccaatgaatttctgaagctgaaaaggcaatctaccaagtacaaggcagacaaaacctatcctacaactgtggctgagaagcccaagaatatcaagaaaaacagatataaggatattttgccctatgattatagccgggtagaactatccctgataacctctgatgaggattccagctacatcaatgccaacttcattaagggagtttatggacccaaggcttatattgccacccagggtcctttatctacaaccctcctggacttctggaggatgatttgggaatatagtgtccttatcattgttatggcatgcatggagtatgaaatgggaaagaaaaagtgtgagcgctactgggctgagccaggagagatgcagctggaatttggccctttctctgtatcctgtgaagctgaaaaaaggaaatctgattatataatcaggactctaaaagttaagttcaatagtgaaactcgaactatctaccagtttcattacaagaattggccagaccatgatgtaccttcatctatagaccctattcttgagctcatctgggatgtacgttgttaccaagaggatgacagtgttcccatatgcattcactgcagtgctggctgtggaaggactggtgttatttgtgctattgattatacatggatgttgctaaaagatgggagtcaagcaaagcattgtattcctgagaaaaatcacactctccaagcagactcttattctcctaatttaccaaaaagtaccacaaaagcagcaaaaatgatgaaccaacaaaggacaaaaatggaaatcaaagaatcttcttcctttgactttaggacttctgaaataagtgcaaaagaagagctagttttgcaccctgctaaatcaagcacttcttttgactttctggagctaaattacagttttgacaaaaatgctgacacaaccatgaaatggcagacaaaggcatttccaatagttggggagcctcttcagaagcatcaaagtttggatttgggctctcttttgtttgagggatgttctaattctaaacctgtaaatgcagcaggaagatattttaattcaaaggtgccaataacacggaccaaatcaactccttttgaattgatacagcagagagaaaccaaggaggtggacagcaaggaaaacttttcttatttggaatctcaaccacatgattcttgttttgtagagatgcaggctcaaaaagtaatgcatgtttcttcagcagaactgaattattcactgccatatgactctaaacaccaaatacgtaatgcctctaatgtaaagcaccatgactctagtgctcttggtgtatattcttacatacctttagtggaaaatccttatttttcatcatggcctccaagtggtaccagttctaagatgtctcttgatttacctgagaagcaagatggaactgtttttccttcttctctgttgccaacatcctctacatccctcttctcttattacaattcacatgattctttatcactgaattctccaaccaatatttcctcactattgaaccaggagtcagctgtactagcaactgctccaaggatagatgatgaaatcccccctccacttcctgtacggacacctgaatcatttattgtggttgaggaagctggagaattctcaccaaatgttcccaaatccttatcctcagctgtgaaggtaaaaattggaacatcactggaatggggtggaacatctgaaccaaagaaatttgatgactctgtgatacttagaccaagcaagagtgtaaaactccgaagtcctaaatcagaactacatcaagatcgttcttctcccccacctcctctcccagaaagaactctagagtccttctttcttgccgatgaagattgtatgcaggcccaatctatagaaacatattctactagctatcctgacaccatggaaaattcaacatcttcaaaacagacactgaagactcctggaaaaagtttcacaaggagtaagagtttgaaaattttgcgaaacatgaaaaagagtatctgtaattcttgcccaccaaacaagcctgcagaatctgttcagtcaaataactccagctcatttctgaattttggttttgcaaaccgtttttcaaaacccaaaggaccaaggaatccaccaccaacttggaatatttaataaaactccagatttataataatatgggctgcaagtacacctgcaaataaaactactagaatactgctagttaaaataagtgctctatatgcataatatcaaatatgaagatatgctaatgtgttaatagcttttaaaagaaaagcaaaatgccaataagtgccagttttgcattttcatatcatttgcattgagttgaaaactgcaaataaaagtttgtcacttgagcttatgtacagaatgctatatgagaaacacttttagaatggatttatttttcatttttgccagttatttttattttcttttacttttctacataaacataaacttcaaaaggtttgtaagatttggatctcaactaatttctacattgccagaatatactataaaaagttaaaaaaaaaacttactttgtgggttgcaatacaaactgctcttgacaatgactattccctgacagttatttttgcctaaatggagtataccttgtaaatcttcccaaatgttgtggaaaactggaatattaagaaaatgagaaattatatttattagaataaaatgtgcaaataatgacaattatttgaatgtaacaaggaattcaactgaaatcctgataagttttaaccaaagtcattaaattaccaattctagaaaagtaatcaatgaaatataatagctatcttttggtagcaaaagatataaattgtatatgtttatacaggatctttcagatcatgtgcaatttttatctaaccaatcagaaatactagtttaaaatgaatttctatatgaatatggatctgccataagaaaatctagttcaactctaattttatgtagtaaataaattggcaggtaattgtttttacaaagaatccacctgacttcccctaatgcattaaaaatatttttatttaaataactttatttataacttttagaaacatgtagtattgtttaaacatcatttgttcttcagtatttttcatttggaagtccaatagggcaaattgaatgaagtattattatctgtctcttgtagtacaatgtatccaacagacactcaataaactttttggttgttaaactgaaaaaaaaaaaaaaaaaaaaaaaaa

SEQ ID NO: 3549 - DNA, 1719 bp, Homo Sapiens
  NM_012413
ggcgatgggaaggcgggcgcagtcgacccaagggtggagaagagggaaggcgaaggacgcgcgttcccgggctcgtgaccgccagcggcccggggaacccgctcccagacagactcggagagatggcaggcggaagacaccggcgcgtcgtgggcaccctccacctgctgctgctggtggccgccctgccctgggcatccaggggggtcagtccgagtgcctcagcctggccagaggagaagaattaccaccagccagccattttgaattcatcggctcttcggcaaattgcagaaggcaccagtatctctgaaatgtggcaaaatgacttacagccattgctgatagagcgatacccgggatcccctggaagctatgctgctcgtcagcacatcatgcagcgaattcagaggcttcaggctgactgggtcttggaaatagacaccttcttgagtcagacaccctatgggtaccggtctttctcaaatatcatcagcaccctcaatcccactgctaaacgacatttggtcctcgcctgccactatgactccaagtatttttcccactggaacaacagagtgtttgtaggagccactgattcagccgtgccatgtgcaatgatgttggaacttgctcgtgccttagacaagaaactcctttccttaaagactgtttcagactccaagccagatttgtcactccagctgatcttctttgatggtgaagaggcttttcttcactggtctcctcaagattctctctatgggtctcgacacttagctgcaaagatggcatcgaccccgcacccacctggagcgagaggcaccagccaactgcatggcatggatttattggtcttattggatttgattggagctccaaacccaacgtttcccaatttttttccaaactcagccaggtggttcgaaagacttcaagcaattgaacatgaacttcatgaattgggtttgctcaaggatcactctttggaggggcggtatttccagaattacagttatggaggtgtgattcaggatgaccatattccatttttaagaagaggtgttccagttctgcatctgataccgtctcctttccctgaagtctggcacaccatggatgacaatgaagaaaatttggatgaatcaaccattgacaatctaaacaaaatcctacaagtctttgtgttggaatatcttcatttgtaatactctgatttagtttaggataattggttctagaattgaattcaaaagtcaaggcatcatttaaaataatctgatttcagacaaatgctgtgtggaaacatctatcctatagatcatcctattcttatgtgtctttggttatcagatcaattacagaataattgtgttgtgatattgtgtcctaaattgctcattaatttttatttacagattgaaaaagagggaccgtgtaaagaaaatggaaaataaatatctttcaaagactcttttagataaacacgatgaggcaaaatcaggttcattcattcaacgatagtttctcaacagtacttaaatagcggttggaaaacgtagccttcattttatgattttttcatatgtggaaatctattacatgtaatacaaaacaaacatgtagtttgaaggcggtcagatttctttgagaaatctttgtagagttaattttatggaaattaaaatcagaattaaatgctaaaaaaaaaaaaaaaaa

SEQ ID NO: 3550 - DNA, 2005 bp, Homo Sapiens
  NM_012417
cgggcatgtcctgatctggcggccgctcctaccaccctgggcagccgagcagagtcgtccccagcgggtctccctccctgcctccctgactttgcaacaccgcgttccgggaggaccggcctcggcgagggaggaggcgggggagctgcgaacacccagacccaaaccctgacatgctctggggcggagaggaggaagccaggagctgagcgcgccgcgggggctgcttcgccctccggctccgagcgccgggctccgggcgccctgccctgcgcctgggcagcagccttgctggtcttgggggcgccccccgcttcccgccccgggggtccgcggccggcaggaccatgctgctgaaagagtaccggatctgcatgccgctcaccgtagacgagtacaaaattggacagctgtacatgatcagcaaacacagccatgaacagagtgaccggggagaaggggtggaggtcgtccagaatgagccctttgaggaccctcaccatggcaatgggcagttcaccgagaagcgggtgtatctcaacagcaaactgcctagttgggctagagctgttgtccccaaaatattttatgtgacagagaaggcttggaactattatccctacacaattacagaatacacatgttcctttctgccgaaattctccattcatatagaaaccaagtatgaggacaacaaaggaagcaatgacaccattttcgacaatgaagccaaagacgtggagagagaagtttgctttattgatattgcctgcgatgaaattccagagcgctactacaaagaatctgaggatcctaagcacttcaagtcagagaagacaggacggggacagttgagggaaggctggagagatagtcatcagcctatcatgtgctcctacaagctggtgactgtgaagtttgaggtctgggggcttcagaccagagtggaacaatttgtacacaaggtggtccgagacattctgctgattggacatagacaggcttttgcatgggttgatgagtggtatgacatgacaatggatgaagtccgagaatttgaacgagccactcaggaagccaccaacaagaaaatcggcattttcccacctgcaatttctatctccagcatccccctgctgccttcttccgtccgcagtgcgccttctagtgctccatccacccctctctccacagacgcacccgaatttctgtccgttcccaaagatcggccccggaaaaagtctgccccagaaactctcacacttccagaccctgagaaaaaagccaccctgaatttacccggcatgcactcttcagataagccatgtcggcccaaatctgagtaactttatataaatatctcatggggttttatattttcatttgttgttgttgtttttttttaagaatcttctgatagagaaaaagactgctttgtcactcaaacatgttccttcgacctttcagtgtgcatgtgactcagtaacttcacatagaatatgattccctaagtatgctacacagcatcatattagatgtaagatgtaagacttgcaaaggacagaaggaatcttctgtaaccacatagctgtatgccagagaggaagccttgttattgggcatttgatgaggtttggcatggacttcaaggataaatgaatgaaaactttgcaccacttttgttacaaggtacggtagaaaatagtgaagtcagtttcctctcatcaaatctaaaattctccaaaatactctcaggcataacatacttagctgttaaattttgaactgctaattactaatacttgaataccaatagttactgagattcctattttgtggttagtctgactcaggatttggagcctaattaactctaaacttttgaaaattttaatcatcaagctatagaggctccaagtgcaattaataataactcatttataccttccacagaatttaataaagattctacttgtttctgtcttttaaaaaaaaaaaaaaaaaa

SEQ ID NO: 3551 - DNA, 1142 bp, Homo Sapiens
  NM_012423
cttttccaagcggctgccgaagatggcggaggtgcaggtcctggtgcttgatggtcgaggccatctcctgggccgcctggcggccatcgtggctaaacaggtactgctgggccggaaggtggtggtcgtacgctgtgaaggcatcaacatttctggcaatttctacagaaacaagttgaagtacctggctttcctccgcaagcggatgaacaccaacccttcccgaggcccctaccacttccgggcccccagccgcatcttctggcggaccgtgcgaggtatgctgccccacaaaaccaagcgaggccaggccgctctggaccgtctcaaggtgtttgacggcatcccaccgccctacgacaagaaaaagcggatggtggttcctgctgccctcaaggtcgtgcgtctgaagcctacaagaaagtttgcctatctggggcgcctggctcacgaggttggctggaagtaccaggcagtgacagccaccctggaggagaagaggaaagagaaagccaagatccactaccggaagaagaaacagctcatgaggctacggaaacaggccgagaagaacgtggagaagaaaattgacaaatacacagaggtcctcaagacccacggactcctggtctgagcccaataaagactgttaattcctcatgcgttgcctgcccttcctccattgttgccctggaatgtacgggacccaggggcagcagcagtccaggtgccacaggcagccctgggacataggaagctgggagcaaggaaagggtcttagtcactgcctcccgaagttgcttgaaagcactcggagaattgtgcaggtgtcatttatctatgaccaataggaagagcaaccagttactatgagtgaaagggagccagaagactgattggagggccctatcttgtgagtggggcatctgttggactttccacctggtcatatactctgcagctgttagaatgtgcaagcacttggggacagcatgagcttgctgttgtacacagggtatttctagaagcagaaatagactgggaagatgcacaaccaaggggttacaggcatcgcccatgctcctcacctgtattttgtaatcagaaataaattgcttttaaagaaaaaaaaaaaaaaaaaa

SEQ ID NO: 3552 - DNA, 4206 bp, Homo Sapiens
  NM_012424
ggaagcagagctgtgcagctgaggcgccgccgtggagccgccttggagccaccgccccctcgccgcttcgccgctgcgttggggaacctggaccgcggcggcgccgggtttccctcatgatcccgggcgggtggcggcggcggcagaggcggcgggaggatgacctcttaccgggagcggagtgccgacctggcccgtttctacactgtcaccgagccccagcgacacccgaggggctacacagtatataaggtcaccgcccgggttgtttcacgaagaaatccagaggatgtccaggagataattgtatggaagagatacagtgattttaagaaactacacaaagaactatggcaaattcacaaaaacttattccgacattcagagttgtttcctccatttgctaaaggaatagtgtttgggcgatttgatgaaactgttatcgaagagagaagacaatgtgctgaagacctgctacagttctctgccaatattcctgctctttacaatagtaaacagcttgaagactttttcaagggtggaataattaatgatagttctgaattaattggtcctgctgaagctcactcagattccctcattgatacctttcctgagtgtagtacggaaggcttctccagtgacagtgatctggtatctcttactgttgatgtggattctcttgctgagttagatgatggaatggcttccaatcaaaattctcccattagaacttttggtctcaatctttcttcggattcttcagcactaggggctgttgcttctgacagtgaacagagcaaaacagaagaagaacgggaaagtcgtagcctctttcctggcagtttaaagccgaagcttggcaagagagattatttggagaaagcaggagaattaataaagctggctttaaaaaaggaagaagaagacgactatgaagctgcttctgatttttataggaagggagttgatttactcctagaaggtgttcaaggagagtcaagccctacccgtcgagaagctgtgaagagaagaacagccgagtacctcatgcgggcagaaagtatctctagtctttatgggaaacctcagcttgatgatgtatctcagcctccaggatcactaagttcaaggcccctttggaacctaaggagccctgccgaggagctgaaggccttcagagtccttggggtgattgacaaggttttacttgtaatggacacaaggacagaacagactttcattttaaaaggtctaaggaaaagcagtgaatacagcaggaacagaaagaccatcatcccccgctgtgtgcccaacatggtgtgtctgcataagtacatcatctctgaggagtcagtatttcttgtgctgcagcatgcggaaggtggcaaactgtggtcatatatcagtaaatttctaaacagaagtcctgaagaaagctttgacatcaaggaagtgaaaaaacctacacttgcaaaagttcacctgcagcagccaacttctagtcctcaggacagcagtagctttgaatccagaggaagtgatggtggaagcatgcttaaagctctgcctttgaagagtagtcttactccaagttctcaagatgacagcaaccaggaagatgatggccaagatagctctccaaagtggccagattctggttcaagttcagaagaagaatgtactactagttatttaacattatgcaatgaatatgggcaagaaaagattgaaccagggtctttgaatgaggagcccttcatgaagactgaagggaatggtgttgatacaaaagctattaaaagcttcccagcacaccttgctgctgacagtgacagccccagcacacagctgagagctcacgagctgaagttcttccccaacgatgacccagaagcagttagttctccaagaacatcagattccctcagtagatcaaaaaatagccccatggaattctttaggatagacagtaaggatagcgcaagtgaactcctgggacttgactttggagaaaaattgtatagtctaaaatcagaacctttgaaaccattctttactcttccagatggagacagtgcttctaggagttttaatactagtgaaagcaaggtagagtttaaagctcaggacaccattagcaggggctcagatgactcagtgccagttatttcatttaaagatgctgcttttgatgatgtcagtggtactgatgaaggaagacctgatcttcttgtaaatttacctggtgaattggagtcaacaagagaagctgcagcaatgggacctactaagtttacacaaactaatatagggataatagaaaataaactcttggaagcccctgatgttttatgcctcaggcttagtactgaacaatgccaagcacatgaggagaaaggcatagaggaactgagtgatccctctgggcccaaatcctatagtataacagagaaacactatgcacaggaggatcccaggatgttatttgtagcagctgttgatcatagtagttcaggagatatgtctttgttacccagctcagatcctaagtttcaaggacttggagtggttgagtcagcagtaactgcaaacaacacagaagaaagcttattccgtatttgtagtccactctcaggtgctaatgaatatattgcaagcacagacactttaaaaacagaagaagtattgctgtttacagatcagactgatgatttggctaaagaggaaccaacttctttattccagagagactctgagactaagggtgaaagtggtttagtgctagaaggagacaaggaaatacatcagatttttgaggaccttgataaaaaattagcactagcctccaggttttacatcccagagggctgcattcaaagatgggcagctgaaatggtggtagcccttgatgctttacatagagagggaattgtgtgccgcgatttgaacccaaacaacatcttattgaatgatagaggacacattcagctaacgtattttagcaggtggagtgaggttgaagattcctgtgacagcgatgccatagagagaatgtactgtgccccagaggttggagcaatcactgaagaaactgaagcctgtgattggtggagtttgggtgctgtcctctttgaacttctcactggcaagactctggttgaatgccatccagcaggaataaatactcacactactttgaacatgccagaatgtgtctctgaagaggctcgctcactcattcaacagctcttgcagttcaatcctctggaacgacttggtgctggagttgctggtgttgaagatatcaaatctcatccattttttacccctgtggattgggcagaactgatgagatgaacgtaatgcagggttatcttcacacattctgatcttctctgtgacaggcatctccagcactgaggcacctctgactcacagttacttatggagcaccaaagcatttggataaagaccgttataggaaatgggggggaaatggctaaaagagaacaattcgtttacaattacaagatattagctaattgtgccaggggctgttatatacatatatacacaaccaaggtgtgatctgaatttaatccacatttggtgttgcagatgagttgtaaagccaactgaaagagttccttcaagaagttcctctgataggaagctagaagtgtagaatgaagttttacttgacagaaggacctttacatggcagctaacagtgctttttgctgaccaggattggtttatatgattaaattaatatttgcttaataatacactaaaagtatatgaacaatgtcatcaatgaaacttaaaagcgagaaaaaagaatatacacataatttctgacggaaaacctgtaccctgatgctgtataatgtatgttgaatgtggtcccagattatttctgtaagaagacactccatgttgtcagctttgtactctttgttgatactgcttatttagagaagggttcatataaacactcactctgtgtcttcaacagcatctttctttccccatctttctattttctgcaccctctgcttgttccctcatattctgttcttccgactcctgctaacacacatgcaacaaaaaagggaagggagtgcttatttccctttgtgtaaggactaagaaatcatgatatcaaataaacatggtgaaacattaaaaaaaaaaaaaaaa

SEQ ID NO: 3553 - DNA, 9736 bp, Homo Sapiens
  NM_012426
gcctttttccgccgcgcgccaccagaatgtccctgtcttgaggtctaatggcggacgccagtatgttggagttggtggtggcttaagttttgaagggaggtagcatccgttggatatccacaccatccttctcgctgcaggctttcttggactccgtactgttggtgtaaccaaggcctggaggtctgggtggctcaggtttcctgcagccatgtttctgtacaacttaaccttgcagagagccactggcatcagctttgccattcatggaaacttttctggaaccaaacaacaagaaattgttgtttcccgtgggaagatcttggagctgcttcgcccagaccccaacactggcaaagtacataccctactcactgtggaagtattcggtgttatccggtcactcatggcctttaggctgacaggtggcaccaaagactacattgtagttggcagtgactctggtcgaattgttattttggaataccagccatctaagaatatgtttgagaagattcaccaagaaacctttggcaagagtggatgccgtcgcatcgttcctggccagttcttagctgtggatcccaaagggcgagccgttatgattagtgccattgagaaacagaaattggtgtatattttgaacagagatgctgcagcccgacttaccatttcatctcccctggaagcccacaaagcaaacactttagtgtatcatgtagttggagtagatgtcggatttgaaaatccaatgtttgcttgtctggaaatggattatgaggaagcagacaatgatccaacaggggaagcagcagctaatacccagcagacacttactttctatgagctagaccttggtttaaatcatgtggtccgaaaatacagtgaacctttggaggaacacggcaacttccttattacagttccaggagggtcagatggtccaagtggagtactgatctgctctgaaaactatattacttacaagaactttggtgaccagccagatatccgctgtccaattcccaggaggcggaatgacctggatgaccctgaaagaggaatgatttttgtctgctctgcaacccataaaaccaaatcgatgttcttctttttggctcaaactgagcagggagatatctttaagatcactttggagacagatgaagatatggttactgagatccggctcaaatattttgatactgtacccgttgctgctgccatgtgtgtgcttaaaacagggttcctttttgtagcatcagaatttggaaaccattacttatatcaaattgcacatcttggagatgatgatgaagaacctgagttttcatcagccatgcctctggaagaaggagacacattcttttttcagccaagaccacttaaaaaccttgtgctggttgatgagttggacagcctctctcccattctgttttgccagatagctgatctggccaatgaagatactccacagttgtatgtggcctgtggtaggggaccccgatcatctctgagagtcctaagacatggacttgaggtgtcagaaatggctgtttctgagctacctggtaaccccaacgctgtctggacagtgcgtcgacacattgaagatgagtttgatgcctacatcattgtgtctttcgtgaatgccaccctagtgttgtccattggagaaactgtagaagaagtgactgactctgggttcctggggaccaccccgaccttgtcctgctccttattaggagatgatgccttggtgcaggtctatccagatggcattcggcacatacgagcagacaagagagtcaatgagtggaagacccctggaaagaaaacaattgtgaagtgtgcagtgaaccagcgacaagtggtgattgccctgacaggaggagagctggtctatttcgagatggatccttcaggacagctgaatgagtacacagaacggaaggagatgtcagcagatgtggtgtgcatgagtctggccaatgtaccccctggagagcagcggtctcgcttcctggctgtggggcttgtggacaacactgtcagaatcatctccctggatccctcagactgtttgcaacctctaagcatgcaggctctcccagcccagcctgagtccttgtgtatcgtggaaatgggtgggactgagaagcaggatgagctgggtgagaggggctcgattggcttcctatacctgaatattgggctacagaacggtgtgctgctgaggactgtcttggaccctgtcactggggatttgtctgatactcgcactcggtacctggggtcccgtcctgtgaagctcttccgagtccgaatgcaaggccaggaggcagtattggccatgtcaagccgctcatggttgagctattcttaccaatctcgcttccatctcaccccactgtcttacgagacactggaatttgcatcgggttttgcctcggaacagtgtcccgagggcattgtggccatctccaccaacaccctacggattttggcattagagaagctcggtgctgtcttcaatcaagtagccttcccactgcagtacacacccaggaaatttgtcatccaccctgagagtaacaaccttattatcattgaaacggaccacaatgcctacactgaggccacgaaagctcagagaaagcagcagatggcagaggaaatggtggaagcagcaggggaggatgagcgggagctggccgcagagatggcagcagcattcctcaatgaaaacctccctgaatccatctttggagctcccaaggctggcaatgggcagtgggcctctgtgatccgagtgatgaatcccattcaagggaacacactggaccttgtccagctggaacagaatgaggcagcttttagtgtggctgtgtgcaggttttccaacactggtgaagactggtatgtgctggtgggtgtggccaaggacctgatactaaacccccgatctgtggcagggggcttcgtctatacttacaagcttgtgaacaatggggaaaaactggagtttttgcacaagactcctgtggaagaggtccctgctgctattgccccattccaggggagggtgttgattggtgtggggaagctgttgcgtgtctatgacctgggaaagaagaagttactccgaaaatgtgagaataagcatattgccaattatatctctgggatccagactatcggacatagggtaattgtatctgatgtccaagaaagtttcatctgggttcgctacaagcgtaatgaaaaccagcttatcatctttgctgatgatacctacccccgatgggtcactacagccagcctcctggactatgacactgtggctggggcagacaagtttggcaacatatgtgtggtgaggctcccacctaacaccaatgatgaagtagatgaggatcctacaggaaacaaagccctgtgggaccgtggcttgctcaatggggcctcccagaaggcagaggtgatcatgaactaccatgtcggggagacggtgctgtccttgcagaagaccacgctgatccctggaggctcagaatcacttgtctataccaccttgtctggaggaattggcatccttgtgccattcacgtcccatgaggaccatgacttcttccagcatgtggaaatgcacctgcggtctgaacatccccctctctgtgggcgggaccacctcagctttcgctcctactacttccctgtgaagaatgtgattgatggagacctctgtgagcagttcaattccatggaacccaacaaacaaaagaacgtctctgaagaactggaccgaaccccacccgaagtgtccaagaaactcgaggatatccggacccgctacgccttctgagccctcctttcccggtggggcttgccagagactgtgtgttttgtttcccccaccaccatcactgccacctggcttctgccatgtggcaggagggtgactggataattaagactgcattatgaaagtcaacagctctttcccctcagctcttctcctggaatgactggcttcccctcaaattggcactgagatttgctacacttctccccacctggtacatgatacatgaccccaggttccagtgtagaacctgagtcccccattccccaaagccatccctgcattgatatgtcttgactctcctgtctacttttgcacacacccttaatttttaattggttttcttgtaaatacagttttgtacaatgttatctctgtgggaggaaggaggcaggctgtggtgggactgggtagggtatagtatcactcctgagttccactgctctagaatctaaccagaaatagaaacctagtttttaaggtgactggcatccatgtgtcttgttctggagatgaggatgtaggtgggaggtttgaacccaagttagagcaggaagaactgagtagactccttccttccagataccgacttggacttgcggcactctgtggctccccacccccaggtctgtggtggtttctttgttttttcctggttctttttgctgtgctgatgaaacatgacctcaataaccatgtgtatacccacccctcttcccactgggtattgaggaagggtggctgattcttcctcctcttctactctgaggatgttagtatggggattttagcatgaattctagctggggagtcttaacagatgccccttttactgatacagcacctaaagcgatctttggctccataggaccataggaagggtcagtacagaagaacctagatactgccctgcccctgagaactgtgtatatgtggggcctgtctgcagcacccatctcaggtgggttccagagggcctttagggtataatgagagcctgttaggtggaagaggcccagttccagaaatgttccagcccacccctgagaattcctcctgtttagttgtgtgggaagccctcgtcttccaggctgtccttgcgccttgaacctggagaagtgagctcactgttctcaatacttcacaaatgtaaaactttctttcgtctgcatgtgctcagccatctaaattgagcaaatgatctggtgagcactgggttagaatcaggaatggtggaatacaatctgaacctctcagagcccagaacagagggttcctgacactgtgacactgtctcctggaactaagtatctcttgaatcatgacttggttttagatcagtcaagagagacccaggttttgccaggaatcgaatccctaaataacatgtttttttctcacttagctcatgaatttgcatagtagacagtagttctgaattagattttgaaaacctaatttcagggctcattttttcctgtggccctaaatccattctatcaaattgtgtgatactgacatgcagtcatctgaggaactcagcgtagatacttgagcagctcctcgcctcttttctaactcaagtttgactaaaatacatacactccgtacagaaggtagggggttatgtaagaaaggaaaacctaatctatggaatcaggagttgtcaccaccgagcttcctctggaagtctgcccatcagcttgcttgttctctgttaagaggaagggctaggacaaggatttgggcttgaatatgtggaaaggaattttcatagttgttgctgcaggacctacaaaagtttaaaattagattggatgtgactcaatgacaagtcccatctgtgtaattgttaaggggacctgattgactcctgtggtttgattgagcaaccaggtaaatagagacctctctccagctttggcaaaacccatcagaggctgctgcagaactcagacagagggatctgcccttgggtttgcttccatcctgttccattgctaagcccttgtgacttggatcctaggactgaaaagtttttagctgcctcagctttcccctgaccttactggcagaggttctgcagatgtttcctttggaagatctcttgccaagaatagcattcctttggaggaggggggttctagttggaatgttgcttttcttggttagtgtaaatgtattgctagtgagacagctgccggcgctggaaaaggctcgtctcacagggagagtgctggtccccagaatgtgtgctgttcccacgctgctgcctttcttgagcttgttagaggaaagccagaaaggcattcagatgggatcagtctggctttcaaattttttttaattcctaagttctgttttattttttaattttttaaaaaaaattttattagagacagtctctctctcttgcctagctgggagtgcagtggagtgatcatagctcactgaggcttgaactcctgggctcgagcaatccacctcagcctccagagtaggggagactacagatgtgtgccaccatactcagctaatttttaaacttttgtagagacagggtctccctgtgttgcccaggctggcctcgaactcctgacctcaaaaaatcttcctgccttggcctcccaaagcactgggattataggtgtgagccattgcgcctggtcataaattcttgtttttttgtttgtttgtttattagagatggaatctctctctcttgaccaggctagagggctgtggtgcgatctcagcccactgcaacctctatctcctgagctcaagcgatcctccttagcttcccaaatagctggaactacaggcatgtgccatcacgtccagctaatttttgtatttttagtagagaaggttttaccatgttggacagggtggtctcgaactcctggcctaaagtggtccacctagctcagcctaccaaagtgctgtgattacaggcgtgagccaccatgcccagcctctaaattctgttttctattcaaagtaaaaatgacatgtgtttgagtcatccacttgctcatttgcatatggaatattgtatgtgaatattttattacacccttaaaattaattttcaagggctatatgtagagctcagaagaaacatctctgctgctgaaatcaaacctggtccaaaaaacgtcacaacggaggaaaggaatagatggctctcgaggacaagatagggactcttaaaacacctgcttggccatggttgattgacatttgagtgatctggtagcccaacacaccctgtgaagttcaggtgaactgaaatgggcaggtgtaggctacacaccagtctgaaccagcacaaccaagagttgtttctcttttttttctttttctttttcttttttttcttttttttttttttttttttgagatgaagtcttactctgttgcccaggctagagtacagaggcacaatctcggctcaccacagcctccgcctcctgggttcaagcaattctcctgcctcagcctcccaagtagctgggactacaggcatgcaccaccatgcctggctaatttttgtatttttagtagagatggggtttcaccatgttggccaggctggtttcgaactcgtgacctcaggtgatccacccaccttggtctcccaaagcgctgggattacaggcgtgagccactgcacttggccaggagctgtttaagccatcaggagacatgctgacccactagaagaggctgctacgctcatttcttccacaaacgtttactgggcacctaccatgaaccaccacctcccagctctgttctgcacccagaggttggaggagagtttataaccaggcagtctctgtcgctgtgaggttggtggtgaggtgagtctgccagagggcctgccaccagtttcagaagagcctgcagcctgcatctgatttcctcagccacaaccttgggacttcaggaaaaatcagaaggtcccaagtctgaaaaatgaagaggtggggagtgggcagcaggggttttaggtcaggaaatggtaggaaacctgtagttgtggctcataatcctagtgggatattagaaccctcttcatttgtcagaacagattcctggggtctgctcccaattattcacacggtggttcatgcctggtaatcccagcactttgggcggccagaggcaggcagattgcttgagcccagaagtttaagaccagcctaggaaacagaccccatctctacaaaaaattcaaaaagccgggcgtgaagccctgtttttttttttttaaaaaaagagtctgctggtgatgtctgggcatgtgtctgcttcacagtccagtgttatgatcagtagctgtgatggacaatgaacattgctgcttgttcaaaatgaagaaaaaaaatatcaaagaaaaccaggtttggaagtttcagatttggaaaaggagctgggccagcccatctggaatagctgaggggccctgttagccccaccctaccccaccccacccccgtatgcagcatctctggcggtgcccagaggcaagcccccttcagtttcccacctctcactctgccttccagagcctagtcaagttttaaattcccaggtccactcagcagaacttgctcccttctctgactgcagtctcataatgaaaggagaggtgctttcagttgggtcatttggtagcgtttaggcttagaagttactaatttggagccgtgagtatatgtgtataagctagtaacacgtgatggtcaagggaagtactaccatttcctgtgggttattagggcctccagctgttatgaggacacactggggaatctcagctttagggagtcgatgatgtaactggagaaaggcaatgctgccctcataaagcaatcagaaacgagattccacctgccaaatgccaagaggcagcaaagtccatgaagagagcactgtatacagtcagatgacctgggctcactagcctctaagcatagtcttggtttcctgcctgtaaattggtagaataagactgatttactgggcctggcatggtggctcacacctgtaatcccagcactttgagaggctgaggcaggaggatcccttgagcccaggagtttgagaccagcctgggcaacatgacaaaaccccatctctccaaaaatacaaaaattagccaggcatggtggtgcacacttgtagtcccagtaattagggggctgagacaggaggatcacttcagcctatgagtttgaggctgcagtgagctgtgattgcgccactacactccagcctggatgacaggacgaaacctgtctcaaaaacaccaaaaaacaaaaaccggtctcctggggtcatggtagcacaaacgcacatgactgagtgctcaggggttctgaggcttgtccgctgacctggggctctggccctgggagatctgggggacctgctgtcctatatgtgatgctttgaaagaaaggggcatcattccaagccaagaggccccagagagggcaccgtgcggtgttcaggcttctgtgaggccccagtgagatcctgtggctgtgcccccatcacctccacccactctgccctcccactagctgcccaacggatgaatcaacgccttggcagagttttccagcagggccttgcagagagtgtgtgtgacctgtgtggccactgccttggggacgggtgaggagttagcctggaacattccagcgtgggcattattgtcctgttgcaagttcagggcaaaaccaggaatccagttttgtcgatccaattgagaaaacatttcatgaacaactacttgtggcatgcattggcactcggaataaagcgcactattgtcactaaaaaaaaaaaaaaaaa

SEQ ID NO: 3554 - DNA, 4284 bp, Homo Sapiens
  NM_012429
ccctactccgcctctcgggatcctttaagaggcggggcttggctgccagctccgcggcccgggcaaaaggctgggactttactccgggtggcggcgaggacgagtctgtgctccatcagctgccgcacccgccgcctcccgcccccaaaccccatccccgcggttgagccacgatgagcggcagagtcggcgatctgagccccaggcagaaggaggcattggccaagtttcgggagaatgtccaggatgtgctgccggccctgccgaatccagatgactattttctcctgcgttggctccgagccagaagcttcgacctgcagaagtcggaggccatgctccggaagcatgtggagttccgaaagcaaaaggacattgacaacatcattagctggcagcctccagaggtgatccaacagtatctgtcagggggtatgtgtggctatgacctggatggctgcccagtctggtacgacataattggacctctggatgccaagggtctgctgttctcagcctccaaacaggacctgctgaggaccaagatgcgggagtgtgagctgcttctgcaagagtgtgcccaccagaccacaaagttggggaggaaggtggagaccatcaccataatttatgactgcgaggggcttggcctcaagcatctctggaagcctgctgtggaggcctatggagagtttctctgcatgtttgaggaaaattatcccgaaacactgaagcgtctttttgttgttaaagcccccaaactgtttcctgtggcctataacctcatcaaacccttcctgagtgaggacactcgtaagaagatcatggtcctgggagcaaattggaaggaggttttactgaaacatatcagccctgaccaggtgcctgtggagtatgggggcaccatgactgaccctgatggaaaccccaagtgcaaatccaagatcaactacgggggtgacatccccaggaagtattatgtgcgagaccaggtgaaacagcagtatgaacacagcgtgcagatttcccgtggctcctcccaccaagtggagtatgagatcctcttccctggctgtgtcctcaggtggcagtttatgtcagatggagcggatgttggttttgggattttcctgaagaccaagatgggagagaggcagcgggcaggggagatgacagaggtgctgcccaaccagaggtacaactcccacctggtccctgaagatgggaccctcacctgcagtgatcctggcatctatgtcctgcggtttgacaacacctacagcttcattcatgccaagaaggtcaatttcactgtggaggtcctgcttccagacaaagcctcagaagagaagatgaaacagctgggggcaggcaccccgaaataacaccttctcctatagcaggcctggccccctcagtgtctccctgtcaatttctaccccttgtagcagtcattttcgcacaaccctgaagcccaaagaaactgggctggaggacagacctcaggagctttcatttcagttaggcagaggaagagcgactgcagtgggtctccgtgtctatcaaatacctaaggagtccccaggagctggctggccatcgtgataggatctgtctgtcctgtaaactgtgccaacttcacctgtccagggacagcgaagctgggggtggcggggggcatgtaccacagggtggcagcagggaaaaaaattagaaaagggtgaaagattgggacttaacacttcagggaagtcagctgccggggagaaacttgctcctaaatgaacacataagtttagatcgcaatgaggagtagcagggtagctggttgctagagttacggtggggatcagaaactcttccaaacattttagcactgaggctggggtagcttttggcttttcccaggtctcaggaggtggcctgagtcagcacacatcttcccactcggtagacaggctggcctctccctcactttgagactttggcaactcctgggccacacggcctgcctctttgattactaatgattgtcagtgactcagagcttcctgggacttcgggtacccacccgctgttctccatgcaaacaaagcgccagggaaatgacccacagggatcgcagctgcagggagggccagggaggttgggggtgggagtgaatgctaaaagcagatcgtccagtgcccttttcagtgctaccggcctctcaccaagcagtcctccatgtgagcaaccccgagacaaaaatgctaagtgggatcaagagagcagcactcggagagggtgtttgccagtctgagtgtcccgcggtgcccgccaacccgcttcctgactgacctgagcaaggtcttactaagcagtcccatctctgtgggaggcatgcaacgcgtgcagggagttcaggtgccggtcggcgtagccaggcctggaggccccccaggcaggaggccgcccaaaggcggggccggcgtctcgcagactaggggctgggggcggccacagacggcctcgaaaccacagcccttaccccaatcccacgagccccgccaacgaaccacaggtgctgggctttagagaacatgggaaggcggccccagacctgcgggaacgcctttccctcagagccaggccccggccccgtctgggaagctcatcttgcgaagctgagggagctcagggcaaaggccaggctagcgcggaccggaaggggccgaggctgcacgggcctctgccagaacgctcaggacatcccggcctgggtttacaacgctgttaggaaaattaaccaatgaataaagcaacgttcagtgcgcagggagtgaaattcaatgcccaccgctaggctcctcgctgcctctcactcaagaggcccaaactcagacggcgtcagggacccggacccagcagccgtttcacgccaatagatagggcgcatgcgcagaaatcctcctcggctctctagcgtgagctttcccaaggggccacgcccagcttgccttctgattggtccagctggtgggttgtcttccgccatctttgatcagggcactaaggatgctccccacggccttcacagtgacggcggagaccctgccccgccagctgctcagtacgtgccgcgtagcccgtgcgagccaagtgtgagtccgggcgagcgcctgcggagctagcactgggcccagaatgagagggaggcggaggagcagcgatcacgtggttttagggactgtctaataattccacgccagcattgccggtgtttcagggggtgggaaccgctgcgttccccatcaacttttctcccacccaccaccctccccaacctacaagcccagctcagcttgaggtaactgctgaccggactgtcctatacagccctacaagacagaggcgcctagggctgaaagcgggggcctccgtagggagccagcgggggcctcaatagttactcattttctctacctttgatgaaaataagagctaattcttaataaggcctaccgggtatcacgcaaaaaccctgtgcttactattacactttgggttgttgcaaagattaaaggaaataagccgtgcaaagcgcttaagagcttggtataagtaagtgctcgtcaatgttggctactctcattttttttgcagacgtgggaactggggctcagggaggctaacagccagtaggcggcacagctaggatttgaacccaggattgtctccaacgccgctcaattatacccgccaaggagtcacagagacttagtgaagtgcacacattgctcacctgggtgaactgaggtccagcgggggaaggcttcctcctgttgtaatcactaaccccaactctgtctcccttgcccgattcattcattcgttaattaattcatccaacatcctgtccccaagaagctcagtctggggacatactgatccagttaaatgcgagtgcttcctagttatacatggcgactgctgagaagggactccagagtccaggcacctacctcccaggggctcaccgttcactcctctagcctcatttagagctcgcattaagagcacgggatctggatccacactgtttggattcaaatcacaacttcaccacttagcagctgtgtgttctgggaaaatgacccaccttctctgtgcctccattttctcacctgtaaaacgggctcccaggctggtgggagggtttcaggtgtaagacatggagagtcctttagcgaacatgtagactggcaataaactcaataaatggtgaaaaaaaaaaaaaaaaaa

SEQ ID NO: 3555 - DNA, 6629 bp, Homo Sapiens
  NM_012431
ctagaaacagcaagtacgctgctcaaccctgcctgaactttcctgtaaacagccactgacagactgcatccctgctgggtggatcctgcgactcctagagggaatggcacttcttgtttttaattagcaaggtgaaaggtgaattaaaactagcagtttggcaagtcagtgcaagaggctgacttctgagaggcttccaggagcccgaagagaggacctccacgggagaagggagtgcgtgtgctcggttttgtttttttctctcttttttttttttttttctgaatgaacagctttgcccaagtgactgaaaaatacagcttcttcctgaatctaccggcgtagttgctgaagagcgctctagacaggacatggctctgaagactcactctttggaatgtcctcttgctcccggcttataaacaactgtcccgaggaaagaaaggttttacatagccaaatacagcctgacaaatggcacttcggaactgtgctttctgatgacaacgcgttcgatttctgacaaagcctctcgcacgctgcccctggagggaagtcctaagtaaaactcagaccctccttaaagtgaggagcgagggcttggacggtgaacacggcagcatggcatccgcggggcacattatcaccttgctcctgtggggttacttactggagctttggacaggaggtcatacagctgatactacccacccccggttacgcctgtcacataaagagctcttgaatctgaacagaacatcaatatttcatagcccttttggatttcttgatctccatacaatgctgctggatgaatatcaagagaggctcttcgtgggaggcagggaccttgtatattccctcagcttggagagaatcagtgacggctataaagagatacactggccgagtacagctctaaaaatggaagaatgcataatgaagggaaaagatgcgggtgaatgtgcaaattatgttcgggttttgcatcactataacaggacacaccttctgacctgtggtactggagcttttgatccagtttgtgccttcatcagagttggatatcatttggaggatcctctgtttcacctggaatcacccagatctgagagaggaaggggcagatgtccttttgaccccagctcctccttcatctccactttaattggtagtgaattgtttgctggactctacagtgactactggagcagagacgctgcgatcttccgcagcatggggcgactggcccatatccgcactgagcatgacgatgagcgtctgttgaaagaaccaaaatttgtaggttcatacatgattcctgacaatgaagacagagatgacaacaaagtatatttcttttttactgagaaggcactggaggcagaaaacaatgctcacgcaatttacaccagggtcgggcgactctgtgtgaatgatgtaggagggcagagaatactggtgaataagtggagcactttcctaaaagcgagactcgtttgctcagtaccaggaatgaatggaattgacacatattttgatgaattagaggacgtttttttgctacctaccagagatcataagaatccagtgatatttggactctttaacactaccagtaatatttttcgagggcatgctatatgtgtctatcacatgtctagcattcgggcagccttcaacggaccatatgcacataaggaaggacctgaataccactggtcagtctatgaaggaaaagtcccttatccaaggcctggttcttgtgccagcaaagtaaatggagggagatacggaaccaccaaggactatcctgatgatgccatccgatttgcaagaagtcatccactaatgtaccaggccataaaacctgcccataaaaaaccaatattggtaaaaacagatggaaaatataacctgaaacaaatagcagtagatcgagtggaagctgaggatggccaatatgacgtcttgtttattgggacagataatggaattgtgctgaaagtaatcacaatttacaaccaagaaatggaatcaatggaagaagtaattctagaagaacttcagatattcaaggatccagttcctattatttctatggagatttcttcaaagcggcaacagctgtatattggatctgcttctgctgtggctcaagtcagattccatcactgtgacatgtatggaagtgcttgtgctgactgctgcctggctcgagacccttactgtgcctgggatggcatatcctgctcccggtattacccaacaggcacacatgcaaaaaggcgtttccggagacaagatgttcgacatggaaatgcagctcagcagtgctttggacaacagtttgttggggatgctttggataagactgaagaacatctggcttatggcatagagaacaacagtactttgctggaatgtaccccacgatctttacaagcgaaagttatctggtttgtacagaaaggacgtgagacaagaaaagaggaggtgaagacagatgacagagtggttaagatggaccttggtttactcttcctaaggttacacaaatcagatgctgggacctatttttgccagacagtagagcatagctttgtccatacggtccgtaaaatcaccttggaggtagtggaagaggagaaagtcgaggatatgtttaacaaggacgatgaggaggacaggcatcacaggatgccttgtcctgctcagagtagcatctcgcagggagcaaaaccatggtacaaggaattcttgcagctgatcggttatagcaacttccagagagtggaagaatactgcgagaaagtatggtgcacagatagaaagaggaaaaagcttaaaatgtcaccctccaagtggaagtatgccaaccctcaggaaaagaagctccgttccaaacctgagcattaccgcctgcccaggcacacgctggactcctgatggggtgagactatctactgtcttttgaagaatttatatttggaaagtaaaaaagtaaaaaaataaatcatccaacttctttgcattacttaaaagagatttctgtaatacaggaatgactatgaaggtgttataataaattattctacatactcatttgactggataaactttacataaaattaactaattttttaaataaatgcattgcttaatggtttctcattatgtttatcaaaaaacaactgtagctgttattttcagtacttggctgcttttctgtgaaaattattattttacttttggaagacaagattattagaatattgaagaaaaattggagacttataatcatggtaaatataaaactaaatatgttttaatatttctgaatttttcttttccatcacaatgtaagatatgcagaatacaagatactttggcattctcatgtgaactttctgtactctttaaggattattttattagtgttgtttaagccatgagtgttaagtagcaggtgtgttgtgagtgctgtaacccatgaaaggaaaaatgtcattctgaggcttgtgcccttcgtaaaatattcattaaagtacattcacactatttttgctttataacacagtctttaattttcactcactgtggaaataaaaactaaggtaacttctcagaaagatatcaaatctcagaaagaatgtcaaatcagatgaagttatagttaggattctaactactgtaaaagatttttgcttccctcttgtggtaaaaaaaattatattctcacacatttcttttttctctacagacggatatctgtttaggaaagatttgaaagcagattatcagtaggtacatggatacatcaagttcatttgcagaaacaaataactgaaataaaaaacatgttaatccttgtatcatactttaatatgaaagtattgtttatagataatttatctcacaagtcaaaaatgaagattttgcagcactgaaaatctattaaagctccaaattttaagtttctaaataatcttcgctgaaatctaaaatatactataacaaccgtgttttatttgtgaaaaaaatattaaagtgatttgctctcaaatatcaaattttcttctctcttttatattaagagacagaaaattgtttcatgagttcacttaactactgagatattcagagcatttttacctctctcttaaatgttataaaaaacaattgtatttttaagaatgtttatttatcaaagtctttccttcttctattaaatatttagcaattacctttctaaaatatgaaattttgtaagatgttttcacctaaataaaaattgaaagcaagtggattacacaggagaaccattatgaacatttatttagatattaatcttaaacagtgtttatttcagttttcaaagttagcttataggttatacatttaagttaaagtgctcataatcacttgcaatttcattgtaaaatgaacaaatacataaatattttaagaaaaatttaagtttattcagataagtcaccatgcttcaaaagatctaagaaatgcaaatatactgaaaattgacatcctctgaaaattccacttgctatttacccaagaatccactggaggtcattactgccattaaataataactgaaaagactatgtagtgaaatgtatttttaaaaactatattcagtaaaagcctgctcaatttggagaaatagaaccacaaacacagatcacaggggccttacaaagtttatgtctgaacaaataagtcaattaagtacactttattgaaaattgccttccattaacacacaagaaagaaagcaggattttctcctgtatctgaattttaaaattaaaaaggcagataagacataaatagttatcattttaattgcaataacacagacaagtagttaatgatgataacaatggtgtaacttgtaaactaaatatttggtaactgaagcaataggcagaggaaaatagcttttctatgacacaagtcataagaagtccatatactgaagagcgtttgattaaaataaagtgactattaaccagaaaagaaacattttacataaaatgctaaaatttattataggaaaataaatcaaacccaaagaaagtttattcaatgctaatttgaaagaaaattgataagaaaactttgagggcccaagtccacaatttggtgagaccactaaattttacatataattatacacacacatatgtacatatatatgtatataatcttgcttcccgcctgtttatggcagtactgaagagaaatgggaaagaagagggagggagagagaaagacgaagggagagagaaagcagtttccaaggatatgtttcatgtcccaccattttctcagtttctccctctctctcccaacacacacacacacacacccctcacatactataaaataaatcttcactgccctatcaaaatacaaataaatcaatctatgctgttctgtccttcttgagaatctaaaacataccacaaaaatacatccccagtcttttgttctgtctgaggttagaattaattcaaattcagaatctgttgtgagaaatgcccaggctttaaaaattaaaaatggatggatcttctctgaactcagggagggcacatacttagatacctacaagacttggaggaattaagagttcacccttcatctcaccaaattttccccatttttctctttcttgtagaaggagagaaaccatgctctctagcaacattgagcaaaaatcataaccactcatctaatttctaagaggcacctccatcgagggccggtctcctgcttctttagacctcttctatctttgttacaggagaggacctgtggatagacttagttttgacataaaacaatgcccattcacctcctccttcagcacaacgtcacccattgggcaagagatccagatttgttaacaaaaaagattttacttcgtgattccacgtctataattctatattgctaattttttcttttgtgtgaattactgaatatttcagagcaaagctatcaacttggagaaacagggattaaaaataaggataaacactaataagagctctagaaaaaagggaacagaaagtctgcctgtttagtaagtggcaattccatacatattttagagttttttctatctaaaattagttaaatacttagaatgtttgtaatgagtgttcgatatttgctataggttttagggttttgtaaatcttcatagtaattataaacatttgtaaaatttgtaaaatactataagtcattttgagtgttggtgttaagcatgaaacaaacagcagctgttgtccttaaaaatgaattgacctggccgggcgcggtggctcacgcctgtaatcccagcactttgggaggccgaggcgggtggatcatgaggtcaggagatcgagaccatcctggctaacaaggtgaaaccccgtctctactaaaaatacaaaaaattagccgggcgcggtggcgggcgcctgtagtcccagctacttgggaggctgaggcaggagaatggcgtgaacccgggaagcggagcttgcagtgagccgagattgcgccactgcagtccgcagtccggcctgggcgacagagcgagactccgtctc

SEQ ID NO: 3556 - DNA, 1883 bp, Homo Sapiens
  NM_012445
gggaggggaggggagggataggacagacagacaaagaaaggggtgcggcagcactgccaggggaagagggtgatccgacccggggaaggtcgctgggcagggcgagttgggaaagcggcagcccccgccgcccccgcagccccttctcctcctttctcccacgtcctatctgcctctcgctggaggccaggccgtgcagcatcgaagacaggaggaactggagcctcattggccggcccggggcgccggcctcgggcttaaataggagctccgggctctggctgggacccgaccgctgccggccgcgctcccgctgctcctgccgggtgatggaaaaccccagcccggccgccgccctgggcaaggccctctgcgctctcctcctggccactctcggcgccgccggccagcctcttgggggagagtccatctgttccgccagagccccggccaaatacagcatcaccttcacgggcaagtggagccagacggccttccccaagcagtaccccctgttccgcccccctgcgcagtggtcttcgctgctgggggccgcgcatagctccgactacagcatgtggaggaagaaccagtacgtcagtaacgggctgcgcgactttgcggagcgcggcgaggcctgggcgctgatgaaggagatcgaggcggcgggggaggcgctgcagagcgtgcacgcggtgttttcggcgcccgccgtccccagcggcaccgggcagacgtcggcggagctggaggtgcagcgcaggcactcgctggtctcgtttgtggtgcgcatcgtgcccagccccgactggttcgtgggcgtggacagcctggacctgtgcgacggggaccgttggcgggaacaggcggcgctggacctgtacccctacgacgccgggacggacagcggcttcaccttctcctcccccaacttcgccaccatcccgcaggacacggtgaccgagataacgtcctcctctcccagccacccggccaactccttctactacccgcggctgaaggccctgcctcccatcgccagggtgacactggtgcggctgcgacagagccccagggccttcatccctcccgccccagtcctgcccagcagggacaatgagattgtagacagcgcctcagttccagaaacgccgctggactgcgaggtctccctgtggtcgtcctggggactgtgcggaggccactgtgggaggctcgggaccaagagcaggactcgctacgtccgggtccagcccgccaacaacgggagcccctgccccgagctcgaagaagaggctgagtgcgtccctgataactgcgtctaagaccagagccccgcagcccctggggccccccggagccatggggtgtcgggggctcctgtgcaggctcatgctgcaggcggccgagggcacagggggtttcgcgctgctcctgaccgcggtgaggccgcgccgaccatctctgcactgaagggccctctggtggccggcacgggcattgggaaacagcctcctcctttcccaaccttgcttcttaggggcccccgtgtcccgtctgctctcagcctcctcctcctgcaggataaagtcatccccaaggctccagctactctaaattatgtctccttataagttattgctgctccaggagattgtccttcatcgtccaggggcctggctcccacgtggttgcagatacctcagacctggtgctctaggctgtgctgagcccactctcccgagggcgcatccaagcgggggccacttgagaagtgaataaatggggcggtttcggaagcgtcagtgtttccatgttatggatctctctgcgtttgaataaagactatctctgttgctcacaaaaaaaaaaaaaaaaaaaaa

SEQ ID NO: 3557 - DNA, 1948 bp, Homo Sapiens
  NM_012446
ggcttagccgccaccgcgcgcttcggaaggccagagggagggggaggcctgtcagtctcgcgcgttgcctgggcgaagggggcggagctttggcgtggggcggccaatagtgggggtggctgcgtgggtcgccatggggacggggctgttcccggggaggctgtgatgggttgacaggtgcgtgacagtgggagctgctctcggcacaagcatgtacggcaaaggcaagagtaacagcagcgccgtcccgtccgacagccaggcccgggagaagttagcactctacgtatatgaatatctgctccatgtaggagctcagaaatcagctcaaacatttttatcagagataagatgggaaaaaaacatcacattgggggaaccaccaggattcttacattcttggtggtgtgtattttgggatctctactgtgcagctccagagagacgtgaaacatgtgaacactcaagtgaagcaaaagccttccatgattacagtgctgcagcagctcccagtccagtgctaggaaacattcccccaggagatggcatgccagtaggtcctgtaccaccagggttctttcagccttttatgtcacctcggtaccctggaggtccaaggcccccattgaggatacctaatcaggcacttggaggtgtcccaggaagtcagccattactccccagtggaatggatccaactcgacaacaaggacatccaaatatgggtgggccaatgcagagaatgactcctccaagaggaatggtgcccttaggaccacagaactatggaggtgcaatgagacccccactgaatgctttaggtggccctggaatgcctggaatgaacatgggtccaggtggtggtagaccttggccaaacccaacaaatgccaattcaataccatactcctcagcatctcctgggaattatgtaggtcctccaggaggtggagggccaccaggaacacccatcatgcctagtccagcagattcaaccaactctggtgataacatgtatactttaatgaatgcagtacctcctggacctaacagacctaattttccaatgggtcctgggtcagatggtcccatgggtggattaggaggaatggagtcacatcacatgaatggctctttaggctcaggagatatggacagtatttccaagaattctcccaataatatgagcctgagtaatcaaccgggcactccaagggatgatggcgaaatggggggaaatttcttaaatccttttcagagtgagagttactcccctagcatgacaatgagcgtgtgatccattaccaagtctcctcatgaaaaccacagtgagtcagcccttcacagaactactacggaagaaaattattcatcacagtgtacagttaaacaaaggaatctcagtcacaccaaaccaacctttttatttcctgctctctcccctcttttgtgaagaaagcgggtccaaatgtgattcaaacaactgtacggagtggcatattagaattgccctaaactgaactgcaaataattatgtgtgtatgtatatgtgtgggaaagagaatgtactgtatatgtgtatgttatacagacatatacacatacatacattgacccacaggacattgtaaaatattatcacatgacatcttaagtagaaataagtagggacttttattccatcctttttttcacgtttacattttaattattacaagttgctcctgccccctccctgaactattttgtgctgtgtatatcactgctttatataagttattttttaaggtgaactcagatgttatggttttgtaaatgtctgcaatcatggataggaataaaatcgcttatttgagagctttcattaaattgcgtctgatgcaagttatcctgtgaatcacaaagtgtactgtctcaaaaaatagaagaaaatgtgtcttcgtcttta

SEQ ID NO: 3558 - DNA, 5171 bp, Homo Sapiens
  NM_012448
ggcgggaggagagtcggcggccggagccgtcaccccgggcggggacccagcgcaggcaactccgcgcggcggcccggccgagggagggagcgagcgggcgggcgggcaagccagacagctgggccggagcagccgcgggcgcccgaggggccgagcgagattgtaaaccatggctgtgtggatacaagctcagcagctccaaggagaagcccttcatcagatgcaagcgttatatggccagcattttcccattgaggtgcggcattatttatcccagtggattgaaagccaagcatgggactcagtagatcttgataatccacaggagaacattaaggccacccagctcctggagggcctggtgcaggagctgcagaagaaggcagagcaccaggtgggggaagatgggtttttactgaagatcaagctggggcactatgccacacagctccagaacacgtatgaccgctgccccatggagctggtccgctgcatccgccatatattgtacaatgaacagaggttggtccgagaagccaacaatggtagctctccagctggaagccttgctgatgccatgtcccagaaacacctccagatcaaccagacgtttgaggagctgcgactggtcacgcaggacacagagaatgagttaaaaaagctgcagcagactcaggagtacttcatcatccagtaccaggagagcctgaggatccaagctcagtttggcccgctggcccagctgagcccccaggagcgtctgagccgggagacggccctccagcagaagcaggtgtctctggaggcctggttgcagcgtgaggcacagacactgcagcagtaccgcgtggagctggccgagaagcaccagaagaccctgcagctgctgcggaagcagcagaccatcatcctggatgacgagctgatccagtggaagcggcggcagcagctggccgggaacggcgggccccccgagggcagcctggacgtgctacagtcctggtgtgagaagttggccgagatcatctggcagaaccggcagcagatccgcagggctgagcacctctgccagcagctgcccatccccggcccagtggaggagatgctggccgaggtcaacgccaccatcacggacattatctcagccctggtgaccagcacgttcatcattgagaagcagcctcctcaggtcctgaagacccagaccaagtttgcagccactgtgcgcctgctggtgggcgggaagctgaacgtgcacatgaaccccccccaggtgaaggccaccatcatcagtgagcagcaggccaagtctctgctcaagaacgagaacacccgcaatgattacagtggcgagatcttgaacaactgctgcgtcatggagtaccaccaagccacaggcacccttagtgcccacttcaggaatatgtccctgaaacgaattaagaggtcagaccgtcgtggggcagagtcggtgacagaagaaaaatttacaatcctgtttgaatcccagttcagtgttggtggaaatgagctggtttttcaagtcaagaccctgtccctgccagtggtggtgatcgttcatggcagccaggacaacaatgcgacggccactgttctctgggacaatgcttttgcagagcctggcagggtgccatttgccgtgcctgacaaagtgctgtggccacagctgtgtgaggcgctcaacatgaaattcaaggccgaagtgcagagcaaccggggcctgaccaaggagaacctcgtgttcctggcgcagaaactgttcaacaacagcagcagccacctggaggactacagtggcctgtctgtgtcctggtcccagttcaacagggagaatttaccaggacggaattacactttctggcaatggtttgacggtgtgatggaagtgttaaaaaaacatctcaagcctcattggaatgatggggccattttggggtttgtaaacaagcaacaggcccatgacctactcattaacaagccagatgggaccttcctcctgagattcagtgactcagaaattggcggcatcaccattgcttggaagtttgattctcaggaaagaatgttttggaatctgatgccttttaccaccagagacttctccattcggtccctagccgaccgcttgggagacttgaattaccttatctacgtgtttcctgatcggccaaaagatgaagtatactccaaatactacacaccagttccctgcgagtctgctactgctaaagctgttgatggatacgtgaagccacagatcaagcaagtggtccctgagtttgtgaacgcatctgcagatgccgggggcggcagcgccacgtacatggaccaggccccctccccagctgtgtgtccccaggctcactataacatgtacccacagaaccctgactcagtccttgacaccgatggggacttcgatctggaggacacaatggacgtagcgcggcgtgtggaggagctcctgggccggccaatggacagtcagtggatcccgcacgcacaatcgtgaccccgcgacctctccatcttcagcttcttcatcttcaccagaggaatcactcttgtggatgttttaattccatgaatcgcttctcttttgaaacaatactcataatgtgaagtgttaatactagttgtgaccttagtgtttctgtgcatggtggcaccagcgaagggagtgcgagtatgtgtttgtgtgtgtgtgtgtgtgtgtgtgtgtgtgcgtgtttgcacgttatggtgtttctccctctcactgtctgagagtttagttgtagcagaggggccacagacagaagctgtggtggtttttactttgtgcaaaaaggcagtgagtttcgtgaagcctggaagttggccatgtgtcttaagagtggctggactttgacatgtggctgtttgaataagagaaggacaaagggaggagaaagcacatgtgctccagtgagtcttcgtcactctgtctgccaagcaattgatatataaccgtgattgtctctgcttttcttctgaaatgtagataactgctttttgacaaagagagccttccctctcccccacccctgtgttcttgggtaggaatgggaaaaggggcaacctacaaagattgttggggcaagggaagtcacaagctttcggatgggcggtggcttttcacaaaacatttagctcatcttattctctctttgtcctctctcccctcctgcccgcccgcaccctggaattgccactcagttcctctgggtgtgcacatatgtttggagaaatagaggagagaaaagagggccacgtaactgagagcttacagtgccaatgccgtttgtgttctggccagagtggagtgcgcagccctgactcccaggcgctgagattgttgcctggttacccaggaagctgctgttccggctgcccagcctttctctgagccagcggatgcacagtccgtggccttcttcaggcttattgatgatgctttttgcaaatgttgaatcatggttctgtttctaagttggatcttttttgttttctccttgccaccctaatttgacatcaaaattctctcttgtgcattgggccctgggtcattcaaacccaggtcacctcattccccttctctgttcacacctaatgtcttgaagagtaggtagcagcagtgtgggctgaacctaggccagcttgcttagcgggtcaccctgctgtgaagtcctggcaggtgttggtaatgtgtggaaatgcagtcagcaagtttgctggggagtttgataaaagtataaaacaaaacaaaaaaagcctcggtataattttgttccacgacttcttctgtagctttacaccagaaggaaggaatgggctacagcaggtagtggaggaagaggggggtgagcaggtgtattaaaatagcttacgggtaaggcctaaaaggtcacccctcggccccctctccaaaagaagggcatgggcacccccaggagaggatggccccaaaaaccttatttttatacatgagagtaaataaacatattttttttacaaaaataacttctgaatttatcagtgttttgccgttaaaaatattcctctatagtaaattatttattggaagatgacttttttaaagctgccgtttgccttggcttggtttcatacactgatttatttttctatgccaggcagtagagtctctctgcctctgaggagcaggctacccgcatcccactcagcccctccctacccctcaagatttgatgaaaattccaaccatgaggatgggtgcatcggggaagggtgagaaggagagcctgcctgctcagggatccaggctcgtagagtcactccctgcccgtctcccagagatgcttcaccagcacctgcctctgagacctcgctctctgttccagcaaccctggttggggggtcagacttgatacactttcaggttgggagtggacccaccccagggcctgctgaggacagagcagccaggccgtcctggctcactttgcagttggcactgggttggggaggaagagagctgatgagtgtggcttccctgagctggggtttccctgcttgtccagttgtgagctgtcctcggtgttaccgaggctgtgcctagagagtggagatttttgatgaaaggtgtgctcgctctctgcgttctatcttctctctcctccttgttcctgcaaaccacaagataaaggtagtggtgtgtctcgaccccatcagcctctcacccactcccagacacacacaagtcctcaaaagtttcagctccgtgtgtgagatgtgcaggttttttctagggggtagggggagactaaaatcgaatataacttaaaatgaaagtatactttttataatttttctttttaaaacttggtgaaattatttcagatacatattttagtgtcaaggcagattagttatttagccaccaaaaaaaagtattgtgtacaatttggggcctcaaatttgactctgcctcaaaaaaaagaaatatatcctatgcagagttacagtcacaaagttgtgtattttatgttacaataaagccttcctctgaagggaaaaaaaaaaaaaaaaaaaaaaaaaaaaaaaaaaaaaaaaaaaaaaaaaaaaaaaaaaaaaaaaaaaaaaaaaaaaaa

SEQ ID NO: 3559 - DNA, 5039 bp, Homo Sapiens
  NM_012455
caagccgactgtgagccaggaagtgctcttggggagcccaggccaagccatccattcttgggtcctttggagggtagatatggattcccagtttctccagcggccagtgctccccctagtccacacagtgagaccgtgaaagcagatgctccggggcactcctgggcagcttttgctcagtggatgatgggtgactacagactccctgaccacccccagcccatggaaattctcaacctgtacttgggagacagcctggagccccacccaggagagtgcccaagggaaacgtgcagccatgaggatccaccggagcctttcgaggagcaaacctgggccactgaccctcctgaacctaccagacaaaatgttcctccctggggctccggtgtggagctcacacacctggggagctgggtccatcaggacgggctggagccttgccaggagcaaacccgggccactgaccctcctgaatctaccagacaagatgctcctccctggggctccggtgtggagctcacacacctggggagcccctctgcccagagggagcacaggcagaacacagcatcaccagggtcaccagtgaacagccatctaccggggagcccaaagcagaaccggagcacgtccacacaggtagtgttctgggcaggcatcctgcaggcccagatgtgtgtcctagacctggaggaggagctggagaagacggaagggctcaaggctgggctgaaatgctgtctccccacgccccctgtggacctccccggggacacgggcctgcactccagcccacctgagaatgaagactcaggggaagacagcagtgagcctgagggagagggccaggcatggctgagagagggaaccccagactcttccccacagtggggagctgaggaggagagcatgttcttcagcaaccccctcttcctggcgagtccttgctcagagaacagtgcttctggagagtgcttttcctggggggcttcagactcccatgcaggtgtgaggactggacctgagagcccagcgactctggagcctcccctcccagaagacacagtgctgtgggagctggaaagtgagccagatttgggggacggcgctgctatcagtgggcattgtacccctccattccctgtgcccatctataaaccacactccatctgctgggcctcagtggctgccgctgagggggctcctgcagcacctcctggtcacggggagagtgagggagataggcttggtcctgctccatctgcagcaccgtgtgtggacgaagcattgacctgggaatcaggatgtgtcggatctgatcttggccctgctgcacatcctgtgcaaccttgggcctctctcagccctgagggctggcagagaggaggtcctttttggccccaggtgactcttaactcccaggacagagatgagagggagggtggacacccccaggaatctcttccctgcaccttggccccctgcccctggaggagcccagcttcttctccagagcctagcagcccagaatctgagagcagaggccctggtcccaggcccagccctgcatcgtcccaggagggcagcccgcagcttcaacaccacagctcaggcattttgcccaagtggacactagatgcttcacagtcttcactcttggagacggatggggaacagccaagttccttgaagaaaaaggaggcaggggaggccccaaaaccaggcgaggaagtaaagagtgaaggaacagccaggcctgcagagactggagacgtccagcctgacattcacctgacttctgcagaacatgagaatctgaggacaccgatgaactcttcttggcttcctgggagccctatgccccaagcacagtccccagaggaaggccagagaccaccagctggagacaagctagctaatggcgtcaggaacaacaaggtagcctggaacttggcctcacgcctctatcgcctggagggcttccggaagtctgaagtggctgcctacctgcagaagaacaatgactttagcagggctgtggctgaggagtacctgtccttcttccagtttggaggccagagtctggaccgagccctccggagcttcctccaggccttggtgctcagtggggagactcaggaacgggagcgaatcctctaccagttctccagacgcttccaccattgcaatccggggatcttcccctcagtagattctgtacacaccttgacatgtgcaatcatgctgcttaacacggacctgcatggacagaacattgggaagagcatgagctgccaggaattcataaccaacctgaatgggctgagggatggcgggaacttccccaaggagctgctgaaggccctctactggtctatccgcagcgagaagctcgagtgggccgtggatgaagaagacacagccagacctgagaaggcccagccgtccctgccagctggcaagatgagcaagcccttccttcagctggctcaggatcccacagtgcccacctacaagcagggcatcctggctcggaaaatgcatcaagatgcagacggcaagaagacgccatggggcaagcgtggctggaagatgttccacaccttactgcgagggatggttctctacttcctgaagcagggagaagaccactgtctggagggggagagcttggtggggcagatggtggatgagcccgtgggggtgcaccactcgctggccacccccgccacgcattacaccaagaagccgcacgtcttccagctgcgcacggctgactggcgcctctacctcttccaggcacccactgccaaggagatgagctcctggatcgcgcgcatcaacttggctgcggccacgcactccgcgccgcccttccccgccgctgtgggctcccagcgcagattcgtgcggcccatcctgcccgtgggccccgcccagagctccctggaggagcagcatcgatcccacgagaactgcctggacgctgccgcggacgacctgctggatctacagaggaacctgccggagcggcggggccgtggccgcgagctggaggagcaccgcctgcggaaggagtacctggagtacgagaaaacccgctacgagacctacgtgcagctgctggtggcccgcctgcactgcccctctgatgctctggacctgtgggaggagcagctggggagggaagctggaggcactcgggagcccaagctcagcctgaagaagtcccactcgagcccgtccctgcaccaggatgaggctcccaccacggccaaggtgaagcgcaacatctcagagcgcagaacctaccggaagatcatccctaagcggaaccgcaatcagctgtgaagccagcaccacctcagagacactgttccctgctccagggtagacctgagatgaacctccctggaggagacttatttcaatgagtccaccatgacggatgaggcacctcctttccctgctgaaggacaaaccttgtttccctgtggccctcattcttgtgctccctgaagctttcctaatattgctgtgctccccaccacccccatggcagtccctccgcagccccagtccctggccacgcccaagggaagagggaggtgaggacttgactttcctcccagagctcagcccatgtcaccctccaggccccagaatccagagtggcctcatttcctagacttgctgagaactcagcacttgtttgagaaccagtgcttatgtggtgtgcccttggcttctgggggagagcttggggcagcagaggcccctgggcagcccagccaggggagccacagccccgaggatggtcttgctctgggaattaggtgaccttcctggggaggccccaggagagtgaatcagggactcttgagaaattcctaaccagcctcctgtgacccagggagcagggtcgctaaggtcctgcccactgaggggacagccttctgggcagggacctcggggggcttcaagggctctgcacggctgtggggccctgtgcctttgtctccttgtgtctcctttcccccgaagtagatgaaacagtctcacatacccaactgctcatcaacagagcagagctgatggcatgagtgagggctgggcggggtggggcctccagagctttgcagggaaccctggaaccctaggaacaaggagcctttgttccaacagagcagagaaggaggttctctatgttcagaccactggagaggatagagaggtaaaaggtggcgacagtttcccttaggggtctgcctggcaggagccacagctcaggagagttgtgagggatgggacggaggctggcgaccaggcgaggcctaggccaggctcgggagacttttctgtgctcctttctacacatgccttaaaccttccttcctgtggggtgcctggaccccttccccatctctggcagctcagagggtctctgctgctctcccctgggaaatcccctcatcctgccctctggctgcctcccagctgggcttgttctctgagggaggttccggagactcatggacttggggctctgcctgtaggaaggaggctgggccggagggaccagccaccattgtctctgttcagccaagtgtgcaagtaggctgcccgccaagagggggcctctgctacccgctgctgcctgccggctgacacactgcctccccagccttcctgctaggccaccctcctcccttcccatgcttgtaaccagctctggggcttgcacctccacaaagtaaggttggcccttggaggccatgtttgggtctccggccagggcctagggctaggccatgcacccaatgggtgcacaataaataacaggtcaacaaagagggaggtgtgtcagtgtgtgaggaagggaggtcaggcagctaggaccacctgcagtgtggcaggcttcatccctctttgctccaagtgtgtatgtgtgtctgtgcatgtgtgtagtgtctgtgtctgtgtgttcatgcatatgcaggagtcacacggtcataggccatcaaagctggaggaga

SEQ ID NO: 3560 - DNA, 823 bp, Homo Sapiens
  NM_012459
aagtcgagaggcggtgcacacccgtcgcgcatgcgcaaacacagctgtcggaaggtggcgagcctgaggcgaacaatggcggagctgggcgaagccgatgaagcggagttgcagcgcctggtggccgccgagcagcagaaggcgcagtttactgcacaggtgcatcacttcatggagttatgttgggataaatgtgtggagaagccagggaatcgcctagactctcgcactgaaaattgtctctccagctgtgtagaccgcttcattgacaccactcttgccatcaccagtcggtttgcccagattgtacagaaaggagggcagtaggccatcccccaggagaatgacagaagcaaaggacttgttactaagcagatttaagggtcagtgggggaaggctatcaacccattgtcagatcagcatcaggctgttatcaagtctgttggtgctaaaaagtaaaagatgaaatgttcaaagagtgaaatttatttatttggaattcagaaattccaggttgtatgacatcagttactcaataagtgtgaattctccaactcttcttttaatcccattttagaatttaatatagagatctctgattggcaggaacactagaaataaatgttccatggccagtagtgcaaatgggggattgtaggttttgaaaaaccaccctaagccatattaagggggttggaagaaccatcgaagcctaaggcatagaagaaaatttggggttaagaaagatgaagaacaaaaaacagctttattgcttatacatgaccaagaaaaggaaaacatggcaaaaaaaaaaaaaaaaaa

SEQ ID NO: 3561 - DNA, 1108 bp, Homo Sapiens
  NM_012460
cacaagaccgctctacagtctcatccaagacttgaagagctcccgacttgtaatactacttgtgtttaccagggactgttgacactgcttcgcttccgaagaccgttagggacgtgggattagatttcctcgcgttataacgaatcggcgtctaagggtttaagtgtcacttgacattactgctcccacgtgttctttcccatctggcggccgcggctcctgtccagaccctgaccctccctcccaaggctcaaccgtcccccaacaaccgccagccttgtactgatgtcggctgcgagagcctgtgcttaagtaagaatcaggccttattggagacattcaagcaaaggttggacaactacttttccagaacagaaaggaaactcatgcatcagaaaaggtgactaataaaggtaccagaagaatatggctgcacaaataccagaatctgatcagataaaacagtttaaggaatttctggggacctacaataaacttacagagacctgctttttggactgtgttaaagacttcacaacaagagaagtaaaacctgaagagaccacctgttcagaacattgcttacagaaatatttaaaaatgacacaaagaatatccatgagatttcaggaatatcatattcagcagaatgaagccctggcagccaaagcaggactccttggccaaccacgatagagaagtcctgatggatgaacttttgatgaaagattgccaacagctgctttattggaaatgaggactcatctgatagaatcccctgaaagcagtagccaccatgttcaaccatctgtcatgactgtttggcaaatggaaaccgctggagaaacaaaattgctatttaccaggaataatcacaatagaaggtcttattgttcagtgaaataataagatgcaacatttgttgaggccttatgattcagcagcttggtcacttgattagaaaaataaaccattgtttcttcaattgtgactgttaattttaaagcaacttatgtgttcgatcatgtatgagatagaaaaatttttattactcaaagtaaaataaatggaaatatcaaaaaaaaaaaaaaaaaaaaaaaaaaaaaaa

SEQ ID NO: 3562 - DNA, 2196 bp, Homo Sapiens
  NM_012461
ctcttaccgcccttttccggggcaagggaagctagtagcggagccggaagtgaggcaccctcgggctcgagacagcggcgacgtttaaagctgagcgacccagtgccactggagacggtcagcttctccactcaggctcctccagcccgagccagaagaccccctcccccagaattctgggggccgatggaagggagccgagtcagatcgcgaggtacccagagccgacagaccggagcgacagggagttgccagaagccccgcccctaggagtgatcggaaagcctcacccatccgggtgaggaacccggagggaccgcctccgggcggagcccgccgaccatggctacgcccctggtggcgggtcccgcagctctacgcttcgccgccgcggctagctggcaggttgtgcgcggacgctgcgtggaacattttccgcgagtactggagtttctgcgatctctgcgcgctgttgcccctggcttggttcgctaccggcaccacgaacgcctttgtatgggcctaaaggccaaggtggtggtggagctgatcctgcagggccggccttgggcccaagtcctgaaagccctgaatcaccactttccagaatctggacctatagtgcgggatcccaaggctacaaagcaggatctgaggaagattttggaggcacaggaaactttttaccagcaggtgaagcagctgtcagaggctcctgtggatttggcctcgaagctgcaggaacttgaacaagagtatggggaaccctttctggctgccatggaaaagctgctttttgagtacttgtgtcagctggagaaagcactgcctacaccgcaggcacagcagcttcaggatgtgctgagttggatgcagcctggagtctctatcacctcttctcttgcctggagacaatatggtgtggacatggggtggctgcttccagagtgctctgttactgactcagtgaacctggctgagcccatggaacagaatcctcctcagcaacaaagactagcactccacaatcccctgccaaaagccaagcctggcacacatcttcctcagggaccatcttcaaggacgcacccagaacctctagctggccgacacttcaatctggcccctctaggccgacgaagagttcagtcccaatgggcctccactaggggaggccataaggagcgccccacagtcatgctgtttccctttaggaatctcggctcaccaacccaggtcatatctaagcctgagagcaaggaagaacatgcgatatacacagcagacctagccatgggcacaagagcagcctccactgggaagtctaagagtccatgccagaccctggggggaagggctctgaaggagaacccagttgacttgcctgccacagagcaaaaggagtgagtggaacagagttgcttcttactaggagcacattctttgcctgccttcccttcatcctatcctctttgcttgctctcacctcaggaattgcttggattgctacatggaccccctgagactatcattattacctcctagggccaggaagccaggtaggtagtctgagtcaggattggatcaacagcctcctctcttggggactctcaagagcctgtgttcatctagaagtagtagtttgattctggtttccctcctacagtgtgtcctccgtctctgtgcagctccgtcattaccataggggacttggttttagactctgatgaggaagaaaatggccagggggaaggaaaggtgagtgggaaggagcagaaagctgggaaaggggatgggtagaacaagactgagaaatccacatgcttcagaattcagagggttcagggaatggtttcggatagtaggctctccctgctcccttctctacaggaatctctggaaaactatcagaagacaaagtttgacaccttgatacccactctctgtgaatacctacccccttctggccacggtgccatacctgtttcttcctgtgactgtagagacagttctagacctttgtgatagaactaaaatgctctctgtactctagtctcctgcctcctcagctctgcaagtagtttagtaggaatgaagtggaagtccaggcttggattgcctaactacactgctaaaaatatttgtaatccttaataattaaactttggatttgttaaaaaaaaaaaaaaaaaaaaa

SEQ ID NO: 3563 - DNA, 6550 bp, Homo Sapiens
  NM_012463
gggggcggaaccggaaccggcagtggcttgggggcgggacctcgcggactgctgtggcggcagctggagcggcggccgcggtggcagaaccgggggcggccgctgcagtctggagccccatagtgcggggccgcggccaggccacaggaagagctcgaggcccgggccgcaccggctgagtgtgcgggcccgcgcggctcggagccgccgccgcccatcgagcccctccgggcgcgggtcggcccgccatggggtccctgttccggagcgagaccatgtgcctggcgcagctcttcctgcagtcgggcacggcctacgagtgcctcagcgccctgggcgagaaaggcctggtccagttccgagacctcaaccagaacgtaagttctttccaaagaaaatttgttggtgaggtgaagaggtgtgaagagctagagcgaatattggtgtatttggtacaggaaattaatagagctgatattccccttcctgaaggagaggccagccctcctgcgccacccctgaaacaggttctagaaatgcaggagcagttgcagaagctcgaggttgaactgagagaagtcactaagaacaaggagaaactgaggaaaaacttgctggaactgatagagtacactcacatgctgagagtgacaaagacctttgtgaaacgcaatgttgagtttgaacccacttatgaagaattcccttccttagagagtgattctttgttggattacagctgtatgcagaggctgggagcaaaactgggatttgtgtctggcctaattaaccaaggaaaagtggaagcatttgaaaaaatgttgtggagagtctgcaaagggtacaccatcgtgtcctatgcagaactggatgaatcccttgaagaccctgaaacaggggaagtcataaaatggtatgtctttttaatatccttttggggagagcagattggccacaaggttaagaagatatgtgattgctaccactgccacgtgtacccctatccaaacacagccgaggagcggagggagatccaggaggggctgaacacccgcatccaggatctctacactgtactgcacaaaaccgaggactatttgaggcaagtgctatgtaaagccgccgagtctgtctacagccgtgtgatccaggtgaagaaaatgaaggccatctatcacatgctgaacatgtgcagctttgacgtgaccaacaagtgcctcattgctgaggtctggtgtcccgaggcggatctgcaggacctgcgccgggcactggaggagggctcgagagagagtggtgctacaatcccctcattcatgaatataatccccacaaaagaaacaccccccactcggatccgcaccaacaaattcaccgagggatttcagaacatcgtggatgcttatggagtcggaagctacagagaagtcaatccagctctctttaccatcatcaccttcccgtttttatttgctgtgatgtttggagacttcggacatggctttgtgatgtttttatttgccctcttgttggtgttaaatgaaaatcatcccagactaaatcagtcacaagagatcatgaggatgttttttaatggccggtacatcctcctgctgatggggctgttctcagtgtacactggcctcatctacaacgactgcttttcaaagtcagtcaacctgttcggctctgggtggaacgtgtcggccatgtacagctccagccacccacccgcagagcataagaagatggtgctttggaatgacagcgtcgttagacacaacagcattttgcagctggatccaagcattcctggagtgttccgaggcccttatccccttggcattgatcctatttggaacttggccacaaatcgcctcacttttctaaactctttcaaaatgaaaatgtccgtgattttaggaatcattcatatgacttttggagtcattctgggaatatttaaccacttgcacttcaggaagaagttcaacatttacctggtttccatcccggaacttctcttcatgctctgtatctttggataccttatatttatgattttctacaagtggctggttttttcagcagaaacctccagagttgctcccagcattctgattgaatttattaacatgtttttattcccagccagtaaaacaagtggcctttacacagggcaggagtatgtccagagagtgctgctggttgtcacagcattgtctgtccctgtcctcttcttgggaaagccactgtttttgttgtggcttcacaatgggcgtagttgcttcggggtgaaccggagtggctacacacttataaggaaagatagtgaggaagaagtttcattgctgggaagccaagatatagaagagggaaatcaccaggtggaagatggatgtagagaaatggcgtgtgaagagtttaattttggagaaatattaatgacccaagtaatccattccatcgagtactgtctgggatgcatctccaacaccgcctcctacctgaggctctgggcgcttagcctggctcacgcacagttgtctgatgtcctgtgggccatgctgatgcgcgtgggcctccgcgttgacaccacctatggcgtcttgctactgctcccggttatcgcgctctttgcagttttgaccattttcatccttctgatcatggaagggctttctgcgtttcttcacgccatacgcctccactgggtagaatttcagaacaaattctacgttggtgcaggcaccaaatttgttcctttctcattcagtctactttcatcaaagttcaataacgacgacagtgtggcatgatcatattgctgtaaccaacaagctttcagatttatggagaatgaccatgttatagactttcacttatgtcagatttatgataggaaaaattccatcttcattactgccttatgacatagccaaataattctgtaagatatacctcttcctcatatgttaaatattttgtaaagtttaccaatttgagatataaaaatttcttttggttttttatgatgagcaaatataagttaatgccaaacgttatgttaaagttattttttcaaatacaggatttggggagagaagccaattttgcatggctagttgaaaatggtattagatacttatttcctttaaactttatttaaaacaaacaacagagttaatctgtcacctgaagttgccagataatattttccaacagctgaagtagggatagttttttaaaaaatttaatgatgggtaatcaaaacattcacatttattctgctggatttaaaaatatgtactttttttttttttttgagatgaagtcttgctgtgtcacgtaggctggagtgcaatggcacgatcgtgtctcattgcaacttccgcctcctggattcaggtgattctcctgtctcagcctcccgagtaactgggattacaggcatgcgccaccgtgaccagctaatttttttgtatttttgtagagatggggtttcaccatgttggccaggctggtctcgaacttctgacctcaagtgatccacctgcctcggcctccctaagtgctgggattacaggcgtgagccaccatgcctggccaaaatatgcaaatattttttatcctgtgctacctagaattacaagtagaggattgtttttacaattttgtcttgttttagtaattggggacaatgggataaaatgacatacaacaaatggttatcccacttgtatatttttttaaagactcttatcctgttacccttacataaaaccagttatgataattgtatgtttggaagataaattgtatgctgagccttaaaacccagtgtgactgtagaagatataatgcggacatgatttgaatttagtgacagcttggctgatgtcactgaaccagaagggtttatactgagtgaaggaaaggtaaaaagtagtattttgtatatttttgtaacaaaatataaatgaagatattttaccatgaagagattgcacttatccttgagaacagtctaaatataaatgaagatattttaccatgaagagattgcacttatccttgagaacagtctaatgatactttttttactttcagactgtttctagctaaagttctgataaaagtattgagttaatttaaactttcaaacactgtttagatcagttgaaaactaattcttaatagccattgttttataatctttagtttaaattcatctgtttgacatttggttttttgtgaacttgagtcagtcctattgaacattttgacctatattcttgcaaattatgttaatttttcatattttagtttgattttagacaattattttcaaaaagaaacctgactttttttcaccttcttgacattgtgagtgatacacgttaaaaggctatttgcccgcatcctcctctatcctgtttcgaggtagagagcttggcacttctgttacaagctgagagtctggaggtgctgagtttaacgtggctgtgcagctgatttcaaggcatgagctgaacagcgttgacacagccgtgacttacaattaaaccctttcaattacagtacagattctgtgtgctacttgatgagatgttacccaaggccagtttggacttactgctttttgtccctcatattaaattatcaaatgatgccgatgaaatgcttgaaaatgattctgctctcaaagttatgcttccctagaaaggtgtcatgtcgggcacttgtgttgggtgactatgacatcccagcagtgctggtcaggtctcagagttgctttcacctagagctgatgcttccacaaggggacatttgtgttactttgctccaggggtctgtcataaaaacaatggtaactacttcatccctaggaagcccaagacttcagggcactgttagctgattggtaaataagggacacgatattcacgggaattgtttactgctccccactagtaattctcatggggccacttttttaactctttctaattaacacctcttctcagcatagagcagaggatgcagtcatttctctgttgaaatctatgtagtatttatgtagaatgtcattatatgaaaagcgaattcagaatcctaactctgggaaagcgctctctggaaatgtagtttgataatagtgtcttataggggccacgggaatttgtttctctataaagcgatgggctccagtgtcatgttaccagagttatcgctcagttttgtttgttaaggcttttgctagaacctattatgtatccagtttttaaaacatacttcattcccttgatagcagagatccagagcacagatggcaagttgtgtggatgatactgaatatgtttattttcctaaagataaatgtcacgacacgacatttctcagtttttatttagatgtttattaccatgtgttaacagaatcttaaaacccaagggatttcttcagtaaactagactttgattcaacctgctgggctggagactgtaattgccgtggtcagttaaggagtgcaaagggtgttctgtctgataggatctgggtgagccctgcggactttccagcagcgaaaggacttggaactcctctttcgctgaatgctgctctgtttctggaatggatattttataacaacattctggtgtcagcatcccctcagcagttgtttatttaaaaatttttttattttttttgagacagtgtctcactctgtcacctaggctgaagtgcagtggtgcagtctcggctcactgcaacctctgcctcctgggtttaagcaattctcctgccctagcctcccgagtagctgggattacaggcgcctgccacagtgcccggctaatttttgtatttttagtagagacagggtttcaccatgttggccaggctggtctcaaactcctgacctcaggtgatctacccaccttggcctcccaaagtgctgggattacaggcgtgagccaccgcgcctggccctctgcagttgtttaataaggcacagaatacctgtagcataggtcagccttacgatgtccatgaattacatattcagacgttttagagcctgatacattttggaaaagaaaaacaacttctacacctattctacagtccgcatttaaaacaataaattcctctattaaaaacgtaaagccgggtttgcttgcgtgccacagggaatatatccaggaaggttattatgaagctgtcaaatcaagatgatgggaataaggcagtttgaacgaacagtcttcccacagtcaggccatttttgctgatttggtttagaattttcagaaatacttagtacactccacctgttctttgatgggaatatctaagaaggctaggtaggttcttagggttagcctgagtcatctaggggctcaactccttgtgaggggaaatgacagtgaacaagttagtactttgctccacaaatgcatgaaaggacaaatttgcatcttctatcagtatttaacttccttttgctaatgacaaataaatatatctatatttttaaaaaaaaaaa

SEQ ID NO: 3564 - DNA, 3120 bp, Homo Sapiens
  NM_012469
gggcggggcgtgtgcggactgagcgctctgcttccggggcgcgggtgacgcgacgacggcgacactttgctacggagtgcatcggacgtcgaagcctagagtctctgcgtctttccctcttccgctgcctcattcctttccttcctagccttggtcgtcgccgccaccatgaacaagaagaagaaaccgttcctagggatgcccgcgcccctcggctacgtgccggggctgggccggggcgccactggcttcaccacgcggtcagacattgggcccgcccgtgatgcaaatgaccctgtggatgatcgccatgcacccccaggcaagagaaccgttggggaccagatgaagaaaaatcaggctgctgacgatgacgacgaggatctaaatgacaccaattacgatgagtttaatggctatgctgggagcctcttctcaagtggaccctacgagaaagatgatgaggaagcagatgctatctatgcagccctggataaaaggatggatgaaagaagaaaagaaagacgggagcaaagggagaaagaagaaatagagaaatatcgtatggaacgccccaaaatccaacagcagttctcagacctcaagaggaagttggcagaagtcacagaagaagagtggctgagcatccccgaggttggcgatgccagaaataaacgtcagcggaacccacgctatgagaagctgacccctgttcctgacagtttctttgccaaacatttacagaccggagagaaccatacctcagtggatccccgacaaactcaatttggaggtcttaacacaccctatccaggtggactaaacactccatacccaggtggaatgacgccaggactgatgacacctggcacaggtgagctggacatgaggaagattggccaagcgaggaacactctgatggacatgaggctgagccaggtgtctgactccgtgagtggacagaccgtcgttgaccccaaaggctacctgacggatttaaattccatgatcccgacacacggaggagacatcaatgatatcaagaaggcgcgactgctcctcaagtctgttcgggagacgaaccctcatcacccgccagcctggattgcatcagcccgcctggaagaagtcactgggaagctacaagtagctcggaaccttatcatgaaggggacggagatgtgccccaagagtgaagatgtctggctggaagcagccaggttgcagcctggggacacagccaaggccgtggtagcccaagctgtccgtcatctcccacagtctgtcaggatttacatcagagccgcagagctggaaacggacattcgtgcaaagaagcgggttcttcggaaagccctcgagcatgttccaaactcggttcgcttgtggaaagcagccgttgagctggaagaacctgaagatgctagaatcatgctgagccgagctgtggagtgctgccccaccagcgtggagctctggcttgctctggcaaggctggagacctatgaaaatgcccgcaaggtcttgaacaaggcgcgggagaacattcctacagaccgacatatctggatcacggctgctaagctggaggaagccaatgggaacacgcagatggtggagaagatcatcgaccgagccatcacctcgctgcgggccaacggtgtggagatcaaccgtgagcagtggatccaggatgccgaggaatgtgacagggctgggagtgtggccacctgccaggccgtcatgcgtgccgtgattgggattgggattgaggaggaagatcggaagcatacctggatggaggatgctgacagttgtgtagcccacaatgccctggagtgtgcacgagccatctacgcctacgccctgcaggtgttccccagcaagaagagtgtgtggctgcgcgccgcgtacttcgagaagaaccatggcactcgggagtccctggaagcactcctgcagagggctgtggcccactgccccaaagcagaggtgctgtggctcatgggcgccaagtccaagtggctggcaggggatgtgcctgcagcaaggagcatcctggccctggccttccaggccaaccccaacagtgaggagatctggctggcagccgtgaagctggagtccgagaatgatgagtacgagcgggcccggaggctgctggccaaggcgcggagcagtgcccccaccgcccgggtgttcatgaagtctgtgaagctggagtgggtgcaagacaacatcagggcagcccaagatctgtgcgaggaggccctgcggcactatgaggacttccccaagctgtggatgatgaaggggcagatcgaggagcagaaggagatgatggagaaggcgcgggaagcctataaccaggggttgaagaagtgtccccactccacacccctgtggcttttgctctctcggctggaggagaagattgggcagcttactcgagcacgggccattttggaaaagtctcgtctgaagaacccaaagaaccctgggctgtggttggagtccgtgcggctggagtaccgtgcggggctgaagaacatcgcaaatacactcatggccaaggcgctgcaggagtgccccaactccggtatcctgtggtctgaggccatcttcctcgaggcaaggccccagaggaggaccaagagcgtggatgccctgaagaagtgtgagcatgacccccatgtgctcctggccgtggccaagctgttttggagtcagcggaagatcaccaaggccagggagtggttccaccgcactgtgaagattgactcggacctgggggatgcctgggccttcttctacaagtttgagctgcagcatggcactgaggagcagcaggaggaggtgaggaagcgctgtgagagtgcagagcctcggcatggggagctgtggtgcgccgtgtccaaggacatcgccaactggcagaagaagatcggggacatccttaggctggtggccggccgcatcaagaacaccttctgattgagcggttgccatggccggtctccgtggggcagggttgggccgcatgtggaagggctctgagctgtgtcctccttcattaaaagtttttatgtctcgtgtcagaaaaaaaaaaaaaaaaaaaaa

SEQ ID NO: 3565 - DNA, 4422 bp, Homo Sapiens
  NM_012470
gtttgtagtgtaccaggcggaagtgtgccaaaggtatcggtgctgtcgcttccggtccgggtaaacgaaccttaggtacactggtgtgtggcctcccaagataggcttctgagggcaagtcagcgactgaagacgggagcgccagaatctgtggactcaagagtctagaatcaagtggaaaaaccggaaaaaaggccaggaacctgaatacgacctaatagctgtttccgagggggcaacttccacggagagccttctgccctggtaacggccaaagaggaggagatggcgccagtcagggagcggccgtggcccagacagtgaggaagcgcgaaggcggagcaaccgaggaatcctccggagaagaatcagagccgtcgctaccgccactaccgccaccaccatggaaggagcaaagccgacattgcagctcgtgtaccaggcagtgcaggcgctttaccacgacccagatcccagcggaaaggagcgcgcctctttttggcttggggagctgcagcgttcggttcatgcatgggagatctcagaccagttgttacagatccggcaggatgtggagtcatgctattttgctgcacagaccatgaaaatgaagattcagacctcattttatgagctccccacagactctcatgcctctttacgggactcattgctaacccatatccagaacttgaaagacttgtcacctgttattgtaacgcagctggctttagcaatagcagatcttgccctacagatgccttcctggaagggatgtgtgcaaacactggtggaaaaatacagcaatgatgtgacttctttgccttttttgctggagatccttacagtgttacctgaagaagtacatagtcgttccttacgaattggagctaatcggcgcacagaaattatagaagatttggccttctactctagtacagtagtatctctattgatgacctgtgtagaaaaagcaggaacagatgagaaaatgcttatgaaggtttttcgctgtttgggaagttggtttaacttgggagttttggacagtaacttcatggctaacaataaattactagcactcctttttgaggttttgcaacaggataagacctcgtctaacctacatgaagctgcttcggactgtgtatgctcagctctctatgccattgagaatgtggagactaacttgccattagccatgcaactttttcagggagtgctgacattggagactgcctatcatatggccgtggcacgtgaagatttagacaaagttctgaattactgccgtattttcactgaactatgtgaaacttttcttgaaaaaattgtttgtactccaggccaaggtcttggggaccttcgaactctggagctgctgcttatctgtgcaggccatcctcaatatgaggtagtagaaatttcatttaacttttggtaccgactgggggaacatttgtacaaaactaacgatgaagttattcatggcatcttcaaagcttacattcagaggctgcttcacgccttggctcgacactgccagctggaaccagaccatgagggggttcctgaggagactgatgactttggggagtttcgcatgagggtatcagacctggtaaaggacttgattttcttgatagggtctatggagtgttttgctcagttatattctactctgaaagaaggcaacccaccctgggaggtgacagaagcggttctctttatcatggctgctatagcaaagagtgttgatccggaaaacaatccaacacttgtggaagtcctagaaggagttgtccgcctcccggagaccgtacatacggctgtgcgatacaccagcattgaattggttggagagatgagtgaagtcgttgatcgaaatcctcagttccttgaccctgtgttgggctatttgatgaaaggcctgtgtgaaaagcccctggcttctgctgcagccaaagccattcataacatttgctctgtctgccgagatcacatggctcagcactttaatggactcctggagattgcccgctccctcgattccttcctgttgtctccagaagctgctgtgggcttgctaaaagggacagcacttgtcctagcccgattacctttggataagattaccgaatgtcttagtgaactatgttctgttcaggttatggcattgaaaaagctgttgtctcaagagcccagcaatggcatatcctcagatcccacagtgttcttagatcgccttgcagtgatatttaggcataccaatcccattgtggaaaatggacagactcatccgtgtcagaaagtcatacaggaaatatggccagttttatccgagactctaaataagcaccgagctgataatcggattgtagagcgttgttgcaggtgcctgcgctttgctgttcgctgtgtaggcaaaggatctgcagcactgctgcagccactagtcacacagatggtgaatgtgtaccacgtacatcagcattcctgcttcctgtaccttggcagtatccttgtggatgaatatggcatggaagaaggctgtcggcagggactgctagacatgctccaggcactgtgcatccccacctttcagctcctagaacagcagaatggtctccagaatcaccctgacactgtagatgacctgttccggctagccaccaggtttattcagcgtagccctgtcaccttgctgcggagccaagtggtcatccctatcttacagtgggccattgcctctactaccctggaccaccgggatgccaattgtagtgtcatgaggtttctacgagacctcattcatacaggggtagccaatgatcatgaagaagactttgaattacggaaagaactgattggacaggtgatgaaccagcttggacagcagcttgtcagccagctgctgcacacctgctgcttttgcctccccccctataccctaccagatgtggctgaagtgctctgggagatcatgcaggttgacagaccgactttttgtcgatggttagaaaattccttaaaaggtttgccaaaggaaacaaccgtgggagccgtcacagtgacacacaaacaacttacagacttccacaagcaagtcactagtgctgaggaatgtaaacaagtttgctgggccttgcgagacttcaccaggttgtttcgatagctcacactcctgcactgtgcctgtcacccaggaatgtcttttttaattagaagacaggaagaaaacaaaaaccagactgtgtcccacaatcagaaacctccgttgtggcagaggggccttcaccgccaccagggtgtcccgccagacagggagagactccagccttctgaggccatcctgaggagttcctgtttgggggtgtgagggaaaatcagcgcggattttaaaaagatggctgtggcctgcccggcgtggtgggaggggagctggtttcctggtgaactttctaaaaggaaaaataattttaagtaaagaaaaaagaaaaaaaaggaagactaaacagaaaccagaactgaaacattcacctggtagcaaatgacacatgcacgcacacacacatacacgcacaagcgccagtgcgcacgtgtacacagaaaaacaaaaggacaagctttctgtgaaacaaaatatttacttagggataatgtggggattcacatgaattaaatagctgcaattggaagaagagggtcagggtcatttgttcaggttttctattgttttgtcctctctttcctctcctacccttccttctctttctctctcccctccttttaaatgcaaatgagtagaaatttcttctaccttccccagctgtttcttcccacctttagagttgtttagacaaggaggagtaagcaaggaacttgttctgctttctatcgtggtcacattggtgatgctcgggacctgccagggtcagaatttatggatatctgaaccctgaccccgttcattctctcagtccacttccaatccacatcagtttgttgtctgccttggagagaagagccaaaactggggtgggcgggtgggtggggagtgcaggatataaatgtgtaagtttttgttttttaaggtttttttcttagtgaattattcacccacagacatgagagaaaaaaagagggagggtgtgtggagaaaaaatgtttacagggctaacaagggatgatgtgtcatttagtatgttactaaaaagtgtggaaatgacttgattttaaggggagggtgaggccgaagagggaagcccaaagcagatcttaatgtttcaaaggagtgcagcccttcacagccatcagatatgagggcactgttctgtctggtgttgtagccatctcaagaacaaatcaacagcaacaaaagagaaagaataaatttttaaaatttaaccagtaaaaaaaaaa

SEQ ID NO: 3566 - DNA, 2217 bp, Homo Sapiens
  NM_012475
gcgcaggcgctttgagagacggtgaagccggtggccggtggccgggcgggaccaacaaagatggcggcggcccctgcggcgggagcgatctgggcaacggctgcggctaaagctgcagccgggcccacgggggggctgcacgggggtagtagggggtggccctgaactggggcctggccctggctggcctctcccgccgcctcactgggggacaggtccagcctgtggtgtccacaatgccccaggcctctgagcaccgcctgggccgtacccgagagccacctgttaatatccagccccgagtgggatccaagctaccatttgcccccagggcccgcagcaaggagcgcagaaacccagcctctgggccaaaccccatgttacgacctctgcctccccggccaggtctgcctgatgaacggctcaagaaactggagctgggacggggacggacctcaggccctcgtcccagaggcccccttcgagcagatcatggggttcccctgcctggctcaccacccccaacagtggctttgcctctcccatctcggaccaacttagcccgttccaagtctgtgagcagtggggacttgcgtccaatggggattgccttgggagggcaccgtggcaccggagagcttggggctgcactgagccgcttggccctccggcctgagccacccactttgagacgtagcacttctctccgccgcctagggggctttcctggaccccctaccctgttcagcatacggacagagccccctgcttcccatggctccttccacatgatatccgcccggtcctctgagcctttctactctgatgacaagatggctcatcacacactccttctgggctctggtcatgttggccttcgaaacctgggaaacacgtgcttcctgaatgctgtgctgcagtgtctgagcagcactcgacctcttcgggacttctgtctgagaagggacttccggcaagaggtgcctggaggaggccgagcccaagagctcactgaagcctttgcagatgtgattggtgccctctggcaccctgactcctgcgaagctgtgaatcctactcgattccgagctgtcttccagaaatatgttccctccttctctggatacagccagcaggatgcccaagagttcctgaagctcctcatggagcggctacaccttgaaatcaaccgccgaggccgccgggctccaccgatacttgccaatggtccagttccctctccaccccgccgaggaggggctctgctagaagaacctgagttaagtgatgatgaccgagccaacctaatgtggaaacgttacctggagcgagaggacagcaagattgtggacctgtttgtgggccagttgaaaagttgtctcaagtgccaggcctgtgggtatcgctccacgaccttcgaggttttttgtgacctgtccctgcccatccccaagaaaggatttgctgggggcaaggtgtctctgcgggattgtttcaaccttttcactaaggaagaagagctagagtcggagaatgccccagtgtgtgaccgatgtcggcagaaaactcgaagtaccaaaaagttgacagtacaaagattccctcgaatcctcgtgctccatctgaatcgattttctgcctcccgaggctccatcaaaaaaagttcagtaggtgtagactttccactgcagcgactgagcctaggggactttgccagtgacaaagccggaagtcctgtataccagctgtatgccctttgcaaccactcaggcagcgtccactatggccactacacagccctgtgccggtgccagactggttggcatgtctacaatgactctcgtgtctcccctgtcagtgaaaaccaggtggcatccagcgagggctacgtgctgttctaccaactgatgcaggagccaccccggtgcctgtgacacctctaagctctggcacctgtgaagccctttaaacacccttaagccccaggctccccgtttacctcagagacgtctatttttgtgtctttttaatcggggaggggggagggggtggttgtagctccattattttttttattaaaaaatacccttccacctggaggctcccttgtctcccagccccatgtacaaagctcaccaagcccctgcccatgtacagcccccagaccctctgcaatatcactttttgtgaataaatttattaagaaaaaatgaaaaa

SEQ ID NO: 3567 - DNA, 1237 bp, Homo Sapiens
  NM_012477
gggacgatgatgattggtagggcagagcaatctgagtcctagttggtggagttctgcccggatggaagctccggccgcggagtgatggtggcctcagcgaagatgggccgggcagggaccatggcggtggcagcagaggtggcaggggcggggcggctggcggtagaggaggctgtggtcctcagggggctgtaggtggaggtatggctcgggccagcagcgggaacggcagcgaggaggcctggggggcacttcgggcgccgcaacagcagcttcgagagctgtgcccaggagtgaacaaccagccctacctctgtgagagtggtcactgctgcggggagactggctgctgcacctactactatgagctctggtggttctggctgctctggactgtcctcatcctctttagctgctgttgcgccttccgccaccgacgagctaaactcaggctgcaacaacagcagcggcagcgtgaaatcaacttgttggcctatcatggggcatgccatggggctggtcctttccctaccggttcactgcttgaccttcgcttcctcagcaccttcaagcccccagcctacgaggatgtggttcaccgcccaggcacaccaccccccccttatactgtggccccaggccgccccttgactgcttccagtgaacaaacctgctgttcctcctcatccagctgccctgcccactttgaaggaacaaatgtggaaggtgtttcctcccaccagagtgccccccctcatcaggagggtgagcccggggcaggggtgacccctgcctccacacccccctcctgccgctatcgccgtttaactggcgactccggtattgagctctgcccttgtcctgcctccggtgagggtgagccagtcaaggaggtgagggttagtgccaccctgccagatctggaggactactccccgtgtgcactacccccagagtctgtaccgcagatctttcccatggggctgtcttccagtgaaggggacatcccataagtagttttgagagggtggatgggttacttgcccaccagaaacagccctagtcccaactccttgcgttcctttggcccctccctgcctacctagaatctgcctgaaagggctggagaggggcagtattgggggactgtgctagctttacccccgcaggacatacacaggagcctttgatctcattaaagagatgtgaaccagctacttgtgaaaaaaaaaaaaaa

SEQ ID NO: 3568 - DNA, 1944 bp, Homo Sapiens
  NM_012478
gggccagcctccgcactcgagctttgattggctgactctaataagaagacgccactaggggcggggcgaagaggggcgcaagctcattgcgttttgagtctcgggacccctgttggagagactatggcgctcaacaagaatcactcggagggcggcggagtgatcgtcaataacaccgagagcatcctaatgtcctatgatcacgtggaactcacattcaatgacatgaagaacgtgccagaagccttcaaagggaccaagaaaggcactgtctaccttaccccttaccgggtcatctttctgtccaagggcaaggatgccatgcagtccttcatgatgccattttatctcatgaaagactgtgagatcaagcagcccgtatttggtgcaaactacatcaagggaacagtgaaggcggaagcgggaggtggctgggaaggctctgcttcctacaagttgactttcacggcagggggcgccattgagttcggacagcggatgctccaggtggcatctcaagcctccagaggtgaagtccccagtggagcctatggctactcttacatgcccagcggggcctatgtctatcccccgccagtcgccaatggaatgtacccctgccctcctggctacccctatccaccgcccccacctgagttctatccaggaccccccatgatggacggggccatgggatacgtgcagcccccaccaccgccctaccctgggcccatggaacctccggtcagcggccccgatgtcccctccactcctgcagccgaagccaaggccgcagaagcagccgccagcgcctattacaacccaggcaatcctcacaacgtctacatgcccacgagccagccgccgccacctccctactacccaccggaagataagaagacccagtaggccctcctgcctccctgcctcccaccctcatctctctaccctacccctcccatcggggctgtgctggggcttggggaggggagggggcgccttgttctccctccaggtctgatcataaacaattaccaggaactagcattgtgggacattagggcccccggcctcgggagaggtgccgcccagcttcccatgccagcccggagcccacagtgctgcccagcgtacctccctcaccgtctggggctcttctgggagcacggagcatcccctgttcctgtttcactctcagcttctcccctcgaagggactctctggccacctcctccaccgcagtccagctccctcagtctggcacccactgctacactcagcctcatgagccacttcagaccagccaggtgtcttcccgggccctgccagaccctgctcacattccctctgctggtctgtgctggtctcagaaggccaccgcgcccgcattccactcagccagggtccagctgcagcccccgccacccttccttcccttccctgtcctgggtcatgttgttgccaccctgtgtgacttttgaagctgtaaaatgagcttccagggcttgggtggcgtcggggcagggccgccgaggctgggaggaagcccttctgccttttgctggtgtttctggaatttgctttccctcacctctcacttccttctagaaggagcttcctgactggaaccagagaatgcatgtctgtccacttggtggctgctgggtggggccgggaacaagggcccctgaccctgtgtgctggccgggacctgccaccagccccccagcctgcttcttccccttaagctttgtgcccctggatgcgctaacattcactcttgtttgtccctggactggccatgaagtgaggagatggttatttaaagagaattccctatttatttgacaaaaaatccagttaatatattaatgtgaaataaaccctgtttgcacctcgatttgtttgctgaaaatgtgaaatagtaaaaatgaaataactgga

SEQ ID NO: 3569 - DNA, 2437 bp, Homo Sapiens
  NM_012481
gcaggagcacgtggagaggccgagtagccacagcggcagctccagcccggcccggcagcgacatggaagatatacaaacaaatgcggaactgaaaagcactcaggagcagtctgtgcccgcagaaagtgcagcggttttgaatgactacagtttaaccaaatctcatgaaatggaaaatgtggacagtggagaaggcccagccaatgaagatgaagacataggagatgattcaatgaaagtgaaagatgaatacagtgaaagagatgagaatgttttaaagtcagaacccatgggaaatgcagaagagcctgaaatcccttacagctattcaagagaatataatgaatatgaaaacattaagttggagagacatgttgtctcattcgatagtagcaggccaaccagtggaaagatgaactgcgatgtgtgtggattatcctgcatcagcttcaatgtcttaatggttcataagcgaagccatactggtgaacgcccattccagtgtaatcagtgtggggcatcttttactcagaaaggtaacctcctccgccacattaaactgcacacaggggaaaaaccttttaagtgtcacctctgcaactatgcatgccaaagaagagatgcgctcacggggcatcttaggacacattctgtggagaaaccctacaaatgtgagttttgtggaaggagttacaagcagagaagttcccttgaggagcacaaggagcgctgccgtacatttcttcagagcactgacccaggggacactgcaagtgcggaggcaagacacatcaaagcagagatgggaagtgaaagagctctcgtactggacagattagcaagcaatgtggcaaaacgaaaaagctcaatgcctcagaaattcattggtgagaagcgccactgctttgatgtcaactataattcaagttacatgtatgagaaagagagtgagctcatacagacccgcatgatggaccaagccatcaataacgccatcagctatcttggcgccgaagccctgcgccccttggtccagacaccgcctgctcccacctcggagatggttccagttatcagcagcatgtatcccatagccctcacccgggctgagatgtcaaacggtgcccctcaagagctggaaaagaaaagcatccaccttccagagaagagcgtgccttctgagagaggcctctctcccaacaatagtggccacgactccacggacactgacagcaaccatgaagaacgccagaatcacatctatcagcaaaatcacatggtcctgtctcgggcccgcaatgggatgccacttctgaaggaggttccccgctcttacgaactcctcaagcccccgcccatctgcccaagagactccgtcaaagtgatcaacaaggaaggggaggtgatggatgtgtatcggtgtgaccactgccgcgtcctcttcctggactatgtgatgttcacgattcacatgggctgccacggcttccgtgaccctttcgagtgtaacatgtgtggatatcgaagccatgatcggtatgagttctcgtctcacatagccagaggagaacacagagccctgctgaagtgaatatctggtctcagggattgctcctatgtattcagcatcgtttctaaaaaccaatgacctcgcctaacagattgctctcaaaacatactcagttccaaacttcttttcataccatttttagctgtgttcacaggggtagccagggaaacactgtcttccttcagaaattattcgcaggtctagcatattattacttttgtgaaacctttgttttcccatcagggacttgaattttatggaatttaaaagccaaaaaggtatttggtcattatcttctacagcagtggaatgagtggtcccggagatgtgctatatgaaacattctttctgagatatatcaaccacacgtggaaaagcctttcagtcatacatgcaaatccacaaagaggaagagctgaccagctgaccttgctgggaagcctcacccttctgcccttcacaggctgaagggttaagatctaatctccctaatctaaatgacagtctaagagtaagtaaaagaacagccataaaataagtatctgttacgagtaactgaagaccccattctccaagcatcagatccatttcctatcacaacatttttaaaaaatgtcatctgatggcacttctgcttctgtcctttaccttcccatctccagtgaaaagctgagctgctttgggctaaaccagttgtctatagaagaaaatctatgccagaagaactcatggttttaaatatagaccatcatcgaaactccagaaatttatccactgtggatgatgacatcgctttcctttggtcaaggttggcagagcaagggtataaagggggaaattgtttggcagcaccaacagaaaacaaa

SEQ ID NO: 3570 - DNA, 3535 bp, Homo Sapiens
  NM_012482
gcagtacacgggaggcttttaattccattgtggagaggacggcgttatttttattaactggaggcgacggcggctgcggcggcggcgggacccgcctcctccggggtatgaaaatcggcagtgggttcctgagtggcggcggaggtaccggcagtagcggtggtagcggctccggcggcggtggtagtggcggcggcggcggcggcggcagcagcggcaggagggcagagatggaacccacctttccccagggtatggttatgttcaaccaccgtcttcccccggtcaccagcttcacccggccggcggggtcggccgcccctcccccgcaatgcgtgttatcctcctctacctccgcagccccggccgctgagcccccccctccgccagccccggacatgactttcaagaaggagccggcggcgtcagccgcggccttcccctcgcagaggacctcctgggggttcttgcagtctttggttagcatcaaacaggagaaacccgcggatcctgaggagcagcagtcccaccaccaccatcaccaccaccactatggggggctgttcgctggagctgaagagaggtctccaggcctaggaggcggtgaaggggggagtcacggcgtcatccaggacctcagtattctccaccagcatgtccagcagcaaccagcccagcaccaccgtgacgtattactcagcagcagtagcaggactgatgaccaccatggcactgaggagccaaagcaggacactaatgtcaaaaaggcaaaaaggccaaagccagaatctcagggaatcaaagccaagaggaagccaagtgcatcttccaaaccttctttggttggagatggagaaggtgccatcctctccccaagtcagaaacctcatatctgtgatcactgtagtgctgctttccgaagctcctatcacctgcggagacatgtcctcattcatacaggagaaagacctttccagtgcagccagtgtagtatgggtttcattcagaaatacctactacagagacatgagaaaattcatagtagagagaagccatttggatgtgatcagtgcagcatgaagtttattcagaagtaccatatggagagacacaagaggacacatagtggagaaaagccatataagtgtgacacttgccaacagtatttttcaaggactgatagattgttgaagcacaggcgcacatgtggtgaagtcatagttaaaggagccactagtgcagaacctgggtcatcaaaccataccaatatgggtaatctggctgtgttgtctcagggaaatacaagttcttcaaggagaaaaacaaagtcaaaaagcatagctattgaaaataaggaacagaagaccggtaaaacaaatgaatcacaaatttcaaataatataaacatgcagagttactcagtagaaatgcctaccgtgtcttccagtggaggcataattggcactggaatagatgaactgcagaagagggtgccaaaattgatctttaagaaaggaagcagaaagaatacagataaaaactaccttaactttgtgtcaccattaccagacatagtaggacagaaatccttgtctggaaaaccaagtggctcacttggcatagtatcaaataatagtgtggagaccattggtcttctccaaagtacaagtggcaaacaaggtcagataagtagtaattatgatgatgccatgcagttttcaaagaaaagaagatatttaccaactgccagcagcaacagtgccttttctataaacgtaggacacatggtctcccaacagtctgtcattcagtctgcaggtgtcagtgttttggacaatgaggcaccattgtcacttattgactcctcagctctaaatgctgaaattaaatcttgtcatgacaagtctggaattcctgatgaggttttacaaagtattttggatcaatactccaacaaatcagaaagccagaaagaggatcctttcaatattgcagaaccacgagtggatttacacacctcaggagaacactcagaattggttcaagaagaaaatttgagcccaggcacccaaacaccttcaaatgataaagcaagtatgttgcaagaatactccaaatacctccaacaggcttttgaaaaatccactaatgcaagttttactcttggacacggtttccaatttgtcagtttgtcttcacctctccacaaccacactttgtttccagaaaaacaaatatacactacgtctcctttggagtgtggtttcggccaatctgttacctcagtgttgccatcttcattgccaaagcctccttttgggatgttgtttggatctcagccaggtctttatttgtctgctttggatgctacacatcagcagttgacaccttcccaggagctggatgatctgatagattctcagaagaacttagagacttcatcagccttccagtcctcatctcagaaattgactagccagaaggaacagaaaaacttagagtcttcaacaggctttcagattccatctcaggagttagctagccagatagatcctcagaaagacatagagcctagaacaacgtatcagattgagaactttgcacaagcgtttggttctcagtttaagtcgggcagcagggtgccaatgacctttatcactaactctaatggagaagtggaccatagagtaaggacttcagtgtcagatttctcagggtatacaaatatgatgtctgatgtaagtgagccatgtagtacaagagtaaagacacccaccagccagagttacaggtaaggtcccaaaagtggccaggctggaggtcttctaatgtaattttgttttattttgagaacactgccattggaatgtttctacacgatcctattaagaataatgtgatgccctttcaatgcaacttttcatatttagtttattttgttagcgtgattttagctctgtttgtattatgatttttaatcaaaatcaatagattaaaaatagtttgacattcaaagtgacaatgtttagcaatcaaatttacatgtatagatcgtcagggaatagcccaaatgttttaaacgcaaaaaaaaagacaaaaaaaaaccaaaaaaaaaaaacctacaaaaaaaactttgttgctaggattaaggttattctaattgctttactctcaggaaagtgtaataacgcatgggaattctgtacgttatcactgtaatggaatatccaatttacagatagtatgatatacatttcatcatttaagtaagggatcgaaaacatttcaaattgctctatctgggctgatagacatttcgtcatttaagtaagggatcgaagacatttcaaattgctatctccatctgggctgatccaaaattctgagattgttggctacctatattttgttgcagcttttaaatgtactctgaacttccaaaccacattcattccagcctggtagaacaaatattcttggatctttgatcaaagcctggaatgatagctttaataaaagaaaaaaaaaaaaaaaa

SEQ ID NO: 3571 - DNA, 995 bp, Homo Sapiens
  NM_012483
gtatctgtggtaaacccagtgacacgggggagatgacatacaaaaagggcaggacctgagaaagattaagctgcaggctccctgcccataaaacagggtgtgaaaggcatctcagcggctgccccaccatggctacctgggccctcctgctccttgcagccatgctcctgggcaacccagcccctgcctccgcatctgcgtggtgaaggccattggccctcatcggtggatctgcgtttcctcgggcctacactgtctaggattgtgcggggctggtgagagaacaagatctcttctgtgttcaaggcagacttcctgccccctgcaccctgctctctcccaggccttgaggtcagtgtgagccccaagggcaagaacacttctggaagggagagtggatttggctgggccatctggatggaaggtctggtcttctctcgtctgagccctgagtactacgacctggcaagagcccacctgcgtgatgaggagaaatcctgcccgtgcctggcccaggagggcccccagggtgacctgttgaccaaaacacaggagctgggccgtgactacaggacctgtctgacgatagtccaaaaactgaagaagatggtggataagcccacccagagaagtgtttccaatgctgcgacccgggtgtgtaggacggggaggtcacgatggcgcgacgtctgcagaaatttcatgaggaggtatcagtctagagttacccagggcctcgtggccggagaaactgcccagcagatctgtgaggacctcaggttgtgtataccttctacaggtcccctctgagccctctcaccttgtcctgtggaagaagcacaggctcctgtcctcagatcccgggaacctcagcaacctctgccggctcctcgcttcctcgatccagaatccactctccagtctccctcccctgactccctctgctgtcctcccctctcacgagaataaagtgtcaagcaagattttaaaaaaaa

SEQ ID NO: 3572 - DNA, 3141 bp, Homo Sapiens
  NM_012484
attctttcttcgtgttcctgtgcgggattggtgtgcccaggggtttggctttccaattggctaacgccggggtgggtggggaatgtggggagatttgaatttgaaaccggtagggagtgataatccgcattcagttgtcgaggagtgccagtcaccttcagtttctggagctggccgtcaacatgtcctttcctaaggcgcccttgaaacgattcaatgacccttctggttgtgcaccatctccaggtgcttatgatgttaaaactttagaagtattgaaaggaccagtatcctttcagaaatcacaaagatttaaacaacaaaaagaatctaaacaaaatcttaatgttgacaaagatactaccttgcctgcttcagctagaaaagttaagtcttcggaatcaaaggaatctcaaaagaatgataaagatttgaagatattagagaaagagattcgtgttcttctacaggaacgtggtgcccaggacaggcggatccaggatctggaaactgagttggaaaagatggaagcaaggctaaatgctgcactaagggaaaaaacatctctctctgcaaataatgctacactggaaaaacaacttattgaattgaccaggactaatgaactactaaaatctaagttttctgaaaatggtaaccagaagaatttgagaattctaagcttggagttgatgaaacttagaaacaaaagagaaacaaagatgaggggtatgatggctaagcaagaaggcatggagatgaagctgcaggtcacccaaaggagtctcgaagagtctcaagggaaaatagcccaactggagggaaaacttgtttcaatagagaaagaaaagattgatgaaaaatctgaaacagaaaaactcttggaatacatcgaagaaattagttgtgcttcagatcaagtggaaaaatacaagctagatattgcccagttagaagaaaatttgaaagagaagaatgatgaaattttaagccttaagcagtctcttgaggagaatattgttatattatctaaacaagtagaagatctaaatgtgaaatgtcagctgcttgaaaaagaaaaagaagaccatgtcaacaggaatagagaacacaacgaaaatctaaatgcagagatgcaaaacttaaaacagaagtttattcttgaacaacaggaacgtgaaaagcttcaacaaaaagaattacaaattgattcacttctgcaacaagagaaagaattatcttcgagtcttcatcagaagctctgttcttttcaagaggaaatggttaaagagaagaatctgtttgaggaagaattaaagcaaacactggatgagcttgataaattacagcaaaaggaggaacaagctgaaaggctggtcaagcaattggaagaggaagcaaaatctagagctgaagaattaaaactcctagaagaaaagctgaaagggaaggaggctgaactggagaaaagtagtgctgctcatacccaggccaccctgcttttgcaggaaaagtatgacagtatggtgcaaagccttgaagatgttactgctcaatttgaaagctataaagcgttaacagccagtgagatagaagatcttaagctggagaactcatcattacaggaaaaagcggccaaggctgggaaaaatgcagaggatgttcagcatcagattttggcaactgagagctcaaatcaagaatatgtaaggatgcttctagatctgcagaccaagtcagcactaaaggaaacagaaattaaagaaatcacagtttcttttcttcaaaaaataactgatttgcagaaccaactcaagcaacaggaggaagactttagaaaacagctggaagatgaagaaggaagaaaagctgaaaaagaaaatacaacagcagaattaactgaagaaattaacaagtggcgtctcctctatgaagaactatataataaaacaaaaccttttcagctacaactagatgcttttgaagtagaaaaacaggcattgttgaatgaacatggtgcagctcaggaacagctaaataaaataagagattcatatgctaaattattgggtcatcagaatttgaaacaaaaaatcaagcatgttgtgaagttgaaagatgaaaatagccaactcaaatcggaagtatcaaaactccgctgtcagcttgctaaaaaaaaacaaagtgagacaaaacttcaagaggaattgaataaagttctaggtatcaaacactttgatccttcaaaggcttttcatcatgaaagtaaagaaaattttgccctgaagaccccattaaaagaaggcaatacaaactgttaccgagctcctatggagtgtcaagaatcatggaagtaaacatctgagaaacctgttgaagattatttcattcgtcttgttgttattgatgttgctgttattatatttgacatgggtattttataatgttgtatttaattttaactgccaatccttaaatatgtgaaaggaacattttttaccaaagtgtcttttgacattttattttttcttgcaaatacctcctccctaatgctcacctttatcacctcattctgaaccctttcgctggctttccagcttagaatgcatctcatcaacttaaaagtcagtatcatattattatcctcctgttctgaaaccttagtttcaagagtctaaaccccagattcttcagcttgatcctggaggtcttttctagtctgagcttctttagctaggctaaaacaccttggcttgttattgcctctactttgattctgataatgctcacttggtcctacctattatccttctacttgtccagttcaaataagaaataaggacaagcctaacttcatagaaacctctctatttttaatcagttgtttaataatttacaggttcttaggctccatcctgtttgtatgaaattataatctgtggattggcctttaagcctgcattcttaacaaactcttcagttaattcttagatacactaaaaatctgagaaactctacatgtaactatttcttcagagtttgtcatatactgcttgtcatctgcatgtctactcagcatttgattaacatttgtgtaatatgaaataaaattacacagtaagtcatttaaccaattaaaaa

SEQ ID NO: 3573 - DNA, 3096 bp, Homo Sapiens
  NM_012485
attctttcttcgtgttcctgtgcgggattggtgtgcccaggggtttggctttccaattggctaacgccggggtgggtggggaatgtggggagatttgaatttgaaaccggtagggagtgataatccgcattcagttgtcgaggagtgccagtcaccttcagtttctggagctggccgtcaacatgtcctttcctaaggcgcccttgaaacgattcaatgacccttctggttgtgcaccatctccaggtgcttatgatgttaaaactttagaagtattgaaaggaccagtatcctttcagaaatcacaaagatttaaacaacaaaaagaatctaaacaaaatcttaatgttgacaaagatactaccttgcctgcttcagctagaaaagttaagtcttcggaatcaaagattcgtgttcttctacaggaacgtggtgcccaggacaggcggatccaggatctggaaactgagttggaaaagatggaagcaaggctaaatgctgcactaagggaaaaaacatctctctctgcaaataatgctacactggaaaaacaacttattgaattgaccaggactaatgaactactaaaatctaagttttctgaaaatggtaaccagaagaatttgagaattctaagcttggagttgatgaaacttagaaacaaaagagaaacaaagatgaggggtatgatggctaagcaagaaggcatggagatgaagctgcaggtcacccaaaggagtctcgaagagtctcaagggaaaatagcccaactggagggaaaacttgtttcaatagagaaagaaaagattgatgaaaaatctgaaacagaaaaactcttggaatacatcgaagaaattagttgtgcttcagatcaagtggaaaaatacaagctagatattgcccagttagaagaaaatttgaaagagaagaatgatgaaattttaagccttaagcagtctcttgaggagaatattgttatattatctaaacaagtagaagatctaaatgtgaaatgtcagctgcttgaaaaagaaaaagaagaccatgtcaacaggaatagagaacacaacgaaaatctaaatgcagagatgcaaaacttaaaacagaagtttattcttgaacaacaggaacgtgaaaagcttcaacaaaaagaattacaaattgattcacttctgcaacaagagaaagaattatcttcgagtcttcatcagaagctctgttcttttcaagaggaaatggttaaagagaagaatctgtttgaggaagaattaaagcaaacactggatgagcttgataaattacagcaaaaggaggaacaagctgaaaggctggtcaagcaattggaagaggaagcaaaatctagagctgaagaattaaaactcctagaagaaaagctgaaagggaaggaggctgaactggagaaaagtagtgctgctcatacccaggccaccctgcttttgcaggaaaagtatgacagtatggtgcaaagccttgaagatgttactgctcaatttgaaagctataaagcgttaacagccagtgagatagaagatcttaagctggagaactcatcattacaggaaaaagcggccaaggctgggaaaaatgcagaggatgttcagcatcagattttggcaactgagagctcaaatcaagaatatgtaaggatgcttctagatctgcagaccaagtcagcactaaaggaaacagaaattaaagaaatcacagtttcttttcttcaaaaaataactgatttgcagaaccaactcaagcaacaggaggaagactttagaaaacagctggaagatgaagaaggaagaaaagctgaaaaagaaaatacaacagcagaattaactgaagaaattaacaagtggcgtctcctctatgaagaactatataataaaacaaaaccttttcagctacaactagatgcttttgaagtagaaaaacaggcattgttgaatgaacatggtgcagctcaggaacagctaaataaaataagagattcatatgctaaattattgggtcatcagaatttgaaacaaaaaatcaagcatgttgtgaagttgaaagatgaaaatagccaactcaaatcggaagtatcaaaactccgctgtcagcttgctaaaaaaaaacaaagtgagacaaaacttcaagaggaattgaataaagttctaggtatcaaacactttgatccttcaaaggcttttcatcatgaaagtaaagaaaattttgccctgaagaccccattaaaagaaggcaatacaaactgttaccgagctcctatggagtgtcaagaatcatggaagtaaacatctgagaaacctgttgaagattatttcattcgtcttgttgttattgatgttgctgttattatatttgacatgggtattttataatgttgtatttaattttaactgccaatccttaaatatgtgaaaggaacattttttaccaaagtgtcttttgacattttattttttcttgcaaatacctcctccctaatgctcacctttatcacctcattctgaaccctttcgctggctttccagcttagaatgcatctcatcaacttaaaagtcagtatcatattattatcctcctgttctgaaaccttagtttcaagagtctaaaccccagattcttcagcttgatcctggaggtcttttctagtctgagcttctttagctaggctaaaacaccttggcttgttattgcctctactttgattctgataatgctcacttggtcctacctattatccttctacttgtccagttcaaataagaaataaggacaagcctaacttcatagaaacctctctatttttaatcagttgtttaataatttacaggttcttaggctccatcctgtttgtatgaaattataatctgtggattggcctttaagcctgcattcttaacaaactcttcagttaattcttagatacactaaaaatctgagaaactctacatgtaactatttcttcagagtttgtcatatactgcttgtcatctgcatgtctactcagcatttgattaacatttgtgtaatatgaaataaaattacacagtaagtcatttaaccaattaaaaa

SEQ ID NO: 3574 - DNA, 2299 bp, Homo Sapiens
  NM_012486
ggggcctgggccggcgccgggtccggccgggcgctcagccagctgcgtaaactccgctggagcgcggcggcagagcaggcatttccagcagtgaggagacagccagaagcaagcttttggagctgaaggaacctgagacagaagctagtcccccctctgaattttactgatgaagaaactgaggccacagagctaaagtgacttttcccaaggtcgcccagcgaggacgtgggacttctcagacgtcaggagagtgatgtgagggagctgtgtgaccatagaaagtgacgtgttaaaaaccagcgctgccctctttgaaagccagggagcatcattcatttagcctgctgagaagaagaaaccaagtgtccgggattcagacctctctgcggccccaagtgttcgtggtgcttccagaggcagggctatgctcacattcatggcctctgacagcgaggaagaagtgtgtgatgagcggacgtccctaatgtcggctgagagccccacgccgcgctcctgccaggagggcaggcagggcccagaggatggagagaacactgcccagtggagaagccaggagaacgaggaggacggtgaggaggaccctgaccgctatgtctgtagtggggttcccgggcggccgccaggcctggaggaagagctgaccctcaaatacggagcgaagcacgtgatcatgctgtttgtgcctgtcactctgtgcatgatcgtggtggtagccaccatcaagtctgtgcgcttctacacagagaagaatggacagctcatctacacgccattcactgaggacacaccctcggtgggccagcgcctcctcaactccgtgctgaacaccctcatcatgatcagcgtcatcgtggttatgaccatcttcttggtggtgctctacaagtaccgctgctacaagttcatccatggctggttgatcatgtcttcactgatgctgctgttcctcttcacctatatctaccttggggaagtgctcaagacctacaatgtggccatggactaccccaccctcttgctgactgtctggaacttcggggcagtgggcatggtgtgcatccactggaagggccctctggtgctgcagcaggcctacctcatcatgatcagtgcgctcatggccctagtgttcatcaagtacctcccagagtggtccgcgtgggtcatcctgggcgccatctctgtgtatgatctcgtggctgtgctgtgtcccaaagggcctctgagaatgctggtagaaactgcccaggagagaaatgagcccatattccctgccctgatatactcatctgccatggtgtggacggttggcatggcgaagctggacccctcctctcagggtgccctccagctcccctacgacccggagatggaagactcctatgacagttttggggagccttcataccccgaagtctttgagcctcccttgactggctacccaggggaggagctggaggaagaggaggaaaggggcgtgaagcttggcctcggggacttcatcttctacagtgtgctggtgggcaaggcggctgccacgggcagcggggactggaataccacgctggcctgcttcgtggccatcctcattggcttgtgtctgaccctcctgctgcttgctgtgttcaagaaggcgctgcccgccctccccatctccatcacgttcgggctcatcttttacttctccacggacaacctggtgcggccgttcatggacaccctggcctcccatcagctctacatctgagggacatggtgtgccacaggctgcaagctgcagggaattttcattggatgcagttgtatagttttacactctagtgccatatatttttaagacttttctttccttaaaaaataaagtacgtgtttacttggtgaggaggaggcagaaccagctctttggtgccagctgtttcatcaccagactttggctcccgctttggggagcgcctcgcttcacggacaggaagcacagcaggtttatccagatgaactgagaaggtcagattagggcggggagaagagcatccggcatgagggctgagatgcgcaaagagtgtgctcgggagtggcccctggcacctgggtgctctggctggagaggaaaagccagttccctacgaggagtgttcccaatgctttgtccatgatgtccttgttattttattgcctttagaaactgagtcctgttcttgttacggcagtcacactgctgggaagtggcttaatagtaatatcaataaatagatgagtcctgttagaatcttgaaaa

SEQ ID NO: 3575 - DNA, 7171 bp, Homo Sapiens
  NM_013229
aagaagaggtagcgagtggacgtgactgctctatcccgggcaaaagggatagaaccagaggtggggagtctgggcagtcggcgacccgcgaagacttgaggtgccgcagcggcatccggagtagcgccgggctccctccggggtgcagccgccgtcgggggaagggcgccacaggccgggaagacctcctccctttgtgtccagtagtggggtccaccggagggcggcccgtgggccgggcctcaccgcggcgctccgggactgtggggtcaggctgcgttgggtggacgcccacctcgccaaccttcggaggtccctgggggtcttcgtgcgccccggggctgcagagatccaggggaggcgcctgtgaggcccggacctgccccggggcgaagggtatgtggcgagacagagccctgcacccctaattcccggtggaaaactcctgttgccgtttccctccaccggcctggagtctcccagtcttgtcccggcagtgccgccctccccactaagacctaggcgcaaaggcttggctcatggttgacagctcagagagagaaagatctgagggaagatggatgcaaaagctcgaaattgtttgcttcaacatagagaagctctggaaaaggacatcaagacatcctacatcatggatcacatgattagtgatggatttttaacaatatcagaagaggaaaaagtaagaaatgagcccactcaacagcaaagagcagctatgctgattaaaatgatacttaaaaaagataatgattcctacgtatcattctacaatgctctactacatgaaggatataaagatcttgctgcccttctccatgatggcattcctgttgtctcttcttccagtgtaaggacagtcctgtgtgaaggtggagtaccacagaggccagttgtttttgtcacaaggaagaagctggtgaatgcaattcagcagaagctctccaaattgaaaggtgaaccaggatgggtcaccatacatggaatggcaggctgtgggaagtctgtattagctgcagaagctgttagagatcattcccttttagaaggttgtttcccagggggagtgcattgggtttcagttgggaaacaagacaaatctgggcttctgatgaaactgcagaatctttgcacacggttggatcaggatgagagtttttcccagaggcttccacttaatattgaagaggctaaagaccgtctccgcattctgatgcttcgcaaacacccaaggtctctcttgatcttggatgatgtttgggactcttgggtgttgaaagcttttgacagtcagtgtcagattcttcttacaaccagagacaagagtgttacagattcagtaatgggtcctaaatatgtagtccctgtggagagttccttaggaaaggaaaaaggacttgaaattttatccctttttgttaatatgaagaaggcagatttgccagaacaagctcatagtattataaaagaatgtaaaggctctccccttgtagtatctttaattggtgcacttttacgtgattttcccaatcgctgggagtactacctcaaacagcttcagaataagcagtttaagagaataaggaaatcttcgtcttatgattatgaggctctagatgaagccatgtctataagtgttgaaatgctcagagaagacatcaaagattattacacagatctttccatccttcagaaggacgttaaggtgcctacaaaggtgttatgtattctctgggacatggaaactgaagaagttgaagacatactgcaggagtttgtaaataagtctcttttattctgtgatcggaatggaaagtcgtttcgttattatttacatgatcttcaagtagattttcttacagagaagaattgcagccagcttcaggatctacataagaagataatcactcagtttcagagatatcaccagccgcatactctttcaccagatcaggaagactgtatgtattggtacaactttctggcctatcacatggccagtgccaagatgcacaaggaactttgtgctttaatgttttccctggattggattaaagcaaaaacagaacttgtaggccctgctcatctgattcatgaatttgtggaatacagacatatactagatgaaaaggattgtgcagtcagtgagaattttcaggagtttttatctttaaatggacaccttcttggacgacagccatttcctaatattgtacaactgggtctctgtgagccggaaacttcagaagtttatcagcaagctaagctgcaggccaagcaggaggtcgataatggaatgctttacctggaatggataaacaaaaaaaacatcacgaatctttcccgcttagttgtccgcccccacacagatgctgtttaccatgcctgcttttctgaggatggtcagagaatagcttcttgtggagctgataaaaccttacaggtgttcaaagctgaaacaggagagaaacttctagaaatcaaggctcatgaggatgaagtgctttgttgtgcattctctacagatgacagatttatagcaacctgctcagtggataaaaaagtgaagatttggaattctatgactggggaactagtacacacctatgatgagcactcagagcaagtcaattgctgccatttcaccaacagtagtcatcatcttctcttagccactgggtcaagtgactgcttcctcaaactttgggatttgaatcaaaaagaatgtcgaaataccatgtttggtcatacaaattcagtcaatcactgcagattttcaccagatgataagcttttggctagttgttcagctgatggaaccttaaagctttgggatgcgacatcagcaaatgagaggaaaagcattaatgtgaaacagttcttcctaaatttggaggaccctcaagaggatatggaagtgatagtgaagtgttgttcgtggtctgctgatggtgcaaggataatggtggcagcaaaaaataaaatctttctttttgacattcatactagtggcctattgggagaaatccacacgggccatcacagcaccatccagtactgtgacttctccccacaaaaccatttggcagtggttgctttgtcccagtactgtgtagagttgtggaatacagactcacgttcaaaggtggctgattgcagaggacatttaagttgggttcatggtgtgatgttttctcctgatggatcatcatttttgacatcttctgatgaccagacaatcaggctctgggagacaaagaaagtatgtaagaactctgctgtaatgttaaagcaagaagtagatgttgtgtttcaagaaaatgaagtgatggtccttgcagttgaccatataagacgtctgcaactcattaatggaagaacaggtcagattgattatctgactgaagctcaagttagctgctgttgcttaagtccacatcttcagtacattgcatttggagatgaaaatggagccattgagattttagaacttgtaaacaatagaatcttccagtccaggtttcagcacaagaaaactgtatggcacatccagttcacagccgatgagaagactcttatttcaagttctgatgatgctgaaattcaggtatggaattggcaattggacaaatgtatctttctacgaggccatcaggaaacagtgaaagactttagactcttgaaaaattcaagactgctttcttggtcatttgatggaacagtgaaggtatggaatattattactggaaataaagaaaaagactttgtctgtcaccagggtacagtactttcttgtgacatttctcacgatgctaccaagttttcatctacctctgctgacaagactgcaaagatctggagttttgatctccttttgccacttcatgaattgaggggccacaacggctgtgtgcgctgctctgccttctctgtggacagtaccctgctggcaacgggagatgacaatggagaaatcaggatatggaatgtctcaaacggtgagcttcttcatttgtgtgctccgctttcagaagaaggagctgctacccatggaggctgggtgactgacctttgcttttctccagatggcaaaatgcttatctctgctggaggatatattaagtggtggaacgttgtcactggggaatcctcacagaccttctacacaaatggaaccaatcttaagaaaatacacgtgtcccctgacttcaaaacatatgtgactgtggataatcttggtattttatatattttacagactttagaataaaatagttaagcattaatgtagttgaactttttaaatttttgaattggaaaaaaattctaatgaaaccctgatatcaactttttataaagctcttaattgttgtgcagtattgcattcattacaaaagtgtttgtggttggatgaataatattaatgtagctttttcccaaatgaacatacctttaatcttgtttttcatgatcatcattaacagtttgtccttaggatgcaaatgaaaatgtgaatacataccttgttgtactgttggtaaaattctgtcttgatgcattcaaaatggttgacataattaatgagaagaatttggaagaaattggtattttaatactgtctgtatttattactgttatgcaggctgtgcctcagggtagcagtggcctgctttttgaaccacacttaccccaagggggttttgttctcctaaatacaatcttagaggttttttgcactctttaaatttgctttaaaaatattgtgtctgtgtgcatagtctgcagcatttcctttaattgactcaataagtgagtcttggatttagcaggcccccccaccttttttttttgtttttggagacagagtcttgctttgttgccaggctggagtgcagtggcgcgatctcggctcaccacaatcgctgcctcctgggttcaagcaattctcctgcctcagcctcccgagtagctgggactacaggtgtgcgcacatgccaggctaatttttgtatttttagtagagacggggtttcaccatgttggccgggatggtctcgatctcttgacctcatgatctacccgccttggcctcccaaagtgctgagattacaggcgtgagccaccgtgcctggccaggccccttctcttttaatggagacagggtcttgcactatcacccaggctggagtgcagtggcataatcatacctcattgcagcctcagactcctgggttcaagcaatcctcctgcctcagcctcccaagtagctgagactacaggcacgagccaccacacccagctaatttttaagttttcttgtagagacagggtctcactatgttgtctaggctggtcttgaactcttggcctcaagtaatcctcctgcctcagcctcccaaagtgttgggattgcagatatgagccactggcctggccttcagcagttctttttgtgaagtaaaacttgtatgttggaaagagtagattttattggtctacccttttctcactgtagctgctggcagccctgtgccatatctggactctagttgtcagtatctgagttggacactattcctgctccctcttgtttcttacatatcagacttcttacttgaatgaaacctgatctttcctaatcctcacttttttcttttttaaaaagcagtttctccactgctaaatgttagtcattgaggtggggccaattttaatcataagccttaataagatttttctaagaaatgtgaaatagaacaattttcatctaattccatttacttttagatgaatggcattgtgaatgccattcttttaatgaatttcaagagaattctctggttttctgtgtaattccagatgagtcactgtaactctagaagattaaccttccagccaacctattttcctttcccttgtctctctcatcctcttttccttccttctttcctttctcttcttttatctccaaggttaatcaggaaaaatagcttttgacaggggaaaaaactcaataactagctatttttgacctcctgatcaggaactttagttgaagcgtaaatctaaagaaacattttctctgaaatatattattaagggcaatggagataaattaatagtagatgtggttcccagaaaatataatcaaaattcaaagattttttttgtttctgtaactggaactaaatcaaatgattactagtgttaatagtagataacttgtttttattgttggtgcatattagtataactgtggggtaggtcggggagagggtaagggaatagatcactcagatgtattttagataagctatttagcctttgatggaatcataaatacagtgaatacaatcctttgcattgttaaggaggttttttgtttttaaatggtgggtcaaggagctagtttacaggcttactgtgatttaagcaaatgtgaaaagtgaaaccttaattttatcaaaagaaatttctgtaaatggtatgtctccttagaatacccaaatcataattttatttgtacacactgttaggggctcatctcatgtaggcagagtataaagtattaccttttggaattaaaagccactgactgttataaagtataacaacacacatcaggttttaaaaagccttgaatggcccttgtcttaaaaagaaattaggagccaggtgcggtggcacgtgcctgtaatcccagctccttgggaggctaagacaggaggattccttgagccctggagtttgagtccagcctgggtgacatagcaagaccctgtcttaaaagaaaaatgggaagaaagacaaggtaacatgaagaaagaagagatacctagtatgatggagctgcaaatttcatggcagttcatgcagtcggtcaagaggaggattttgttttgtagtttgcagatgagcatttctaaagcattttcccttgctgtatttttttgtattataaattacattggacttcatatatataatttttttttacattatatgtctcttgtatgttttgaaactcttgtatttatgatatagcttatatgatttttttgccttggtatacattttaaaatatgaatttaaaaaatttttgtaaaaataaaattcacaaaattgttttgaaaaacaaaaaaaaaaaaaa

SEQ ID NO: 3576 - DNA, 2194 bp, Homo Sapiens
  NM_013230
gggtctcgccggctcgccgcgctccccaccttgcctgcgcccgcccggagccagcggttctccaagcacccagcatcctgctagacgcgccgcgcaccgacggaggggacatgggcagagcaatggtggccaggctcgggctggggctgctgctgctggcactgctcctacccacgcagatttattccagtgaaacaacaactggaacttcaagtaactcctcccagagtacttccaactctgggttggccccaaatccaactaatgccaccaccaaggcggctggtggtgccctgcagtcaacagccagtctcttcgtggtctcactctctcttctgcatctctactcttaagagactcaggccaagaaacgtcttctaaatttccccatcttctaaacccaatccaaatggcgtctggaagtccaatgtggcaaggaaaaacaggtcttcatcgaatctactaattccacaccttttattgacacagaaaatgttgagaatcccaaatttgattgatttgaagaacatgtgagaggtttgactagatgatggatgccaatattaaatctgctggagtttcatgtacaagatgaaggagaggcaacatccaaaatagttaagacatgatttccttgaatgtggcttgagaaatatggacacttaatactaccttgaaaataagaatagaaataaaggatgggattgtggaatggagattcagttttcatttggttcattaattctataaggccataaaacaggtaatataaaaagcttccatgattctatttatatgtacatgagaaggaacttccaggtgttactgtaattcctcaacgtattgtttcgacagcactaatttaatgccgatatactctagatgaagttttacattgttgagctattgctgttctcttgggaactgaactcactttcctcctgaggctttggatttgacattgcatttgaccttttatgtagtaattgacatgtgccagggcaatgatgaatgagaatctacccccagatccaagcatcctgagcaactcttgattatccatattgagtcaaatggtaggcatttcctatcacctgtttccattcaacaagagcactacattcatttagctaaacggattccaaagagtagaattgcattgaccacgactaatttcaaaatgctttttattattattattttttagacagtctcactttgtcgcccaggccggagtgcagtggtgcgatctcagatcagtgtaccatttgcctcccgggctcaagcgattctcctgcctcagcctcccaagtagctgggattacaggcacctgccaccatgcccggctaatttttgtaattttagtagagacagggtttcaccatgttgcccaggctggtttcgaactcctgacctcaggtgatccacccgcctcggcctcccaaagtgctgggattacaggcttgagcccccgcgcccagccatcaaaatgctttttatttctgcatatgttgaatactttttacaatttaaaaaaatgatctgttttgaaggcaaaattgcaaatcttgaaattaagaaggcaaaaatgtaaaggagtcaaaactataaatcaagtatttgggaagtgaagactggaagctaatttgcattaaattcacaaacttttatactctttctgtatatacattttttttctttaaaaaacaactatggatcagaatagccacatttagaacactttttgttatcagtcaatatttttagatagttagaacctggtcctaagcctaaaagtgggcttgattctgcagtaaatcttttacaactgcctcgacacacataaacctttttaaaaatagacactccccgaagtcttttgttcgcatggtcacacactgatgcttagatgttccagtaatctaatatggccacagtagtcttgatgaccaaagtcctttttttccatctttagaaaactacatgggaacaaacagatcgaacagttttgaagctactgtgtgtgtgaatgaacactcttgctttattccagaatgctgtacatctattttggattgtatattgtgtttgtgtatttacgctttgattcatagtaacttcttatggaattgatttgcattgaacacaaactgtaaataaaaagaaatggctgaaagagcaaaaaaaaaaaaa

SEQ ID NO: 3577 - DNA, 3288 bp, Homo Sapiens
  NM_013233
gctccctcccctcctagctggcttcggcggggacggcggcggcggcggcgggcggggagggcgtgcgccggccgagaggtgtcggcggcgaggcaaaggaagtttcaagtggaaggtcgtccgtcggccggcgcgtcctcctgctctcctccgcagcatcatggcggagccgagcggctcgcccgtgcacgtccagcttccccagcaggcggccccggtgacagcggcggcggcggcggccccggcggccgcgacagcagcgccggccccggcagctcccgcggccccggccccggccccggccccggcggcacaggctgtcggctggcccatctgcagggacgcgtacgagctgcaggaggttatcggcagtggagctactgctgtggttcaggcagccctatgcaaacccaggcaagaacgtgtagcaataaaacggatcaacttggaaaaatgccagaccagtatggatgaactattaaaagaaattcaagccatgagtcagtgcagccatcccaacgtagtgacctattacacctcttttgtggtcaaagatgaactttggctggtcatgaaattactaagtggaggttcaatgttggatatcataaaatacattgtcaaccgaggagaacacaagaatggagttctggaagaggcaataatagcaacaattcttaaagaggttttggaaggcttagactatctacacagaaacggtcagattcacagggatttgaaagctggtaatattcttctgggtgaggatggttcagtacaaatagcagattttggggtaagtgcgttcctagcaacagggggtgatgttacccgaaataaagtaagaaaaacattcgttggcaccccatgttggatggctcctgaagtcatggaacaggtgagaggctatgacttcaaggctgacatgtggagttttggaataactgccattgaattagcaacaggagcagcgccttatcacaaatatcctcccatgaaagtgttaatgttgactttgcaaaatgatccacccactttggaaacaggggtagaggataaagaaatgatgaaaaagtacggcaagtcctttagaaaattactttcactgtgtcttcagaaagatccttccaaaaggcccacagcagcagaacttttaaaatgcaaattcttccagaaagccaagaacagagagtacctgattgagaagctgcttacaagaacaccagacatagcccaaagagccaaaaaggtaagaagagttcctgggtcaagtggtcaccttcataaaaccgaagacggggactgggagtggagtgacgacgagatggatgagaagagcgaagaagggaaagcagctttttctcaggaaaagtcacgaagagtaaaagaagaaaatccagagattgcagtgagtgccagcaccatccccgaacaaatacagtccctctctgtgcacgactctcagggcccacccaatgctaatgaagactacagagaagcttcttcttgtgccgtgaacctcgttttgagattaagaaactccagaaaggaacttaatgacatacgatttgagtttactccaggaagagatacagcagatggtgtatctcaggagctcttctctgctggcttggtggatggtcacgatgtagttatagtggctgctaatttacagaagattgtagatgatcccaaagctttaaaaacattgacatttaagttggcttctggctgtgatgggtcggagattcctgatgaagtgaagctgattgggtttgctcagttgagtgtcagctgatgtatgtcccttgatgtcaccctgatctgtcatgccccaccgccacccctactcccttcaaccctccctctttctgcccatttcctcccaccccctcactcccatttcctagcaaaatcagaagattgtgaagaggccggcttcaacaaaatgggataaaaaaataattttttaaaacttacaacactccgagttctgctttattctctagcaatccacagtacaagaacaagcaaatgccacagctgcacgactgttgctcatttttccaaaagctatttaatattcttagcaatcaatttggatatcccttaagtgaaaagaatctgaaatacactcaggtggtcttatttattggcaacaaaaggaattttctatccagaagcctatttctcctttcattgttgttatttctgttataatactttaattgtacatctgacaatactgcctcttttatgttgtatttagaaattaatatacttataaaattaagatttattagccaaacttgaattctagttttaaaactgactgtgaattttatttttcatatatttatgcattacacaccttagctataagaaaaaaagggttttgattatatgcttcttgcagttaatctcgttatttaaacaaaaagttttgggtctgtctttggagtatttgtaacttctaaattttgaaatgactgaattaggaatttggatgcttattcttttagtctgtttgcctaaaaaccaatttacaatctgactgtctcttgggagagggaggtgccttgcaaactttcacattaagaatgtgcctgaggctgctttactctggaatagtctcagatctaaaatttcctctatataaggtggcatatgttaagttttgcttcattggaccgtttagaatgctatgtaaaatgttgccattctgttagattgctaactatatacccatctctgatttggctctccttaagtgataggatttgttattctaaaggtgataaacttgaaaatatcagaatctgagttttacttgaaattttgcagaatacccaggtggagtgaaaattggaagggttttgtgcaatgactaaaaggtaaaacgctgttaaggttcaagaatcaatactttcaacccaagtagccctctgcttgactgtatattatggaactagtaaaccttaggattttgaaaattggagtctaatctttcaaggaggtgggctcccaggatggtaccattgctctttcctagctaaccctagatatggcagctctttaatgtacttcaaaaagcaaatatatattactaaggaaaaaaagttatttataattgccttgtcataattgttaaggtgttctagagccatttgcatacaatttaatgtaatttcattccattctattgtttacacaacgattactcgaagatgactgcaaaggtaaaaggaaaataaaagtgtattgcacaatgagaaaaaaaaaaaaaaa

SEQ ID NO: 3578 - DNA, 910 bp, Homo Sapiens
  NM_013234
agtcacgtggcagccggaaagcgtggcggctgctgctagagcctttccctttaccgcacccaaggagctggagcgacaacaacgacgtcgtttccgtttccaccacctcttcctgttcccgtccttgaggacgccgtgccgggtcagtgttagcctccagccctggttgtggaaggcgacagaagtcatggcgatgtttgagcagatgagagccaacgtgggcaagttgctcaagggtatcgacaggtacaatcctgagaacctggccaccctggagcgctatgtagagacgcaggccaaggaaaatgcctatgatctggaagccaacctggctgtcctgaagctgtaccagttcaacccagccttctttcagaccacggtcaccgcccagatcctgctgaaggccctcaccaacttgccgcacacagacttcaccctgtgcaagtgcatgatcgaccaggcacatcaagaagaacggccaatccgacagattttgtacctcggggacctgctggagacctgccatttccaggccttctggcaagccctggatgaaaacatggacctcttggaaggtataactggctttgaagactctgtccgaaagtttatctgccatgttgtgggtatcacttaccagcacattgaccgctggctgctggccgagatgctcggggatctgtcggacagccagctaaaggtgtggatgagcaaatacggctggagtgccgacgagtcggggcagatcttcatctgtagccaagaagagagcattaaacccaagaacattgtggagaagattgactttgacagtgtgtccagcatcatggcctcctcccagtaacttcaggtgtttaataaagatgtgttgactcagccaaaaaaaaaaaaaaaaaaaaaaaaaaaaaaa

SEQ ID NO: 3579 - DNA, 5424 bp, Homo Sapiens
  NM_013235
accgcgcacaaggccctgcggtgggctgaagagttttccctcccttggcccagctttctcaggtttgctttttaattccctcggtttcctgttccggaggcgcgggcggtgccactgtcttggtacctgcggtagtagcctggctttgctctgacggcgatctcgcggcccgagagccttttataggttgcttttcccggggatgtgaaggatacagaaatgactgtgaatcaacccatatcatcaaggagctgataatctagtggaagagttagacgtgtgcatacttcactatgatatgaggcagtctctgagcttatattctctgtggaagatgtgacatatccaggcggaacatcatgatgcagggaaacacatgtcacagaatgtcgttccacccgggacgagggtgtccccgaggacgaggaggacatggagccagaccctcagcaccatcctttaggccccaaaatctgaggctgcttcaccctcagcagcctcctgtgcaatatcaatatgaacctccaagtgccccttccaccactttctcaaactctccagcccccaattttctccctccacgaccagactttgtacccttccccccacccatgcctccgtcagcgcaaggccctcttcccccctgcccaatcaggccgcctttccccaaccaccagatgaggcaccccttcccagttcctccttgttttcctcccatgccaccaccaatgccttgtcctaataaccccccagtccctggggcacctcctggacaaggcactttccccttcatgatgccccctccctccatgcctcatcccccgccccctccagtcatgccgcagcaggttaattatcagtaccctccgggctattctcaccacaacttcccacctcccagttttaatagtttccagaacaaccctagttctttcctgcccagtgctaataacagcagtagtcctcatttcagacatctccctccatacccactcccaaaggctcccagtgagagaaggtccccagaaaggctgaaacactatgatgaccacaggcaccgagatcacagtcatgggcgaggtgagaggcatcggtccctggatcggcgggagcgaggccgcagtcccgacaggagaagacaagacagccggtacagatctgattatgaccgagggagaacaccatctcgccaccgcagctacgaacggagcagagagcgagaacgggagagacacaggcatcgagacaaccgaagatcaccatctctggaaaggtcctacaaaaaagagtataagagatctggaaggagttacggtttatcggttgttcctgaacctgctggatgcacaccagaattacctggggagattattaaaaatacagattcttgggccccacccctggagattgtgaatcatcgctccccaagtagggagaagaagagagctcgttgggaggaagaaaaagaccgttggagtgacaaccagagttctggcaaagacaagaactatacctcaatcaaggaaaaagagcccgaggagaccatgcctgacaagaatgaggaggaagaagaagaacttcttaagcctgtgtggattcgatgcactcattcagaaaactactactccagtgaccccatggatcaggtgggagattctacagtggttggaacgagtaggcttcgtgacttatatgacaaatttgaggaggagttggggagcaggcaagaaaaggccaaagctgctcggcctccgtgggaacctccaaagacgaagctcgatgaagatttagagagttccagtgaatccgagtgtgagtctgatgaggacagcacctgttctagcagctcagactctgaagtttttgacgttattgcagaaatcaaacgcaaaaaggcccaccctgaccgacttcatgatgaactttggtacaacgatccaggccagatgaatgatggaccactctgcaaatgcagcgcaaaggcaagacgcacaggaattaggcacagcatttatcctggagaagaggccatcaagccctgtcgtcctatgaccaacaatgctggcagacttttccactaccggatcacagtctccccgcctacgaactttttaactgacaggccaactgttatagaatacgatgatcacgagtatatctttgaaggattttctatgtttgcacatgcccccctgaccaatattccactgtgtaaagtaattagattcaacatagactacacgattcatttcattgaagagatgatgccggagaatttttgtgtgaaagggcttgaactcttttcactgttcctattcagagatattttggaattatatgactggaatcttaaaggtcctttgtttgaagacagccctccctgctgcccaagatttcatttcatgccacgttttgtaagatttcttccagatggaggaaaggaagtgctgtccatgcaccagattctcctgtacttgttaaggtgcagcaaagccctggtgcctgaggaggagattgccaatatgcttcagtgggaggagctggagtggcagaaatatgcagaagaatgcaaaggcatgattgttaccaaccctgggacgaaaccaagctctgtccgtatcgatcaactggatcgtgaacagttcaaccccgatgtgattacttttccgattatcgtccactttgggatacgccctgcacagttgagttatgcaggagacccacagtaccaaaaactgtggaagagttatgtgaaacttcgccacctcctagcaaatagtcccaaagtcaaacaaactgacaaacagaagctggcacagagggaggaagccctccaaaaaatacggcagaagaatacaatgagacgagaagtaacggtggagctaagtagccaaggattctggaaaactggcatccgttctgatgtctgtcagcatgcaatgatgctacctgttctgacccatcatatccgctaccaccaatgcctaatgcatttggacaagttgataggatatactttccaagatcgttgtctgttgcagctggccatgactcatccaagtcatcatttaaattttggaatgaatcctgatcatgccaggaattcattatctaactgtggaattcggcagcccaaatacggagacagaaaagttcatcacatgcacatgcggaagaaagggattaacaccttgataaatatcatgtcacgccttggccaagatgacccaactccctcgaggattaaccacaatgaacggttggaattcctgggtgatgctgttgttgaatttctgaccagcgtccatttgtactatttgtttcctagtctggaagaaggaggattagcaacctatcggactgccattgttcagaatcagcaccttgccatgctagcaaagaaacttgaactggatcgatttatgctgtatgctcacgggcctgacctttgtagagaatcggaccttcgacatgcaatggccaattgttttgaagcgttaataggagctgtttacttggagggaagcctggaggaagccaagcagttatttggacgcttgctctttaatgatccggacctgcgcgaagtctggctcaattatcctctccacccactccaactacaagagccaaatactgatcgacaacttattgaaacttctccagttctacaaaaacttactgagtttgaagaagcaattggagtaatttttactcatgttcgacttctggcaagggcattcacattgagaactgtgggatttaaccatctgaccctaggccacaatcagagaatggaattcctaggtgactccataatgcaactggtagccacagagtacttattcattcatttcccagatcatcatgaaggacacttaactttgttgcgaagctctttggtgaataatagaactcaggccaaggtagcggaggagctgggcatgcaggagtacgccataaccaacgacaagaccaagaggcctgtggcgcttcgcaccaagaccttggcggaccttttggaatcatttattgcagcgctgtacattgataaggatttggaatatgttcatactttcatgaatgtctgcttctttccacgattgaaagagttcattttgaatcaggattggaatgaccccaaatcccagcttcagcagtgttgcttgacacttaggacagaaggaaaagagccagacattcctctgtacaagactctgcagacagtgggcccatcccatgcccgaacctacactgtggctgtttatttcaagggagaaagaataggctgtgggaaaggaccaagtattcagcaagcggaaatgggagcagcaatggatgcgcttgaaaaatataattttccccagatggcccatcagaagcggttcatcgaacggaagtacagacaagagttaaaagaaatgaggtgggaaagagagcatcaagagagagagccagatgagactgaagacatcaagaaataaaggagggcatgcaagtgtggagtatttacttgctcagtaactgtgactgttgtctattgagacctagcctagttttcctgcagacaatgaatgaagtgtgctcattgaaataaaatacagagtcaaatcgctattgttgttttaatgatctgtttttagctggatggtctttattacaaagtattagatttttcttctatttaacggaaaacttgactttggtgaatgtgcattacttccttttattttgctctttaaataataaaattcaagaagcatattctatgtggaatagatcctgtttttccatctgtgtcccagattgtgaccctagactttcaattgacaagtaaaaaattgactttactagacattttgactgtgctctagtaacatctatcctttttcaaatctctggatttttaagtagattgttcagctttcatccggtggctgttcatcaagttatcagctgcaaatattgaacttacctctctctaagcagtgagtgttttgtagaaggaatccgtttaacaattaattggctaatgggagaaggggaaagactgatattcaagtcatacagattctttgaatcattagaataggagagaaatcatgattctaagccaggccacactttaaaccaagtgctctcaccctggggttagtggaacctttaagaagttaatgaacagacttcaaggaagtcaaaaacctcccaatactatattcaattttctgtgtgtgtttgagatttgagagggcatggggagcaggaaggaggagggtttatagcttttatcagcctctctaagtgggccctgcagtaaaaggctaacatgacattcaaagacataacattttaaaaaaagttattccaaactaaacatcactggtttcttattaataaaggcaaaacttctttgtaaaacaaaaa

SEQ ID NO: 3580 - DNA, 3340 bp, Homo Sapiens
  NM_013236
aggcgggacttccgccggcgccccctcccccgcggcgccgtctcctcctcccgcctgaggcgagtctgggctcagcctagagctctccggcggcggcgcagcttcagggcagcgcgggctgcagcggcggcggcggttagggctgtgtagggcgaggcctcccccttcctcctcgccatcctactcctccctcctcgtcatcctcccccttcgtcctcctcgccttcctcctcctcgtcaggctcgacccagctgtgagcggcaagatggcggcgcccaggccgccgcctgccaggctgtcgggcgtcatggtgccggcgcccatccaagacctggaggccctgcgcgcgctcacggcgctcttcaaagagcagcggaaccgagaaacagcacccaggactatcttccaaagagttctggatatcctaaagaaatcttctcatgctgttgagcttgcctgcagagatccatcccaagtggaaaacctggcttccagtctgcagttaataacagaatgcttcaggtgtcttcgcaatgcttgcatagagtgttctgtgaaccagaattcaatcaggaacttggatacgattggtgttgctgttgatttgattcttctgtttcgtgaactgcgagtggaacaggaatctctgttgacagcttttcgctgtggcctgcagtttttaggcaacattgcctcacggaatgaagattcccagtctattgtttgggtgcatgctttcccagaactgtttttgtcttgcttaaatcatccggacaaaaaaattgttgcctactcttcaatgattttgtttacatcccttaatcatgaaagaatgaaagaactggaggagaacctcaatattgcaattgatgtcatagatgcttaccaaaaacatcctgaatcagaatggccgttcttgattattacagacctctttctgaaaagcccggaattggtacaagccatgtttcccaaactgaacaatcaagaaagagttacactgttagaccttatgatagccaagataacgagtgatgagccactcaccaaggatgacatccctgtgtttttgcggcatgctgagttgattgcaagcacctttgtggatcagtgcaagactgtgctcaagctggcctctgaggagcctcctgatgatgaggaggcactggctacaattaggcttctcgacgtcctgtgcgaaatgactgtgaatactgagctgctcggctatctgcaggttttccctggcttgctggaaagagtgattgatcttttgcgggtgattcatgtagctggaaaagaaaccacaaacatcttcagtaattgtggttgcgtgagagcagaaggtgacatctccaatgtggccaatgggtttaagtctcatctcattcgtctgattggaaatctgtgttacaagaataaagataaccaagacaaggtaaatgagctggatggtatcccgttgatcctggacaactgcaacatcagtgacagtaacccctttctgacccagtgggtgatatatgccatccgaaaccttaccgaagacaacagccaaaaccaagatttgattgcaaagatggaggaacaggggctggcagatgcatccctacttaaaaaagtgggttttgaagttgaaaagaaaggcgaaaagctgatcctgaaatctactagagacacccctaagccatgaatgaactacatccaaatacctgaatttttggaatctgtttcatggatttttcatcttctaccgtatgtgaaattgcaagtgtttgaagatttataagtacaaatttgggaacatacaaatcttttaggtagtagagtttaacgtgtataagctaaaagtgaaagtaactgagtgttctcttgtttctttgcattaatgtaactgtgtggtttgcctttgtccccctggatagaacgtgcatttaaagaatatattgtacttactgtgacagcagataataaaccagtctcttggagggcacaacccttatttgacaaaacttggatgttggcttgactgtgtttgtcccttcagatggcaagtcagcatcattctttatattcctcttctcattgggttttctgaactctggcaggcggttgaagtagtttctcactgtgattaattctagcaatctcttttcacccctctgcctttccaaaacattgacaagactcatttccagttaattaattcgagaaccctccctcttcattttgggtactgggctgtcttgtcactgagccctatccctttggaatgtggcagggagtgaggttggtgagagaacatgtgggcacttaactcttcatgttccagttcatcccagaagtagacatcccaggacccattctgtgtcaaggtgaatgcctgtgtcctccccagcttcatgcctctgtcatgggggaaggaatagcttatgttctgctctggtgcagtgccgtagattaaaggtacatttctatcttctttgatttaaaaagcaccagtctcataaaggtgccactcagttttagccatgtcttcactgaaattgcaaaagtacttttagggagcaggagtttatttgacatctagttatctgtctgtctgttcatctatctatctgtctgctgtatgagaggtaggactggattaaatgaccactgaactcactgaatccagatcattcatatcatcaacaaaagctctagggggaggtcacgttgtgaatgcttaaaacatattattttcttcaacaaccatatcgctaaactaatatatccagagattttgcacaattcgtgttgaaccttccaaaacaaaaataaagacctgtccaaaagttttgacaaaaatactgattgctcccaaataaagtgcttctaagctttgtgtagacatagtttaactgatttgtaaaaatagcttaagcatgttgagaatgaagtaaaagttttcccatgtgctgtctaatgtactctgtgtaactctgaagacacatcagcttctaggattgcagcaatctatgaataacattttttctctcatttatgactttccatcagtaaagaagccattgcagaatttaaaattacacaaaggagtcattctctcctgggacataaagagttaaagctctgtcctctaaatagaagcctggccaaagggagaaaacagtgggagtcccttttcccttttaacaagtttgcaatagacacttctttttttcctgtctcaatggatgtgtgcacaccagtggaatcgcacaaacttgtcggtatgagctatataataacaaacacaaataaataaaagggagccttgtgagaatacaaaaaaaaaaa

SEQ ID NO: 3581 - DNA, 2792 bp, Homo Sapiens
  NM_013238
caccctcaggcactacagctagactccgagcttactgggcagtcatctgattcgaccaacatcagttcgcagggcttaagcccagtcccttacggcggcctggggagggaccaggcccaagtatataaagctccctgagggtccgcgttggctttgcgcctgtgagtgtgattcaagaacgtcccagtgcccttggctcctttcggagtgtgaccccgtgcttgcacgggacacgttacccagctcgggtgagaagggtatcttccgggaacctcgcctttaatagcacaacgagcgcagagtccactggatctgcgagaagaaaccgcgctaactagtttgtccctacggccgcctcgtagtcactgccgcggcgccttgagtctccgggccgccttgccatggctgcccgtggtgtcatcgctccagttggcgagagtttgcgctacgctgagtacttgcagccctcggccaaacggccagacgccgacgtcgaccagcagagactggtaagaagtttgatagctgtaggactgggtgttgcagctcttgcatttgcaggtcgctacgcatttcggatctggaaacctctagaacaagttatcacagaaactgcaaagaagatttcaactcctagcttttcatcctactataaaggaggatttgaacagaaaatgagtaggcgagaagctggtcttattttaggtgtaagcccatctgctggcaaggctaagattagaacagctcataggagagtcatgattttgaatcacccagataaaggtggatctccttacgtagcagccaaaataaatgaagcaaaagacttgctagaaacaaccaccaaacattgatgcttaaggaccacactgaaggaaaaaaaaagaggggacttcgaaaaaaaaaaaagccctgcaaaatattctaaaacatggtcttcttaattttctatatggattgaccacagtcttatcttccaccattaagctgtataacaataaaatgttaatagtcttgctttttattatcttttaaagatctccttaaattctataactgatcttttttcttattttgtttgtgacattcatacatttttaagatttttgttatgttctgaattcccccctacacacacacacacacacacacacacacacacgtgcaaaaaatatgatcaagaatgcaattgggatttgtgagcaatgagtagacctcttattgtttatatttgtaccctcattgtcaatttttttttagggaatttgggactctgcctatataaggtgttttaaatgtcttgagaacaagcactggctgatacctcttggagatatgatctgaaatgtaatggaatttattaaatggtgtttagtaaagtaggggttaaggacttgttaaagaaccccactatctctgagaccctatagccaaagcatgaggacttggagagctactaaaatgattcaggtttacaaaatgagccctgtgaggaaaggttgagagaagtctgaggagtttgtatttaattatagtcttccagtactgtatattcattcattactcattctacaaatatttattgaccccttttgatgtgcaaggcactatcgtgcgtcccctgagagttgcaagtatgaagcagtcatggatcatgaaccaaaggaacttatatgtagaggaaggataaatcacaaatagtgaatactgttagatacagatgatatattttaaaagttcaaaggaagaaaagaatgtgttaaacactgcatgagaggaggaataagtggcatagagctaggctttagaaaagaaaaatattccgataccatatgattggtgaggtaagtgttattctgagatgagaattagcagaaatagatatatcaatcggagtgattagagtgcagggtttctggaaagcaaggtttggacagagtggtcatcaaaggccagccctgtgacttacactgcattaaattaatttcttagaacatagtccctgatcattatcactttactattccaaaggtgagagaacagattcagatagagtgccagcattgtttcccagtattcctttacaaatcttgggttcattccaggtaaactgaactactgcattgtttctatcttaaaatactttttagatatcctagatgcatctttcaacttctaacattctgtagtttaggagttctcaaccttggcattattgacatgttaggccaaataattttttttgtgggaggtctcttgtgcgttttagatgattagcaataatccctgacctgttatctactaaagactagtcgtttctcatcagttgtgacaacaaaaatggttccagatattgccaaatgccctttagaggacagtaatcgcccccagttgagaaccatttcagtaaaactttaattactattttttcttttggtttataaaataatgatcctgaattaaattgatggaaccttgaagtcgataaaatatatttcttgctttaaagtccccatacgtgtcctactaattttctcatgctttagtgttttcacttttctcctgttatccttgtacctaagaatgccatcccaatccccagatgtccacctgcccaaagtctaggcatagctgaaggccaagctaaaatgtatccctctttttctggtacatgcagcaaaagtaatatgaattatcagctttctgagagcaggcattgtatctgtcttgtttggtgttacattggcacccaataaatatttgttgagtgaatgaaaaaaaaaaaaaaaaaa

SEQ ID NO: 3582 - DNA, 2443 bp, Homo Sapiens
  NM_013239
gtgaacgcgggcgcccttgtttgggagcgcggccggcgcgcccgttttgaagctgccctgagcagcgcgggccggaccgcgccccctcctcggtccccgcgccccgcgagtccgcgcagttcccgaggcgcgggccctgttccctgcgccgcgccccctcagcgggccgtgctcgcatcaccgaggtcggtccggggcggaccgaagcccccggggcggggcggggcgcgggcgtccgggggcgccgcgggcccagcccccgccatgccgcccggcaaagtgctgcagccggtcctgaagatgaaggtggacgagctgttcctgtactggctcagcgaggccagcacgcagcggatgctgcaggactgcctgcgccggatcaaggcgcccgggcgggaccagccgaccccgggggacggggagcagcccggggcctggcccacagccccgctcgccgccccccggcccagcgggctcgaacccccgggaacccccgggccgggccctgcgctgcccctgggcgccgcctccagccccaggaacgcgccccacgttcgaggcacccgtagatccgcagggacgagagtagttcagacacggaaagaagagcctctgcccccggccacgagccaaagcattccgaccttctacttccccagaggacgcccgcaggactccgtcaacgtggatgccgtcatcagcaagatcgagagcaccttcgcccggttcccccacgagagggccaccatggatgacatgggcctggtggccaaggcctgcggctgccccctctactggaaggggccgctcttctatggcgccggcggggagcgcacgggctccgtgtccgtccacaagttcgtcgccatgtggagaaaaatcctccagaactgccacgacgacgcggccaagttcgtccatctgctcatgagccccggctgcaactacctggtgcaggaggactttgtccccttcttgcaggacgtggtgaacacgcacccggggctgtcgttcctgaaggaggcgtccgagttccactcgcgctacatcaccacggtcatccagcggatcttctacgccgtgaaccggtcctggtccggcaggatcacctgcgccgagctgcggaggagctccttcctgcagaatgtggcgctgctggaggaggaggcggacatcaaccagctgaccgaattcttctcgtacgagcatttctacgtcatctactgcaagttctgggagctggacacggaccacgacctgctcatcgacgcggacgacctggcgcggcacaatgaccacgccctttctaccaagatgatagacaggatcttctcaggagcagtcacacgaggcagaaaagtgcagaaggaagggaagatcagctatgccgactttgtctggtttttgatctctgaggaagacaaaaaaacaccgaccagcatcgagtactggttccgctgcatggacctggacggggacggcgccctgtccatgttcgagctcgagtacttctacgaggagcagtgccgaaggctggacagcatggccatcgaggccctgcccttccaggactgcctctgccagatgctggacctggtcaagccgaggactgaagggaagatcacgctgcaggacctgaagcgctgcaagctggctaacgtcttcttcgacaccttcttcaacatcgagaagtacctcgaccacgagcagaaagagcagatctccctgctcagggacggtgacagcggcggccccgagctctcggactgggagaagtacgcggccgaggagtacgacatcctggtggccgaggagactgcgggagagccctgggaggacgggttcgaggccgagctcagccctgtggagcagaagctgagtgcgctgcgctccccgctggcccagaggcccttcttcgaggcgccctcaccgctgggcgccgtggacctgtacgagtacgcatgcggggacgaggacctggagccgctgtgacgccgcccgcgagaacgccgccgcggggccgctccccacgtgccaccaccgggccaccgcggctcgtgtaaaaactgttgtggaaaatgagtgcgtttgtacggaatgataaacttttatttattcacagaagcgtgttgattgccgctgtgggttcgtggctggacctgcccagagctctgtgccagggggacacgtagggccgcgcgtgaatgggacgggttcccacacggacaccctctggcgcttgccgttcccgacccagcctgggttccggggcctgcgtctgtggaaagggtccgtgtgcgcacaacggtgaccggcggctcccgggcgcctcagtcctggacaggagcctccaccacaggctgtgtgaatgttttgtgtaaacgtacaaaaccgtttctggcgatcacgcttgtacgtttggaggaaaaaaaaaaaaaaaaaa

SEQ ID NO: 3583 - DNA, 4883 bp, Homo Sapiens
  NM_013240
acgcgcatggaacgcagcgaaggactatggcaggggagaacttcgctacgccgttccacgggcacgtgggccgcggcgccttcagcgacgtgtacgagcccgcggaggacacgtttctgcttttgaacgcgctggaggcagcggctgccgaactggcaggagtggaaatatgcctggaagtagggtcagggtctggtgtagtatctgcattcctagcctctatgataggccctcaggctttgtacatgtgcactgatatcaaccctgaggcagcagcttgtaccctagagacagcacgctgtaacaaagttcacattcaaccagttattacagatttggtcaaaggcttgctaccaagattgaccgaaaaagttgatcttctggtgtttaatcccccctatgtagtgactccacctcaagaggtaggaagtcacggaatagaggcagcttgggctggtggcaaaaatggtcgggaagtcatggacaggttttttcccctggttccagatctcctttcaccaaaaggattattctatttagttaccattaaagaaaacaacccagaagaaattttgaaaataatgaagacaaaaggtctgcaaggaaccactgcactttccagacaagcaggccaagaaactctttcagtcctcaagttcaccaagtcttagcatacagtgtgtgcccagaactactggaaactgaatgcatttagcatattttgaaactgaagtcattcattaggtaacaaggaattttatcagaaatttgtcattaaaaaaaggtagaaaggtggaacattccctttcagtcaggcctatagaattatttgcacaagtacaagtaaatatgtgtattatatttatagtttgcattttaaatataaaaattatgtatgaaatatttatttcagcattatgtggtaaggcaatggaattgatctggcaaatgtcttttttttcataccagtccataaaggcagtttgctttcagatggcagggccagcaacacaccttcattgtcgtatctccggtgtgtatcagctctccaactctatgtcataattcagttcatggggatcttgattacctttcccttccacaaaatattacactgattggttatatcgatgacattatgctgatttgacctagtgagcaagaagtaggaactacattagacttagtggaaagacatttgcatcagagggtaggaaataaatatgactacaattcaagggccttctaccttagtgaaattggtagggatccagtgacatggggcatgttaggatatttcttctacggtgaaggataagtacttgcatcttgctgctcttaaaaccaagaaagaggcacaatacttagtgggcctctttgggttttggaggcaacattttccaatttcattatgttataccagcctgtttaccaattgactcaaaaagctgctagttttgagtagggcccagaacaagaaaagagtctgcaacaggtccaggctgctgtgcaagctgctctgccacttgggtcatatgatccagcagatccagtggtgtttcagtggcagtggcagatagggatgctgtttgaagcttctggcaggtccctataggtgaatcttggtttaggattttagagcaaagccgtgccattaccaacaaataactagtctctttttgagaaacagctcttggcctgctactgggccttagtagagactgatacttaatgagtcaccaagttaccgtgcaacctgagcttcccatcatgaactggatgttatctgagccaccaacgcacaaagttggatatgcacagcaacactctgtcatcagatggaagtggtatacacatgattgggcctgagaggccctgaaggcacaaggaagttacatgaagaagtaggccaaatttccgtagtccccacttctgctacctgccttctctcttccagcctgcatcggtggcttcatggggacttccctgtgatcagctgacagagaaagagaagacttaggcctggtttacagagtgttctgtatgatatgcaggtaccaccctaaagtggatagctgcagcactacatctcacctctgggctaccttgaaggacagtggtgaagggaaatcctcctggtggacacaactttgagcagtccccctgttgactttgcttagaaggaaaaatagccagatattcaattatatgccaattcataggccgtggccagtggtttggctggatggtcagggagttcaatataactggaaaattggtgacaaagaaatttggagatgaagtatgtggatagacactgaatgggcaaaaagggtgaagatatttgtgccccatgtgaatgctcaccaaagggttagcaaaaaaggattttaataaagtggacaagataacctgttctgtggatactagtaggcctctttctccagccacacctgtcatcacccaattgtttcatgagcaaagtagccatggtgacaagaatagaggttatgcatgggctcagcaacgtggacttctactcaccaaggctgacctggccaaggctatctctgagtgcccagtctgccagcaacagagaccaacactgagcccctgatatgacaccattccccagggtcatcagtcagttgcctagtggcaggttcattacattgatccacctctatcattgaagggatagtgttttatccttactgaaatagatcttactctggatacagattcactttcccttcgcgcagggtgtctgctaaaactaccatccgtggacttacagaatgtctcatctatgaccatggtattccacacagcattacaagaaactcagttcacagcaaaagtgtggcagtgggcccatgatcatggaattttcttaccatgttccctactatcttgaatcaactggctacatagagcagtggaatggcattttgaagacagtaataacaccagctatatagcagtgccttgtagggctgggacaaggttctctagaagactgtctatgctctgaatcaacatccagtatatggtgcatttctcttatgactgggattcacaggtccaggaatcaaggggtcagaataggaaggacaccattcgctattagccctggtgacccactagcaaaatttttgcttcctgttcccatgacttatgcactgctggcctagaggtcttacatagggtggaatattttccactgagagacgcaatcatgatttaattgaactggaagtttaagactgctcctcagccatttggggcttcttatgcctctaactcaatagacaaatgagttacagtgctggctgggtgattgttcctgactaccaagtagaaactggactaccccgaatggtggtaaggtaaagtatgttgggaatacacaggattccttagggcatctcttagtgttatcatgccctgtgattaaggtcaatggaaaactacagcctaattcagacaggaccactaatgatccagacctttcaggaatgaaggtttgggtcaccaccaggtaagtaccatgaccagatgaagtgcttgctgaaggcaaagggaatacagaataaatggtggaataaatactagctttgatcatatgaccagttacagaaacacagactgtgattgtcataagtatgtcctccatattttgctataactacattttgtgtgtgtgtagctttgttttcttctcatttccttattctgtaacataagatgcattgattttatagcatagtgtttaaatattgttaatttttttaactggctccagtgttcaaccttgattaattttacatcatagtatttaagttatgggatatcaaggagagagtaaacatcacatgaagactttaccacctcttctgggaaacgggttaaagtgtttctggtggaatgctggattgttaatcgtgttagatggaattatgaccttgttgttgtctttatgtggcagttaagtatggtttaaagagatgtttatgggtgccaagttgacaagggtaaacttgtgatggttaattttatatgtcaacttgaataggccacagggtgccaaatatctgtttaaacattattctgaagtgtcttgagtgtgtttacagacaagatttgcatttgaactgggggactcagtaaaggagatagccatccccaaggtgggtggacatcatccagtttgttgagggcgtaaataaaataaaaggcagaggaaggaagaattccccccccttttttttcctgcctcattgtttgagctgtgacatctcatcttctgtcctcagatggatttacatcactggcttccctggttctcaagcctttggattcagactgaattataccacaggccttcctgggtctccagcttatagatgacagatcatgggacctcttagcctccataatcatgtaagccactttcttgtagtactggtaaaagatatattaaaccaatctataaaacagatagctatgaaagagaaaggtgacaggcacaagcctaggcaaatagagaagggttcctggacagcctctgacttgcctaggtcattgtgcacacgtggcttgcctgaatgaacatgcccactgtgaaagattccatttctcaacacatgtgcagtaagggaaataaatcaatgtggctcaaactaaccgcccacacatggggtggagccacaaggagtttgctccttatgcaggggagaagccgtgcctcttcagctcgtgtgtggtggcctggcattcaatttgtgaggtgtaaaacctgcatgaaggacccctctttttgtggagagctttccttttgcctaataaattctgccctcctcgccaaaaaaaaaaaaaaaaaa

SEQ ID NO: 3584 - DNA, 1308 bp, Homo Sapiens
  NM_013242
cctccgcctccattgaaggcggggaaataccgcggcgcggacggtagttgctgtggtttccgttctgagctcgcagcttaggagctgaagatcgcggacttagcgttgccgcgtccgagtccggccatcagtggctgcagatccggaggccaggagctcaaccacccttcttcggaacagggccggcctgctgctgtgccctcgacgctcggtgcctgtatctactccggggcctaggtcggctccgggggcggcttaggagaaggccgccggcgagatgttcaaaaacacgttccagagcggcttcctctccatcctctacagcatcggcagcaagcctctgcaaatctgggacaaaaaggtacggaatggccacatcaaaagaatcactgataatgacatccagtccctggtgctagagattgaagggacaaatgtaagcaccacatatatcacatgccctgcagaccccaagaagacgctgggaattaaacttcctttccttgtcatgattatcaaaaacctgaagaagtattttaccttcgaagtgcaggtactagatgacaagaatgtgcgtcgtcgctttcgggcaagtaactaccagagcaccacccgggtcaaacccttcatctgcaccatgcccatgcggctggatgacggctggaaccagattcagttcaacttgctagacttcacacggcgagcatacggcaccaattacatcgagaccctcagagtgcagatccatgcaaattgtcgcatccgacgggtttacttctcagacagactctactcagaagatgagctgccggcagagttcaaactgtatctcccagttcagaacaaggcaaagcaataactggaattgtgactcgagggatagacccctggatgtgactcttctttttaaaaggaaactatgtggaggacgatgcaaaaacatatttatcttagtttgctctgctgtagttctgttatttatacttggtgttgcttgtcatggacaccggtgaacatgccgtaactctgtgactgcattgtaagtgcagtgggggtaagcagtcctgtgagtggcgcatgaacgctggagcttattccgccgcctgccccagtgtggggggagatacctttaccatgaacttacagaattaaagatggcccataaggaattccagaccaatatttcttcctgcggtttattctatgttttatatattatctaaatatatgtatatgctgtgtcatactcataatctggaaatgaataaagtgatatattcctggtttgtaaaaaaaaaaaaaaaaaaa

SEQ ID NO: 3585 - DNA, 3366 bp, Homo Sapiens
  NM_013243
gttccattcccgggggattggagtagcgttggagtcaccgacgccatcccctcccgcctctggcgtgcatggagcatgcgcttccttcctcacttcctctgcaggagggagcgagagtaaagctacgccctggcgcgcagtctccgcgtcacaggaacttcagcacccacagggcggacagcgctcccctctacctggagacttgactcccgcgcgccccaaccctgcttatcccttgaccgtcgagtgtcagagatcctgcagccgcccagtcccggcccctctcccgccccacacccaccctcctggctcttcctgtttttactcctccttttcattcataacaaaagctacagctccaggagcccagcgccgggctgtgacccaagccgagcgtggaagaatggggttcctcgggaccggcacttggattctggtgttagtgctcccgattcaagctttccccaaacctggaggaagccaagacaaatctctacataatagagaattaagtgcagaaagacctttgaatgaacagattgctgaagcagaagaagacaagattaaaaaaacatatcctccagaaaacaagccaggtcagagcaactattcttttgttgataacttgaacctgctaaaggcaataacagaaaaggaaaaaattgagaaagaaagacaatctataagaagctccccacttgataataagttgaatgtggaagatgttgattcaaccaagaatcgaaaactgatcgatgattatgactctactaagagtggattggatcataaatttcaagatgatccagatggtcttcatcaactagacgggactcctttaaccgctgaagacattgtccataaaatcgctgccaggatttatgaagaaaatgacagagccgtgtttgacaagattgtttctaaactacttaatctcggccttatcacagaaagccaagcacatacactggaagatgaagtagcagaggttttacaaaaattaatctcaaaggaagccaacaattatgaggaggatcccaataagcccacaagctggactgagaatcaggctggaaaaataccagagaaagtgactccaatggcagcaattcaagatggtcttgctaagggagaaaacgatgaaacagtatctaacacattaaccttgacaaatggcttggaaaggagaactaaaacctacagtgaagacaactttgaggaactccaatatttcccaaatttctatgcgctactgaaaagtattgattcagaaaaagaagcaaaagagaaagaaacactgattactatcatgaaaacactgattgactttgtgaagatgatggtgaaatatggaacaatatctccagaagaaggtgtttcctaccttgaaaacttggatgaaatgattgctcttcagaccaaaaacaagctagaaaaaaatgctactgacaatataagcaagcttttcccagcaccatcagagaagagtcatgaagaaacagacagtaccaaggaagaagcagctaagatggaaaaggaatatggaagcttgaaggattccacaaaagatgataactccaacccaggaggaaagacagatgaacccaaaggaaaaacagaagcctatttggaagccatcagaaaaaatattgaatggttgaagaaacatgacaaaaagggaaataaagaagattatgacctttcaaagatgagagacttcatcaataaacaagctgatgcttatgtggagaaaggcatccttgacaaggaagaagccgaggccatcaagcgcatttatagcagcctgtaaaaatggcaaaagatccaggagtctttcaactgtttcagaaaacataatatagcttaaaacacttctaattctgtgattaaaattttttgacccaagggttattagaaagtgctgaatttacagtagttaaccttttacaagtggttaaaacatagctttcttcccgtaaaaactatctgaaagtaaagttgtatgtaagctgagattttgtatacagaatccttatttcctcatagacttatattttataatcagaatatgttgctttgaaaaagcctctaatggactgaccttaaaactcatccttcttccactgtctcatccacataagcactccccgaagaattaagggggttctgttttcaaggcatgccaagtactaaagcaccttgcagagcgtgtctattacaagatgtcatttccaccagcagttcccttaggggagctgaaataaattcacattttctcaaagtctcatagctttggaggagccatctgcttttttggctgctctttttagctggctttttattaggctcagtgacataaaaaggatccaggtaaatgggtataggatttgctggatttactaacaatttccccctgttcttaacacttcctattagtgacttttcagacattgagtttacttataaagagagatatttatgtactctctaagaagacaaatgaggtcataaacactgcataaagcaaggcaaaaatgtatgccacatctcagttatctaaactagattagatccaagccaagttttctcaacagagagcaaagggccaggcagtaaggtagaaatagagataaaaatcattccttccttgtgatccaaagctggtcgagcagctttcctggaggaaaaggttaatgaacttcaggtccctgcaactcagcccccaccacaaacacagccctggaaacatacagtggcgcaaggtcctcttgaaatgttaatggttaatgttcccaaaccagagaatgctttgaaaatgtatcattcagtgtaaattaattacatacatatttttctatatatttgtttcaaactgtaaaaataacataatatgtaatttgtgtattagtgagaggtgaagccagctggacttcctgggtcgagtggggccttggagaacttttctgtcttacaagaggattgtaaaatgcacccatcagtgctctgtaaaacacaccaatcagcgctctgtagctagcaataggtttgtaaaatgcacccatcagcactctgtaaaacgcaccaatcagcactctgtaaaatgcaccaatcagcaggattctaaaagtagacaatcacagggaggattgaaaaaaagggcactctgatagggcaaaaacggaacatgggaggggacaaataagggaataaaatctggccaccccagccagcagcagcaacctgttcaggtcgcctgccgctgtggaagctttgtccttttgctcttcataataaaccttgctactgttcaaaaaaaaaaaaaaaaaaaaaaaaaaaaaaaaaaaaaaaaaaaaaaaaaaaaaaaaa

SEQ ID NO: 3586 - DNA, 1860 bp, Homo Sapiens
  NM_013246
acgtcagaaaaaaaaaaaaaaagtttgcagaatgtcccacaccgaaaaaaaaaaaaaatccgaaaccgagcgaaaaaaacctgcgagtgggcctggcggatgggattattaaagcttcgccggagccgcggctcgccctcccactccgccagcctccgggagaggagccgcacccggccggcccggccccagccccatggacctccgagcaggggactcgtgggggatgttagcgtgcctgtgcacggtgctctggcacctccctgcagtgccagctctcaatcgcacaggggacccagggcctggcccctccatccagaaaacctatgacctcacccgctacctggagcaccaactccgcagcttggctgggacctatctgaactacctgggcccccctttcaacgagccagacttcaaccctccccgcctgggggcagagactctgcccagggccactgttgacttggaggtgtggcgaagcctcaatgacaaactgcggctgacccagaactacgaggcctacagccaccttctgtgttacttgcgtggcctcaaccgtcaggctgccactgctgagctgcgccgcagcctggcccacttctgcaccagcctccagggcctgctgggcagcattgcgggcgtcatggcagctctgggctacccactgccccagccgctgcctgggactgaacccacttggactcctggccctgcccacagtgacttcctccagaagatggacgacttctggctgctgaaggagctgcagacctggctgtggcgctcggccaaggacttcaaccggctcaagaagaagatgcagcctccagcagctgcagtcaccctgcacctgggggctcatggcttctgacttctgaccttctcctcttcgctcccccttcaaaccctgctcccactttgtgagagccagccctgtatgccaacacctgttgagccaggagacagaagctgtgagcctctggccctttcctggaccggctgggcgtgtgatgcgatcagccctgtctcctccccacctcccaaaggtctaccgagctggggaggaggtacagtaggccctgtcctgtcctgtttctacaggaagtcatgctcgagggagtgtgaagtggttcaggttggtgcagaggcgctcatggcctcctgcttcttgcctaccacttggccagtgcccacccagcccctcaggtggcacatctggagggcaggggttgaggggccaccaccacacatgcctttctggggtgaagccctttggctgccccactctccttggatgggtgttgctcccttatccccaaatcactctatacatccaattcaggaaacaaacatggtggcaattctacacaaaaagagatgagattaacagtgcagggttggggtctgcattggaggtgccctataaaccagaagagaaaatactgaaagcacaggggcagggacagaccagaccagacccaggagtctccaaagcacagagtggcaaacaaaacccgagctgagcatcaggaccttgcctcgaattgtcttccagtattacggtgcctcttctctgccccctttcccagggtatctgtgggttgccaggctggggagggcaaccatagccacaccacaggatttcctgaaagtttacaatgcagtagcattttggggtgtagggtggcagctccccaaggccctgccccccagccccacccactcatgactctaagtgtgttgtattaatatttatttatttggagatgttatttattagatgatatttattgcagaatttctattcttgtattaacaaataaaatgcttgccccagaaaaaaaaaaaaaaaaaaaa

SEQ ID NO: 3587 - DNA, 1176 bp, Homo Sapiens
  NM_013248
ggctgacttcgctgcccgtcacgggaatgcgggagagggcggcgccggggcgctcgcgtctgcgtggagaccggctggccgcgcgcgggaagccgcggaactgcgccggaaagtcccccggctctggggccccggtgacccagagtaagcctccaagaaggaggaggaggagagaaaggcggctcttcccgtgcccctaccagaggcttcggtgggcccaccttgtgacctccgcggccggcccctcagtggaactgcgtcccacgcggggggcgtcccgaccgtgggggccgcggcccgcgctgaccctggacgtcgccgcgcagcccctggttccccaaggcagaggaaataccctggtggagccctccttccatagaaccagagatggcatctgtggatttcaagacctatgtggatcaggcctgcagagctgctgaggagtttgtcaatgtctactacaccaccatggataagcggcggcgtttgctgtcccgcctgtacatgggcacagccaccctggtctggaatggcaatgctgtttcaggacaagaatccttgagtgagttttttgaaatgttgccttccagcgagttccaaatcagcgtggtagactgccagcctgttcatgatgaagccacaccaagccagaccacggtccttgttgtcatctgtggatcagtgaagtttgaggggaacaaacaacgggacttcaaccagaacttcatcctgaccgcccaggcctcacccagcaacacagtgtggaagatcgcaagtgactgcttccgcttccaggactgggccagctagtgggggtggcagaggtctctttgcttcattcagccctagctctgtagagaaatgcaaacctcgactctcaaggatgtgaggaacacaagttcatttctgttgttgcggagacactgcagactccactgtgccgaggttgaactcttttttgttgctcaagttctaggagtccctttcctgaatatatacttgtttgtcatagtttccttttcaaagtagtaaacttttctatttttctacttgcccagtagagactctgattctggaaattctgacaaataatttaataatacacatgttgcttcttaaaaaaaaaaaaaaaaaaaaaaaaaaaaaaaaaaaaaaaaaaaaaaaaaaaaaaaaaaa

SEQ ID NO: 3588 - DNA, 3524 bp, Homo Sapiens
  NM_013252
caggaagaggtatttcttggggatgctaccaaggcagagactgtgaagaaggaagaacgttgcttgggcaaaaggagcatattctcaggagacggggcccctgcctgccacaccaagcattaggccaccaggaagacccccatctgcaagcaagcctagccttccagggagaaagaggcccctgcagctccttcatcatgaactggcacatgatcatctctgggcttattgtggtagtgcttaaagttgttggaatgaccttatttctactttatttcccacagatttttaacaaaagtaacgatggtttcaccaccaccaggagctatggaacagtctcacagatttttgggagcagttccccaagtcccaacggcttcattaccacaaggagctatggaacagtctgccccaaagactgggaattttatcaagcaagatgttttttcttatccacttctgaatcatcttggaatgaaagcagggacttttgcaaaggaaaaggatccacattggcaattgtcaacacgccagagaaactgaagtttcttcaggacataactgatgctgagaagtattttattggcttaatttaccatcgtgaagagaaaaggtggcgttggatcaacaactctgtgttcaatggcaatgttaccaatcagaatcagaatttcaactgtgcgaccattggcctaacaaagacatttgatgctgcatcatgtgacatcagctaccgcaggatctgtgagaagaatgccaaatgatcacagttccctgtgacaagaactatacttgcaactctttttgaatccatacaggtcgtctggccaatgattcttttacttacctatctgtctaccagtagcggtccttgcccatttgggaaactgagcttctttcttctgcactgggggactggatgctagccatctccaggagacaggatcagttttacggaaacaactcagttagtatagagatgaggtccgcttctgtagtactgagcatttctgactgatcaaaaaggcctagtctgttgacagggtttgttttattttagcctcagagtataccatactactagggagtaactgtagagtgagaaattataaacattatttagggattaccatggtggaagagggataaacataggtcctgtgacttcgtctctgttctcaagggaaccccattcacatgcccctcctaactccacaagcgagggtagcagaggctctcctcagtctgaactaaggcttggccttggggagggctcctagtgctgagcttggagcagcacggacagcagcattgtttatgggaatggagagaggtctgggcaggataggaaccttcttggagacccctttgaagaaaaccaggcagccaagggagccaaacacactagatttctgttcttcagcaaagccctgaagagacacttaagctaaaaattcccttgtcatatttctgaaactccattataacatatgtaactcctttgtaaccaaaatttaggtaagcaggcttcctttgctctgaaggttttgagtacctggctgtatttgttgagtatttttaaaattttggatagtctcttaggcaacaataatcacaatatattcatcccttcagttctggagaaagcctgataccaggcacagcctactgaccccaaggagcctggcactgattggcatcacattgatctagaactggtccagccgacgaagagtaggaaaagagaagggctgctcagggaaacattggctgggggcacggaataagcacatagtaaaaagggaacatcagggtcaaatggaaatcacctgagacaggaaacagggagttcatttggccacactggaagaaaggcaagaaagaggaagacaagtcttggagtaccctggctgttctccacactcacaagacatcagctatatactctgcttggtgcataagaaagagaaaagagatgccttttgtgttttgagtaagaataattaaaccataaggaagaccatgtataaaactgatggaaataatagtcaccaaagtacagcacataccattttgtgtctaataacaatgtagcacagtaatgactgtacatgtcattgtatgtataccaaacaagattgttgtaaatcatattttttattacaacactaagttctgcttctgcattcctaggtttcatcatttttggctccttagcatggccacttacaattttttaacatgagataacacatcaggtgtcagaacttgcttgaagggaattaccagaagtaatttgtgtttgagatggggtggaaattggaattatattagtagccggtggagatacaagttctctgactgtgttgggaaaggataagtgctaccgttgagaagggaagaaaggctgagtctaggtggagaaaaatatcaacagaactctagccaaaggcaagccccagaactcagacaacagaaaggaaatcctaatccttctgttttgagaagagagaactgtagttgcttcacttcctatttcatgacagaataactgcaaacttttaagatcaggaaatgtagacatctagtgatttctttagtagacagtttaatttcccccaagattaggagacacttctgtgcaggttctaaaaggagcccaatggcctggggtgggagtggggagtagatagggaatatgtgggatttggtttaagttcatcattggaagagttcctggatccttgcaagcttagataaatgtgatctttattagatagcagtggcatgctttaaaaaaaaaaaaggcaatgaaaatttagcaagccactgaatttgagttttcactttgtttctaatatgctgtgtgaatcagtacagttttcttaccctttcttggtcttaatttccttactgataaaatggggtagtaatacctatctcaaaaaattattgcacatattaaataacattcctctatgtatctcaatggcattagacattaggagaagcattttgtggaggatttgaagttgagatcttcatccaagaagtagcttttcaatttgctagaagcttaatgtaggcaagccacttcatttttcagaacttgtttactcatttataatatgggaataaaaatttgtgcaagtcagagaagggtgccttaaaaatgttgtggccaagccacatgagatcaaagacacacttttcatgacctcaaatgtgggcccagcctaggtcagccaacccccatccaacccttagactcacgaacaaatccacctgagatcagcagagccaccctagatcagctgaaactctaagcacaaaaataaaaacttatcactgtataccactggagttttctggttatctctcgtatagcaaaatctaactgatgcaatctccatctggccttcatccttctccctttattgtcctttcgtgtattgttcatccagcaaccaggatgatcttgttaaaacattaaacagattctgtcactcttaaaaaaaaaaaaa

SEQ ID NO: 3589 - DNA, 3098 bp, Homo Sapiens
  NM_013254
gcacccgcaccggcgcgccggccgtcggtcacgtggcctccggccagggcttgcgaagccggaagtgtcctgagtctcgaggaggccgcgggagcccgccggcggtggcgcggcggagacccggctggtataacaagaggattgcctgatccagccaagatgcagagcacttctaatcatctgtggcttttatctgatattttaggccaaggagctactgcaaatgtctttcgtggaagacataagaaaactggtgatttatttgctatcaaagtatttaataacataagcttccttcgtccagtggatgttcaaatgagagaatttgaagtgttgaaaaaactcaatcacaaaaatattgtcaaattatttgctattgaagaggagacaacaacaagacataaagtacttattatggaattttgtccatgtgggagtttatacactgttttagaagaaccttctaatgcctatggactaccagaatctgaattcttaattgttttgcgagatgtggtgggtggaatgaatcatctacgagagaatggtatagtgcaccgtgatatcaagccaggaaatatcatgcgtgttataggggaagatggacagtctgtgtacaaactcacagattttggtgcagctagagaattagaagatgatgagcagtttgtttctctgtatggcacagaagaatatttgcaccctgatatgtatgagagagcagtgctaagaaaagatcatcagaagaaatatggagcaacagttgatctttggagcattggggtaacattttaccatgcagctactggatcactgccatttagaccctttgaagggcctcgtaggaataaagaagtgatgtataaaataattacaggaaagccttctggtgcaatatctggagtacagaaagcagaaaatggaccaattgactggagtggagacatgcctgtttcttgcagtctttctcggggtcttcaggttctacttacccctgttcttgcaaacatccttgaagcagatcaggaaaagtgttggggttttgaccagttttttgcagaaactagtgatatacttcaccgaatggtaattcatgttttttcgctacaacaaatgacagctcataagatttatattcatagctataatactgctactatatttcatgaactggtatataaacaaaccaaaattatttcttcaaatcaagaacttatctacgaagggcgacgcttagtcttagaacctggaaggctggcacaacatttccctaaaactactgaggaaaaccctatatttgtagtaagccgggaacctctgaataccataggattaatatatgaaaaaatttccctccctaaagtacatccacgttatgatttagacggggatgctagcatggctaaggcaataacaggggttgtgtgttatgcctgcagaattgccagtaccttactgctttatcaggaattaatgcgaaaggggatacgatggctgattgaattaattaaagatgattacaatgaaactgttcacaaaaagacagaagttgtgatcacattggatttctgtatcagaaacattgaaaaaactgtgaaagtatatgaaaagttgatgaagatcaacctggaagcggcagagttaggtgaaatttcagacatacacaccaaattgttgagactttccagttctcagggaacaatagaaaccagtcttcaggatatcgacagcagattatctccaggtggatcactggcagacgcatgggcacatcaagaaggcactcatccgaaagacagaaatgtagaaaaactacaagtcctgttaaattgcatgacagagatttactatcagttcaaaaaagacaaagcagaacgtagattagcttataatgaagaacaaatccacaaatttgataagcaaaaactgtattaccatgccacaaaagctatgacgcactttacagatgaatgtgttaaaaagtatgaggcatttttgaataagtcagaagaatggataagaaagatgcttcatcttaggaaacagttattatcgctgactaatcagtgttttgatattgaagaagaagtatcaaaatatcaagaatatactaatgagttacaagaaactctgcctcagaaaatgtttacagcttccagtggaatcaaacataccatgaccccaatttatccaagttctaacacattagtagaaatgactcttggtatgaagaaattaaaggaagagatggaaggggtggttaaagaacttgctgaaaataaccacattttagaaaggtttggctctttaaccatggatggtggccttcgcaacgttgactgtctttagctttctaatagaagtttaagaaaagtttccgtttgcacaagaaaataacgcttgggcattaaatgaatgcctttatagatagtcacttgtttctacaattcagtatttgatgtggtcgtgtaaatatgtacaatattgtaaatacataaaaaatatacaaatttttggctgctgtgaagatgtaattttatcttttaacatttataattatatgaggaaatttgacctcagtgatcacgagaagaaagccatgaccgaccaatatgttgacatactgatcctctactctgagtggggctaaataagttattttctctgaccgcctactggaaatatttttaagtggaaccaaaataggcatccttacaaatcaggaagactgacttgacacgtttgtaaatggtagaacggtggctactgtgagtggggagcagaaccgcaccactgttatactgggataacaatttttttgagaaggataaagtggcattattttattttacaaggtgcccagatcccagttatccttgtatccatgtaatttcagatgaattattaagcaaacattttaaagtgaattcattattaaaaactattcatttttttcctttggccataaatgtgtaattgtcattaaaattctaaggtcatttcaactgttttaagctgtatatttctttaattctgcttactatttcatggaaaaaaataaatttctcaattttaatgtaaagagttaaaaaaaaaaa

SEQ ID NO: 3590 - DNA, 782 bp, Homo Sapiens
  NM_013258
gtccaggttccgccccggagccgacttcctcctggtcggcggctgcagcggggtgagcggcggcagcggccggggatcctggagccatggggcgcgcgcgcgacgccatcctggatgcgctggagaacctgaccgccgaggagctcaagaagttcaagctgaagctgctgtcggtgccgctgcgcgagggctacgggcgcatcccgcggggcgcgctgctgtccatggacgccttggacctcaccgacaagctggtcagcttctacctggagacctacggcgccgagctcaccgctaacgtgctgcgcgacatgggcctgcaggagatggccgggcagctgcaggcggccacgcaccagggctctggagccgcgccagctgggatccaggcccctcctcagtcggcagccaagccaggcctgcactttatagaccagcaccgggctgcgcttatcgcgagggtcacaaacgttgagtggctgctggatgctctgtacgggaaggtcctgacggatgagcagtaccaggcagtgcgggccgagcccaccaacccaagcaagatgcggaagctcttcagtttcacaccagcctggaactggacctgcaaggacttgctcctccaggccctaagggagtcccagtcctacctggtggaggacctggagcggagctgaggctccttcccagcaacactccggtcagcccctggcaatcccaccaaatcatcctgaatctgatctttttatacacaatatacgaaaagccagcttgaaaaaaaaaaa

SEQ ID NO: 3591 - DNA, 2327 bp, Homo Sapiens
  NM_013263
gagaggggcatcgcgccgcccggcgcgcgccgcccccctgcctcgcggcgcggggtctcgcgggccccgctcccgccctccgctcgcctggcccggaccggaagcggcgccgcacggcctgggcctggcgcggggggcgggcaccggggcccggtcggacatgggcaagaagcacaagaagcacaagtcggacaaacacctctacgaggagtatgtagagaagcccttgaagctggtcctcaaagtaggagggaacgaagtcaccgaactctccacgggcagctcggggcacgactccagcctcttcgaagacaaaaacgatcatgacaaacacaaggacagaaagcggaaaaagagaaagaaaggagagaagcagattccaggggaagaaaaggggagaaaacggagaagagttaaggaggataaaaagaagcgagatcgagaccgggtggagaatgaggcagaaaaagatctccagtgtcacgcccctgtgagattagacttgcctcctgagaagcctctcacaagctctttagccaaacaagaagaagtagaacagacaccccttcaagaagctttgaatcaactgatgagacaattgcagagaaaagatccaagtgctttcttttcatttcctgtgactgattttattgctcctggctactccatgatcattaaacacccaatggattttagtaccatgaaagaaaagatcaagaacaatgactatcagtccatagaagaactaaaggataacttcaaactaatgtgtactaatgccatgatttacaataaaccagagaccatttattataaagctgcaaagaagctgttgcactcaggaatgaaaattcttagccaggaaagaattcagagcctgaagcagagcatagacttcatggctgacttgcagaaaactcgaaagcagaaagatggaacagacacctcacagagtggggaggacggaggctgctggcagagagagagagaggactctggagatgccgaagcacacgccttcaagagtcccagcaaagaaaataaaaagaaagacaaagatatgcttgaagataagtttaaaagcaataatttagagagagagcaggagcagcttgaccgcatcgtgaaggaatctggaggaaagctgaccaggcggcttgtgaacagtcagtgcgaatttgaaagaagaaaaccagatggaacaacgacgttgggacttctccatcctgtggatcccattgtaggagagccaggctactgccctgtgagactgggaatgacaactggaagacttcagtctggagtgaatactttgcaggggttcaaagaggataaaaggaacaaagtcactccagtgttatatttgaattatgggccctacagttcttatgcaccgcattatgactccacatttgcaaatatcagcaaggatgattctgatttaatctattcaacctatggggaagactctgatcttccaagtgatttcagcatccatgagtttttggccacgtgccaagattatccgtatgtcatggcagatagtttactggatgttttaacaaaaggagggcattccaggaccctacaagagatggagatgtcattgcctgaagatgaaggccatactaggacacttgacacagcaaaagaaatggagattacagaagtagagccaccagggcgtttggactccagtactcaagacaggctcatagcgctgaaagcagtaacaaattttggcgttccagttgaagtttttgactctgaagaagctgaaatattccagaagaaacttgatgagaccaccagattgctcagggaactccaggaagcccagaatgaacgtttgagcaccagaccccctccgaacatgatctgtctcttgggtccctcatacagagaaatgcatcttgctgaacaagtgaccaataatcttaaagaacttgcacagcaagtaactccaggtgatatcgtaagcacgtatggagttcgaaaagcaatggggatttccattccttcccccgtcatggaaaacaactttgtggatttgacagaagacactgaagaacctaaaaagacggatgttgctgagtgtggacctggtggaagttgaggctgcctggtatttgattatatattatgtacatactttttcattcttaacttagaaatgcttttcagaagatattaaatatttgtaaattgtgtttttaattaaactttggaacagcgaatttggatgttccagaggttggacttgtattaggtaataaagctggacctgggactcgtgaggaaggaatgtgaaaaaaaaaaaaaaaaaa

SEQ ID NO: 3592 - DNA, 2546 bp, Homo Sapiens
  NM_013265
ttcctttccagcctcacgcccgtgggctgcagttggaacgatggcggcggcagctgccgccgggcctagcccggggtctggacctggggactccccagaagggcccgagggggaggctccggagcgtcggcggaaggcgcacgggatgctgaagctttactacggcctctcggaaggggaggcggcgggacgccccgcggggcccgaccccctggacccgactgatctgaacggggcgcacttcgacccggaagtttacctagacaagctgcgtagagagtgccctctggcccagttgatggacagtgagacggacatggtgcggcagatccgggctctagacagcgacatgcagaccctggtctatgagaactacaacaagttcatctcagccacagacaccatccggaagatgaagaacgatttccggaagatggaggatgagatggaccggctggccaccaacatggcagtgatcaccgacttcagcgctcgcatcagcgccacgctgcaggaccgccacgagcgcatcaccaagctggcaggggtccacgcgctgctgcggaagctgcagttcctctttgagctgccctcgcgcctcaccaagtgcgtggaactgggcgcctatgggcaggcggtgcgctaccagggccgcgcgcaggccgtgctgcagcagtaccaacacctgccctcgttccgcgccatccaggacgactgccaggtcatcacggcccgcctggcccagcagctgcggcagcgctttagggagggcggctcaggcgccccggagcaggcagagtgcgtggagctgctgctggccctgggcgagcctgcggaggagctgtgcgaggagttcctggcgcacgcccgcggccggctggagaaggagctgagaaacctggaggccgagctggggccctcacctccggctcccgacgtgttagagttcaccgaccatggaggcagtggcttcgtgggcggcctctgccaggtggcggcggcctaccaggagctgtttgcggcccagggcccagcaggtgccgagaagctggcggccttcgcccggcagctgggcagccgctattttgcgctggtggagcggcggctggcgcaggagcagggtggtggtgacaactcactgctggtgcgggcgctggaccgcttccaccggcgcttgcgggctcccggggccctgctggccgctgccgggctcgcagacgctgccacggagatcgtggaacgagtggcccgcgagcgcctgggccaccacctgcagggtctccgggcggccttcctgggctgcctgacagacgtccgccaggcgctggcagcacctcgcgtggctgggaaggagggccctggcctggccgagttgctggccaatgtggccagctccatcctgagccacattaaggcctctctggcagcagtgcaccttttcaccgccaaagaggtgtccttctccaacaagccctacttccggggtgagttctgcagtcagggtgtccgtgagggcctcatcgtgggcttcgtccactctatgtgccagacggctcagagcttctgcgacagccctggggagaaggggggtgccacaccacctgccctgctcctgctgctctcccgcctctgcctggactacgagacggccaccatctcctacatcctcactctcactgatgaacagtttctggtgcaggatcagttcccagtgacgcccgtgagcacgctgtgtgcagaggccagggaaacggcgcggcggctgctgacccactacgtgaaggtgcagggcctggtcatatcacagatgctgcgcaagagcgtggagactcgcgactggctcagcactctggagccccggaatgtgcgggccgtcatgaagcgggtggtggaggataccaccgccatcgacgtgcaggtggggctcctgtacgaagagggtgttcgcaaggcccagagcagcgactccagcaagaggactttctccgtgtacagcagctctcggcagcagggccgctacgcccccagctatacccccagtgccccgatggacaccaacctcttgagcaatatccagaagctattctctgaacgtattgatgtgttcagccctgtggagttcaacaaggtgtcggtgctgaccggcatcatcaagatcagcctgaagacgctgctggagtgtgtgcggctgcgcacctttgggcgcttcgggctgcagcaggtgcaagtggactgccactttctgcagctctacctgtggcgttttgtggccgacgaagaactcgtgcacttgctgctggacgaagtggtggcctctgctgccctgcgctgcccagaccctgtgcccatggagcccagtgtggttgaggtcatctgcgagcgcggctaggcgcagccgctgccatgcaccggtctgtccctgcaccccatggcacccaggatctggtctcggtggtccttccccgcaggcaggtgtcaggaccggcctaataaacatgtgtggcctcctcaaaaaaaaaaaaaaaaaaaaaaaaaaaaaaaaaaaa

SEQ ID NO: 3593 - DNA, 5280 bp, Homo Sapiens
  NM_013269
cactcatagaaactggaggcaaaatgcatgacagtaacaatgtggagaaagacattacaccatctgaattgcctgcaaacccaggttgtctgcattcaaaagagcattctattaaagctaccttaatttggcgcttatttttcttaatcatgtttctgacaatcatagtgtgtggaatggttgctgctttaagcgcaataagagctaactgccatcaagagccatcagtatgtcttcaagctgcatgcccagaaagctggattggttttcaaagaaagtgtttctatttttctgatgacaccaagaactggacatcaagtcagaggttttgtgactcacaagatgctgatcttgctcaggttgaaagcttccaggaactgaatttcctgttgagatataaaggcccatctgatcactggattgggctgagcagagaacaaggccaaccatggaaatggataaatggtactgaatggacaagacagtttcctatcctgggagcaggagagtgtgcctatttgaatgacaaaggtgccagtagtgccaggcactacacagagaggaagtggatttgttccaaatcagatatacatgtctagatgttacagcaaagccccaactaatctttagaagcatattggaactgataactccattttaaaatgagcaaagaatttatttcttataccaacaggtatatgaaaatatgctcaatatcactaataactgggaaaatacaaatcaaaatcatagtaaaatattacctgttttcatggtgctaatattacctgttctcccactgctaatgacatacccgagactgagtaatttataaataaaagagatttaattgactcatagttccacatggctggggaggtcttgcaatcatgacagaaggcaaatgggaagcaaagtcatgtcttatgtggtggcaggcagggggacttgtgcacaggaactcctatttatacaaccatcagatatcttgagacaagaacagtatggggctccctggtgtgattccgtcctgcgcggctgttctctggagcagcattcatttatcttcgtctgccttgtctcctacctaagtgtgtgtcgccacccgatggaagattcgatggacatggacatgagccccctgaggccccagaactatcttttcagttgtgaactaaaggccgacaaagatgatcactttaaggtggataatgatgaaaatgagaccagttatctttaagaacggtcagctcaggggctggtgcaaaggatgaactgcacattgttgaagcagaggccatgaatgacgaaggcagtccaattaaagtaacactggcaactttgaaaatgtctgtacagccaacggtttctcttgggggctttgaaataacaccaccagtggacttaaggttgaagtgtggttcagggccagtgcatattagtggacagcacttagtagctgtgaaggaaggtgcagagtcagaagatgaagaagaggaggatgtgaaactcttaagtatatctggaaagcagtctgcccctggaggtgggcagaaaaaagtaaaacttgctgctgctgctgatgatgatgatgatgaagatgatgatgatgatgatgacgaggaagctgaagaaaaagcgccagtgaagaaatctatacgagatactccagccaaaaatgcacaaaagtcaaatcagaatggaaaagactcaaaaccatcatcaacaccaagatcaaaaggacaagaatccttcaaaaaacaggaaaaatctcctaaaacaccaaaaggatctagttctgtagaagacattaaagcaaaaatgcaagcaagtatagaaaaacgtggttctcttcccaaagtggaaaccaagttcatcaattatgtgaagaatttcttctggatgactgaccaagaggctattcaagatctctggcagtggaggaagtctctttaagaaaatagtttaaacaatttgttaaaaattttccatcttatttcatttctgtaacagttgatatctggctgtcctttttatagtgcagagtgagaactttccctaccatgtttgataaatgttgtccaggttctattgccaagaatgtgttgtccaaaatgcctgtttagtttttaaagatggaactccaccctttgcttggttttaagtatgtatgggatgctatgataggacatagtagtagcagtggtcagacatggaaatggtggggagacaaaagtatacacgtgaaataaaactcagtattttaataaagtaaaaaaaaaaaaaaaggtatggggaaaactgcccccataaagcaattgtctccacctggccctgccctttgcatgtggagattattacaattcaaggtgaaatttgggtggagacacaaccaaaccatatcagatggctatatcaaaaagacaagaaataacaagcattggtgagagtgtggagaagacggaacccttgtacacagttggtgggaacacagtttggtgcagccattatagaaaacgtcatggaggttcctaaagaaattaaaaagagaactaccatatgagccagcaatcccttttccagatatacacccaaaggaaatgaaatcaccacctcataaagatatctgctttcctgtttattataacacatctttattcataatagccaagatacggaactaactgaagtgaccattaacagatgaatggataaagaaattgtcatatatataaaacacacacattatatacatacatacatatatatatatatataaaaaatagaatattattcagccttgtaaaaagaaatcctgttatgttgggaacaagccccccaaaatctggccataaactcaccccaaaactggccataaacaaaatctctgcagcactgtgacatgttagtgatggccataacacccacgctggaaggttgtgggtttatgggaatgagggcaaggaacacctggcctgcccagggtggaaaaccacttaaaggcgttcttaagctacaaacaatagcatgagcgatctgtgccttaaggacatgttcctgctgcagttaactagcccaatctattcctttaattcggcccatcccttcatttcccataagggatacttttagttaatttaatatctatagaaacaatgctaatgactggcttgctgttaataaatacatgggtaaatctctgttctgggctctcagctctgaaggctgtgagacccctgatttcccacttcacacctctatatttctgtgtgtgtgtctttagttcctctggcgctgctgggttaggatctacccgactgagctggtctcagcactgttatttgaaacaatgtaaataaacctatagggtttattatatatactaagtgaaataagccagacacagaaaaaaaatgttgcatgatctcacttatagtgaaacttaaaaaaaaaacccaaatacatagaaatagagtagaatggtggttaccagagatgaggaaaatacagagacacaggtcaaaagatacagagttgcagttacaaagggtgagtatgtctagatatctaacatacagtatgaggactataatagtattgcactgtgtactgaaaacttgatgacagattttagatattcttaccacacagacaaaaagaaatgtaagtatgtgagatgaagcttatgttaattagattaagtgtatgtacataaaaacatcacattatacacatcaaatatatacaataaaaaagcacattgggagatacatgataaatttctatctgcagttgctatttgcatttttaaaggatatttttattttttaaatttttagctgacaactgtataattatggaatacaatgtgatgttctgatatatgtgtacactatggaatgattaaatcaaactaacatttcatcatctcacatacttatcattttctgtggtgagaacatttgaaatttattctcttgacaattttgaaagatccaatacactattattaactatagtcactatgctgtgcaatagatctcaaaagcttattcctcttaactgaaacctactaccctgtgacatgtggggaacatctctctattccccagccccagtccctaaatgttgaatacacaatggggaaaaaatagtcttcaatgaatggtggtgggaaaattgtatatccacatgcagaagaataaaattggacccttacctcctaccatatataaaaaccaactgaaaatcgattaaagacttaaactgtaaaactactaaaagaaaatatagggagaaagcttcacaacgttggtctgggcaataatttttggatttgacctcaaaagtagatgcaaccacagtgaaaataaacaaatgaaattgcataaaataaaaaatgtttctgcacagcaaaggaaataattaatggagtaaagagacaacttacagattgggagaatatatttccaaactattgttggggctcagaaacggataccctaacatatagtgatttgacaggtggaactaaagaagactcgaggtctctctgacctcctcctcaacctctgtttcttaatcctctgttttcccagagcacaggaggaagttctctgaagttcctttatctgctttaagttcagactcaccaaataagaaaacagttaattctggtgccttccatgggttttcattaactgaagtcatattgtaggaaaaagaatgaagtctcttaacccacctggatagatttttctcacaaaccattgtcttctctgcaagcccagtagactttgtcccaggccatttatgtgatcttcaccccattaagttctccccaaattatttactcttcccccaaaatcacccacacttccccatctccctctcccctaaggacaagggtatatcaccatctataccccattgcttggtggggtgatcactctgattctctgcatgcatttttatagatttgtttgccatttatcctattaatctgcattctgtcaattgtggcaagttatcagcatattttttaacttttaattattcttaatggaaagacacttctgtatacactggaaatctcaggaaatttcttttttccttaagcttaattgaaatgtttacttttcagtaaaatttcaagcttgagtaatgttcatgcctgcttttcattgaaatagaatgaaaaggttgcacaatattattttcatgaaattacttctagtataattctgaataaacactttgaaaggcagtgaactgtaaata

SEQ ID NO: 3594 - DNA, 5106 bp, Homo Sapiens
  NM_013272
gcgatcgcggcggcggcggcggcggcgaggagctgtgccttccacctctccagccccggcaggacgggggcggccgccgcgaacccggggcggggacagcacgcagcctcgaggcgcgcacccccgcccggcagcggccccgacacccggggcgagcgggaaagcggcagcggcggcggcggcggcggcggcgggggaaggatgcaggggaagaagccgggcggttcgtcgggcggcggccggagcggcgagctgcagggggacgaggcgcagaggaacaagaaaaagaaaaagaaggtgtcctgcttttccaacatcaagatcttcctggtgtccgagtgcgccctgatgctggcgcagggcacggtgggcgcctacctggtgagcgtcctgaccaccctggagcgtaggttcaacctgcagagcgctgacgtgggtgtgatcgctagcagcttcgagatcgggaacctggcgctcatcctcttcgtgagctacttcggggcacgcgggcaccggccgcgcctgatcggctgcggcggcatcgtcatggcgctgggcgcgctgctgtcggcgctgcccgagttcctgacccaccagtacaagtacgaggcgggcgagatccgctggggcgccgagggccgcgacgtctgcgcagccaacggctcgggcggcgacgaggggcccgaccccgacctcatctgccgcaaccggacggctaccaacatgatgtacttgctgctcattggggcccaggtgctcctgggcatcggtgctacccctgtgcagcccctgggcgtctcctacatcgacgaccacgtgcggaggaaggactcctcgctctatataggaatcctgttcacgatgctggtatttggaccagcctgcgggtttatcctgggctctttctgtaccaaaatctacgtggatgcggtcttcattgacacaagtaacctggacatcactccggacgacccccgctggatcggagcctggtggggtggctttctgctctgcggtgccttactcttcttctcttccctcttgatgtttgggtttccacagtccctgcccccgcactcagagcccgccatggaaagcgagcaggccatgctctccgaaagagaatacgagagacccaagcccagcaacggggtcctgaggcaccccctggagccagacagcagtgcctcctgtttccagcagctgagagtgatcccgaaggtcaccaagcacctgctctcaaaccctgtgttcacctgcatcatcctggccgcctgcatggagattgcagtggtggctggcttcgctgcctttttggggaagtacctggagcagcagtttaacctcaccacctcttctgccaaccagctgcttgggatgactgcgatcccgtgtgcttgtctgggtatcttcctgggaggtcttttggtgaagaagctcagcctgtctgccctgggggccattcggatggccatgctcgtcaacctggtgtccactgcttgctacgtctccttcctcttcctgggctgcgacactggccctgtggctggggttactgttccctatggaaacagcacagcacctggctcagccctggacccctactcgccctgcaataataactgtgaatgccaaaccgattccttcactccagtgtgtggggcagatggcatcacctacctgtctgcctgctttgctggctgcaacagcacgaatctcacgggctgtgcgtgcctcaccaccgtccctgctgagaacgcaaccgtggttcctggaaaatgccccagtcctgggtgccaagaggccttcctcactttcctctgtgtgatgtgtatctgcagcctgatcggtgccatggcacagacaccctcagtcatcatcctcatcaggacagtcagccctgaactcaagtcttacgctttgggagttctttttctcctccttcgtttgttgggcttcatccctccacccctcatcttcggggctggcatcgactccacctgcctgttctggagcacgttctgtggggagcaaggcgcctgcgtcctctacgacaatgtggtctaccgatacctgtatgtcagcatcgccatcgcgctcaaatccttcgccttcatcctgtacaccaccacgtggcagtgcctgaggaaaaactataaacgctacatcaaaaaccacgagggcgggctgagcaccagtgagttctttgcctctactctgaccctagacaacctggggagggaccctgtgcccgcaaaccagacacataggacaaagtttatctataacctggaagaccatgagtggtgtgaaaacatggagtccgttttatagtgactaaaggagggctgaactctgtattagtaatccaagggtcatttttttcttaaaaaaagaaaaaaaggttccaaaaaaaaccaaaactcagtacacacacacaggcacagatgcacacacacgcagacagacacaccgactttgtcctttttctcagcatcagagccagacaggattcagaataaggagagaatgacatcgtgcggcagggtcctggaggccacttgcgcggctgggccacagagtctactttgaaggcacctcatggttttcaggatgctgacagctgcaagcaacaggcactgccaaattcagggaacagtggtggccagcttggaggatggacatttctggatacacatacacatacaaaacagaaaacattttttaaaagaagtttcctaaaataaaaaaaattaaaaaaaaaaaacccacaagttgaaaacattgccagattaagcactagtgacacaccccgtgccaccctcttcctccaggtgggggtgggggcgggcgcacaagtcggaggggtggaagcaccactcctctctctgactttcgcaatatgggtcactgtgtagacgactcacccagtctgcatgtggttcaaggccccagagttctctcagtgatgctaatgggtgatccgtgctggagtttgtaattggcacctctcaccagctccatttccatgttcaagactgagggcctgagggggagccaggtggggggccagcacctcccagtggcgggcatccaccttcccccagccccacagagtgacctcaggaagcagtaggcctcgcctggctatgactgacccggctcagagctggtgagacccaacgcagtccaagtcatttgcttacatttgccaaaaacattttgccatttttaaaagaaaaaaatacaatccatatgaatttcaaactgttgtatgtataatcctctaatactatttttaactacttctaaaatctgtgttaacccttcaagtcactaacacagttctctaggccggatttattatgctggttgcttttactttttttctccttttttaatgcaccaaaaatatgtgatacaagggatgcaattaacctattgtaattttcatcattttatcctcattcgaatattctacaaaaacaagaatatacaatgtgttacaagaagaaaaaaaaatgcttcaaaaagagagtgtatatgcagcctgcctttaaaagaatcacatttgagacaacaggggataatgtgatgaattgcaaatttgccttttagcttccttccccatgattcagtgatcactgtcacgggaaacccttttatattcatgcttgacattccaagaggcgttcttttcagcctgtggaggagacactcttagatgtgggtttgtgtgtatgggtgcaacacttccggggataggaaagaagaacagttccctaacacaagctgttaagaagtctgtagcatctctgataacgaatagacccacaagctcctggaagctgtcgtgtgtccaatgcgtgaaaatgtctgtgacattttcagtgttagtcttgaactaaggcccttgtctgtgtgttttgaaggtgggtgaacctcagagaatgaacctgttatgatttggggtaagaatcacgttggaaaacctctcgcaaccagcacactaggccttctacggccatttctgtaaggggacagagcttaggtaaaggcacacactcatacacacacaacaaagggccctgctaacttactcctcatgctgcttcagtgacctttgttcatgtcacattcctggcgctggaaaaaaaactcaaaggttgattggtttgctttttcaccttggacacatttgcattttacccacaaggcaaacaaaagaatcaggaagtaaaaaatggttgggagtgggacaggtatggtaccgaatttttaatgaacattgtaaatgaagaggcttgaatgacagcccaaatctagagaaggcactcagcaagaccaaccaaaagaaaagctgtgtcgtggtatggggccaccgtgatcagctacctggggcaggatgcttctgagacaggcctttcaactgcttagtgttagtatgtccttgcttatgaaaatggggacactcatcagtacgttaactactaaaggggagatggttctccaaccacttcataaaatatgtatgttctgttgttcctaaggctttgataatatcctgtacagattttggtttagttttgcaaatatattgctaataggtcactcttatagattattgcttggcccttcaaactcagtacacacacactgaggccctttgacctagtgttttatggaactatttgctttgagagaaaaaaaaaagaaagttttttaaactctttgcattttggattttttttcctaagattttaggatgaatgtgaaaaagatgttagaataacaggaagacaactccagggctgagttttatcagcaattgggtataaatttaaagaccgctgttgcaggatggctctgaattctgttgtgtcgtcttttaaaattttaattattctcatatagtaccgaacagaaaactcagtctagttttaatttgccttttgtgctctaaagaagcattgtacatacaacactagatccagcccctcgattatctgtttggtttcaagtgaatgaaaagatttcctggtaagatcattggatttacagaatacaaaaatgtacgggatggaataaacctagaaagtgaatgct

SEQ ID NO: 3595 - DNA, 3838 bp, Homo Sapiens
  NM_013276
gattggcaggcgactccccgcccctgccccgcccccctgggcgaagagcgcggacttgtggggccgctggctgcagactggagctgcgcgggtcagggagataatggctgcgcggccgatcaccctcggcattgacctgggcaccacatctgtgaaggcagctctgctgagggccgcgcccgacgacccatccgggttcgcagtgctggcgagctgtgcccgtgctgcgcgggcagaggcggcggtcgagagcgcggtggccgggccccaggggcgggagcaggatgtgagtagaatcctccaagccctacacgagtgccttgctgcccttccccgaccccagctccggagcgtcgtgggcatcggggtgtcgggccagatgcatggagtcgtgttttggaaaacaggccaaggctgtgaatggacagagggagggattaccccggtgttcgagccccgagctgttagccacctggtcacgtggcaggatggccgatgtagcagcgaattcctggcctctctgccccagccgaagtctcatctcagtgtggccacgggcttcggctgtgcaaccatcttctggcttttgaaatatcgcccagagttcctgaagtcctacgacgcagccggtaccatccacgactatgtggttgccatgctgtgtggcttgccaagacctctgatgtccgaccagaatgctgccagctggggctatttcaacacgcagagccaaagctggaacgtagagacactgaggagctcgggttttcctgtccacctgctcccagacatcgccgagcctggcagtgtggcgggcagaacttcccacatgtggtttgaaatcccaaaggggacgcaggtgggagtggccttgggtgatttacaggcctctgtctattcctgcatggcccagaggacagatgcagttctcaacatcagcacctcggttcagctggcagcctccatgccttcaggattccagcctgcacagactccagaccctacggccccagtcgcctacttcccatacttcaacaggacctacctgggggtggccgcgtcactcaacgggggcaatgtgctggccacgttcgtccacatgctggttcagtggatggcagatctaggcctggaggttgaagaatccactgtgtattcacgcatgattcaggcagctgtgcagcagagagatacccacctgaccatcaccccgacagtgctgggggagaggcacctgccggaccagctggcctcagtgaccagaatctcctcctccgacctctccctggggcacgtgacccgggctctgtgccgaggcattgttcagaacctgcactccatgcttccgattcagcagctccaggagtggggcgtggagagggtgatgggcagtgggagtgcgctgtccaggaatgacgtgctgaagcaggaggtgcagagggctttccctttgcccatgtcctttgggcaggatgtggatgcagctgtcggggcagctctggtcatgctccggagacacctcaaccagaaggaatcttagacagcaaactctttcgccaaacgactgctgtgaattttacctgattaacattcctgacaccatctgtgggtcatcctttccctggaccgttcagtggacagctttcaagcagtgcttgttgtgaggtcccatctcggccaagaacttaccttcagaacatactctaataatgcagccaggagccgtcagccagatcccaaatgagtgccttccgaaattgacccacctgggagctatttacaaatgtccatgtgggagagagagagcatgagagcacagtagcccagcctgctggtcagcaggctcatctgtggttcacctgtagacagagagcagatcaatgtgtacttcagacaccagaaagtctggtggctttggtcccaagtgggaaaagagaactgccccatgcccagcttgtgattatcgtttttggagacctgaagcccacactcgggtcgtatggacttctggaaaagttcttgtctcctggactgaaccatgtgaccggaggcccctttcctagtctcatcctcccctggctgcagatgcttagctgggccagggattgacccaagcgcgatgcagcaggcaggctcagaagacgatgcggggctgtgtgccggccttcttgctgcatgtactcagcctcaggagagcttgctgcacccaggccgcccaggtcttcacagcacaactgcctggaaggcaggttgcgagaaggagaggcggatggcatgagcagcaagggggaccgatgctgtgcagctcacaccactccagaacctgacaaggcaccagcaggaccccttgccaggagcatgtctgtgcagcagtgtttttgcccctgcacattccagaagccctcatgggaagggatgcagccaggcagactcctgccagatggggcaggtagtttattcaaagagaactctgtatcccataggcccaggctctcctttcgcttggcgtgggctttgctggcccagtgtgtgctcctggctcagcagaaacatccatttgagttggcatccctgtagggatcccagagcgttgtaagccttcttgtgattggtagggatggctgtggggtggcttccaggagggggccaccattgccgcatctacttctagactcccaaaggagcccaggctcaggcaggcctggcccagagtcacgctggcaaccacgagtttgggaagcagtcgtattctctctctctctctctctctctctctcagtatccatgacaggtatgaaacatattgtctctttataaatgtcattttacaaattatgtgattatctggaagctctaagatgagagcaaatgcctgatcactctggccaaatgtcagatactaaagcccattcttggccgggcatgttggctcccgcctgtaatcccagcactttgggaagcccaagtgggtgaatcacctgaggtcaggagttcaagaccagcctgaccaacatggggataccccgtctctactaaaaatacaagccgggcgtggtggcgcatgcctgtaatcccagctactcaggaggctgaggcaggaaaatcacttgaactcgggaggcagaggttgcagtgagctgagatcgcgccattgcactccagcctgggtgacagagcaagactctgtctcataaataaatacaaagcccattcttccagagtcttgtgccttaaataaaacacacctctctgctgtgggaagactgtgcaatggcacagccgcagagcttggtttgggaggttgaagtgctctggggagaattcgtagatcatcctcagaaaagccttgccctggtgttctaccagaaaaacgtctcccaatcacccaggaaagctgtccacagtagtccccccttatccacggtgtcactttccatgggttcagttatctgcggtcaaccacggtctgacaatattaaatggaaaattcttcaaacagttcccaagttttcccttgtgcattgttctgagcagtgtgatggagagtctctgccgtgccatctgggatgcaaaccgtccctgtgttccccacgtccaggccgtagatgctccccgccggtcagtcacttagtcgtcagatcgcccgtcctggtatcacagtgcttctgttcaggtcagtctttttttacttcattagggccccaaagcaccagagtagtgatgctggtagtgatgctggctgttcggatatgccaaagagaaaccgtaaggtgcttcctttaagtgaaaagatgggaagaaaacagtcatatgctgaatcttctatctgtgaaattct

SEQ ID NO: 3596 - DNA, 2651 bp, Homo Sapiens
  NM_013284
acccgcttccgtcagcctcactggggcttccttccgtctcgctcggagtttccctctgcgttcgctccgcgctgctggaggctgtcgtcccaatgctccccaaacggcggcgagcgcgggtcgggtcccctagcggcgatgccgcttcctccacgccgccctcgacgcgcttcccgggagtcgccatctacctggtcgagcctcgcatgggtcgcagccgccgggccttcctcacaggcctggcgcgctccaaaggcttccgcgtccttgacgcctgcagctccgaagcgacacatgttgtgatggaagagacctcagcagaggaggccgtcagctggcaggagcgcaggatggcagctgctcccccgggttgcacccccccagctctgctggacataagctggttaacagagagcctgggagctgggcagcctgtacctgtggagtgccggcaccgcctggaggtggctgggccaaggaaggggcctctgagcccagcatggatgcctgcctatgcctgccagcgccctacgcccctcacacaccacaacactggcctctccgaggctctggagatactggccgaggcagcaggctttgaaggcagtgagggccgcctcctcaccttctgcagagcagcctcggtgctcaaggcccttcccagccctgtcacaaccctgagccagctgcaggggcttccccactttggagaacactcctctagggttgtccaggagctgctggagcatggagtgtgtgaggaggtggagagagttcggcgctcagagaggtaccagaccatgaagctcttcacccagatcttcggggtcggtgtgaagactgctgaccggtggtaccgggaaggactgcgaaccttagatgacctccgagagcagccccagaaactaacccaacagcagaaagcggggctccagcaccaccaggacctgagcaccccagtcctgcggtccgatgtagatgccctgcagcaggtggtggaggaagctgtggggcaggccctgcctggggccaccgtcacgctgaccggcggcttccgcagggggaagttgcagggccatgacgtggacttcctcatcacccaccccaaggagggtcaggaggcggggctgctgcctagagtgatgtgccgcctgcaggaccagggcctcatcctgtaccaccagcaccagcacagctgctgtgagtcccctacccgcctggcccaacagagccacatggacgcttttgagagaagtttctgcattttccgcctaccacaacctccaggggctgctgtggggggatccacgaggccctgcccatcctggaaggccgtgagagtggacttggtagttgcacccgtcagccagttccctttcgccctgctcggttggactggctccaagcttttccagcgggagctgcgccgcttcagccggaaggagaagggcctgtggctgaacagccatgggctgtttgacccggagcagaagacatttttccaagcggcttcagaggaagacatcttcagacacctgggccttgagtaccttcctccagagcagagaaacgcctgagcctgcctgtgtcccccacttccactcaggaaattgggctgcccccaacctggccactgaatgtctccaggcagatatgctgccccctgacccccaccttcacccctccccgccaaggcctggctcttccggaggtcaattgtgcctgcaggatcagttgagcccctgctggtgtgctgcagggtgtgatgaggtgggagccctcagtgccagcctcatcactgtgtgaccctgggtctgctcttagcctccccatggctcacgttcctgccctggatgggatgtgagtggggcccacatcgtggagctgtggtggggcctgcagtcatgaatggcaagtggtccctgatgtgcagtgtctcattagttgcactgcagttaactgtggctcctgcagggcaccctgcccagaatgcccagaagagaaccatgcatacctgcactgcatttgagagccatgagctggaggctgtggttcgtgccagcaaggagcctactgtctggtgtgctgtaggcatctggagagggagagggcctgggtaggagctgggaggaagataattttcaactatggggcttcagtactgcagcgccccgagccaggctctgtgcttctgcctttaaggcctgttctcagcacaatgtctcaaaaataggtcatatcctgccactcccgtcgcagagccctttaatggttccaaaccctaagtccacacatagcccctggctctggcatctctccagccccactggccccgagctgcttgactcaccggcttcctatttgatgcacccaggcccccttgtggccaactccctccccttctcactgaggcagaagcactgaggtgggctggacatgggtgccctccacgtccctcatatccccaggcacactctggcctcaggttttgccctggccatgtcatctacctggagtgggccctccccttcttcaggccttgaatcaaaagccactttgttaggcgaggatttcccagaccactcatcacattaaaaaatattttgaaaacatgcagtaaaaaaaaaaaaaaaaaaaaaaaaaaaaaaaaa

SEQ ID NO: 3597 - DNA, 2419 bp, Homo Sapiens
  NM_013285
agtcgctctgaggccgagagggacgcgagcggaagtgacgtacgtcgtgcacacgtggtccggcgtggttcaggcgggtgtcttcggccgggcttgggaacataaaagtttgtttcaccacgtaagccggacctcgcactccggtcccggtctcgtcgccaagatggtgaagcccaagtacaaaggacggagcaccatcaacccgtccaaggccagcacaaacccagatcgagtgcagggagcaggaggccaaaacatgagggaccgggccaccatccggcgcctgaatatgtataggcaaaaggagcgcaggaacagtcgtggtaaaataattaaacccctgcaatatcaatcaacggtggcttctggcacagtggcaagagtagagccaaatattaaatggtttggaaacacacgtgtgattaagcagtcatcattacaaaaatttcaagaggaaatggatacagttatgaaggatccatacaaagttgtcatgaagcaaagcaagttaccaatgtctcttctccatgatcgaatccggcctcataacttgaaggtgcacattcttgatactgaaagttttgaaactacatttggccctaagtcacagaggaaacgaccaaacttatttgcaagtgatatgcagtctcttatcgaaaatgctgaaatgtccactgagagctatgaccagggcaaggatcgtgatttggtaactgaagacactggtgtgagaaatgaagctcaagaagagatctataaaaagggacagtccaaaagaatatggggtgagctctacaaggtgatagattcatcagatgttgtagttcaagttcttgatgctagagatccaatgggtactcgttcccctcacattgaaacttacctgaagaaggaaaaaccttggaaacacctcatttttgtacttaacaaatgtgaccttgttccaacctgggcaacaaaacggtgggttgctgtcctctcccaggattatccaacacttgctttccatgcaagccttactaacccgtttggcaagggagcattcattcagcttctgcggcagtttggaaagttgcacactgacaagaaacagatcagtgttgggttcattggctatccaaatgttggcaagagctctgtgataaatacattgcgttctaagaaagtttgcaacgtggctcccattgcaggtgaaacaaaggtctggcagtatattactttgatgcgtcggatattcctgattgactgtccaggtgtggtttacccctctgaggactccgagacagacattgtgctaaaaggagttgttcaagtagaaaaaattaagagtcctgaagaccacattggtgctgtacttgaacgagcaaagccagaatatatcagcaaaacatacaagattgattcttgggagaatgctgaggactttcttgagaagctcgctttccggactgggaagttactaaagggtggagagcccgacttgcagactgtgggtaagatggtcctcaatgactggcagaggggccggattcctttctttgtcaagccacccaatgcagagccacttgtggccccccagcttctaccctcctcatctttggaagttgtcccagaagcagcccagaacaatccaggggaggaagtcacagaaactgcaggtgaagggtcagaatccatcattaaggaagaaacagaagagaacagtcactgtgatgctaacacagagatgcagcagattctcacacgagttcggcagaactttggtaaaatcaacgtggtgcctcagttttctggggatgacctggttcctgtggaggtgtcagatcttgaggaagagcttgagagcttttctgatgaagaggaggaggaacaggagcaacaaagagatgatgcggaagagtcttcctcggagcctgaggaggaaaatgtgggaaacgacaccaaagccgttattaaagcactggatgagaagattgccaaatatcagaagtttctagacaaagccaaagccaaaaagttttcagcagtcagaatatccaagggactgagtgaaaagatatttgcaaaacctgaagaacaaagaaaaacactggaagaagatgtagatgacagagcaccttccaaaaagggaaagaagcggaaggcacaaagggaagaggaacaggaacattcaaataaagctcccagggcgcttacatcaaaagaacggaggcgagcagtacgacagcaacggccgaaaaaagttggtgtgcgctactatgaaacacacaacgtgaaaaataggaacaggaacaaaaagaagaccaatgactcagagggacagaaacacaaacgcaaaaaattcagacaaaagcagtaatgtttaaaaggtttttattaaattatacaaaaacaggcagttaaaaaaaaaaaaaaaaaa

SEQ ID NO: 3598 - DNA, 6650 bp, Homo Sapiens
  NM_013286
gccccgccgccaccgccgcgccgagtccttttgtccaagatggcggcgccgggggcgctgcctcctcggccgccgcctccgccgccgccgctgtgagaaacctacgggccgcccgcccgccgcgccagcgccatgaagcggcagagcgagcgagactctagcccgagcgggcgcggctcgtcatcgtccgccaagcgtccgcgggagcgcgaacgggaggcggaggcgggcgggcggcgggcggcgcacaaggcctctggcggcgccaagcacccggttccagcgcgggcccgcgacaaaccccgcggcagcggaagcggcgggggcgggcatcgcgacggccgcggcaccggggacgcgaatcaccgcgcgagtagcgggcgctcctcgggctccggcgctggcggcgggggacgcggcggcaaggcctcgggggacccgggcgcctccggcatgtcgccccgcgcgtctcctctgccgccgcctccgccaccgcctggggccgagcccgcgtgtcccggctcatccgcggccgcgcctgagtacaagacgttgctcatcagcagcttgagccccgcgctgcccgccgagcacctcgaggaccggctcttccaccagttcaagcgcttcggcgagatcagcctccgcctgtcgcacacgcctgagctgggccgtgtggcctacgtgaatttccggcacccacaggacgcacgcgaggcccgccagcacgccctggcccggcagctgctgctctacgaccgcccgctcaaggtagagcccgtgtacctgcgtggcggcggcgggagcagtcggcgaagtagcagcagcagcgccgccgcttccacgcctcccccagggccgcccgcgcccgccgacccgctcggctacctcccgctacacggaggctaccagtacaagcagcgctcgctgtcccccgtcgctgccccgcccctgcgggagccccgtgcccgtcacgccgccgcagccttcgccctggatgccgctgctgccgccgccgtgggactgtcccgggagcgggccctggactactacgggctgtacgacgaccgtgggcgcccctatggctacccagctgtgtgtgaggaggacctgatgcccgaggatgaccagcgggccacgcgcaacctcttcattggtaacctggaccacagcgtatctgaggtggagctgcgaagggccttcgagaaatatggcatcatcgaggaggtggtcatcaagaggcctgcccgtggccagggcggtgcctatgccttcctcaagttccagaacctggacatggcccatagggctaaggtggccatgtcgggccgagtgattggtcgcaaccccattaagataggctatggcaaggccaaccccaccactcgtctctgggtgggtggcctgggacctaacacgtcactggcggctctggcccgagagtttgaccgctttgggagcattcggaccattgatcacgtcaaaggagatagctttgcctatattcagtacgagagcttggacgcagcccaggccgcctgtgctaaaatgaggggttttcccttgggtggaccagaccgcaggctccgcgtggattttgccaaagcagaggagactcggtacccccagcagtaccagccctcgccactccctgtgcattatgagctgctcacagatggatacacccggcaccgcaacctggacgccgacctggtgcgggacaggacgcccccacaccttctgtactcagaccgagaccggacttttttggaaggggactggaccagccccagtaaaagctctgaccgccgaaacagccttgagggctacagtcgctcagtgcgcagccggagtggtgagcgttggggggcagatggagaccgtggtttgcccaagccctgggaagagaggcggaaacggagaagcctttccagtgaccgtgggaggacaacccattcaccatatgaggaacggagtaggaccaagggcagtgggcagcagtcagagcggggctccgaccgcacccctgagcgcagccgcaaggagaaccactccagtgaagggaccaaggagtccagcagcaactccctcagcaacagcagacatggggctgaggaacggggccaccaccaccaccaccacgaggctgcagactcttcccacgggaagaaggcaagagacagcgagcgcaatcaccggaccacagaggccgagcccaagcctctggaagagccaaaacacgagaccaaaaagctgaagaatctttcagagtacgctcagacactacagctgggttggaatgggcttctggtgttgaaaaacagctgcttccccacgtctatgcatatcctagagggggaccagggggtgatcagcagtctcctcaaagaccacacttctgggagcaagctgacccagctgaagatcgcccagcgccttcgactggaccagcccaagcttgacgaggtcacacgacgcatcaagcaggggagccccaacggctatgcggtcctcttagccacccaggcaacccccagtgggcttggcactgaggggatgcccacagtagagcccggtctgcagaggcggcttctcaggaacctggtctcctacttgaaacagaagcaggccgcaggggtgatcagcttgccagtgggggggtccaagggcagagacggcacaggcatgctctacgccttcccaccctgcgacttttcccagcagtacctccagtcagcactaaggacattgggcaagctagaagaagaacacatggtgatagtcatcgtcagagacactgcctagcccaagcctgtctttcccagcgtcatgtttgtgtcacaaaagcagttattttaaaatctgatcccctctctaccctaccactttggtttgaattatctcctgggttattttggttcatttgggtggggatcaaagtcctgtccaccaccaaaactaagttcttagattttgggggatttttttttttaaacgatgagaagggaatccggttatgttgatttctagtgtacaagatactgtctgctgtggttctgtatttttttattttttgaccaactgtatggaaagttgtcagtaaaacctttgacagaggatggatttttaaacctgttcagagtcctggtttaatcaatcaagctaaaagaatcgaagacatccctagtgcatgtacacgaatgccctacgtcatccttccagcaccactgctgcatgggtcactctcggcctctcaattcttcaggctcagtctggactctacttacactcatttttatcttggctgacagcaggcaagcttcagtttgggctgtggacgctgccacacaagcctgagtagagcccatgcaaaggaagggatggggtgagcgcaaggcctgtggtcagcagctactgatggttttttctgccttaaaccgtgtgtgtgtccatcatcatcagtttgagctgtggctgtttgtttgggacagagtgcccactcagcatgtttggcagcaggtagccttcagcagctgtgtagtcttgtacaaggagaagctgtgcactgttgatgccagggggtctcggggcccctgatctgtccaggctcctggttcggcctactttctagcctcactcagcccagggatagccagtgttgggagacagagttgcctcaggttcccaggggcccgggagtccaaatactggaatggagggttggaggcagccttccttggatttactcatgaactttgcctagttgtttgtgatttttggctttctctggtcgttcaggggtgatgggtaatagagcaggcccgtgtccagtcatacctagagatttgtggggggatactgaacctctagactgaagtacttaccggggagcacagtggactaggggatgcccttgataatgacggtttcctaggtgcaagatcagagcatgtgcctacaccttgtgccctgatgccgaggtggagaccattgggaaataattaatagatatttttctggggggaaatcacaagtcactgaggtgtttgtttgtttgttaggcagtgctagagcttgaagccactcaagccagttggggaggaaagggatgcggaggtaccctctagctgggaagaagggtgagattccgtcttcttccctgtctcaagtaagtaaggaaggtactgcggacagtgtgggccagggaggaaaaccagagcacacagttttgtcaccatggaacaccccaaatgccattcttcagcgtgtctggtaccttggatgttcaaacagggaacactgtcagggctgaggagaacagaagctctggtaagcgaatgagcccctagatgataaccaggaactccaggttctgctggccgtggcatcctctctccaggtctgctcccttaccggagctaggataaggtagcatgagtgacacctgagattagaggctggggctcactgcaggctgtggagaggtcatgctggtccacaggaacacttggcagtgctctcgtagacccctcggtgatgtggaatggacaggtgcctcgcaagagagcaagcacgttcataacaaaacagcaacacaaagacatgttaagcatgtttatttatttgcctgtttttgtttttttacttgagctgtggtcacagctgccaggtacctaagcaagtcagttgggtacagcaggacacgccaccattccagggtagctggtaccgccagaaacaggagtgggtcttgtcctgttgcaggcacactgcagtggttttcctgcagctctccaacaaacgcctgagtcacaggccagagctgccttggtatgttgttaagtccaaaacttcttctctgggctacctatcttccttcatgaagcaggtgctcaggacccggaagaatcatctacctcccagctttgtgagacagaaccaagtaaaaggaaacatgctagaaaacgtgcctagagaagacacttcaacctttgccttatccaacccctcttcagagaaaggtgtcccatggccccaaaaagaactgccaagttttggtgaggagtaacaccctggcatgacattccttctctttcctggccctcaaccacttccttcctttggctcttaagacctagcaggttctgtgaactctcaggccttggccagcactagttaggggaggtcaggtggtcaatgtcctggtgattttatgagactgccccactgagaaaacttacttacttcaggcatccagtgcccccacccagggttcaggccctgtctaaggtgttgcttaaagacaaaaaggcaacatgtgcctcactggtggtgtgccactgttctcatgctgcctcctaagtgactccgattttcagccctggtagaataaggaagacagctgatgcctccttagccccttagcacatgttcctaaggtgtgttgtcaagccaacctgaattctgcctccctgttatagtccctgtctcccccacagagacctgtgggtgctcccagcagagttgagactggctccgttgagttaatgactagaatatagtgctttcactacttgattgttaacctgttttcttctgatgccatcagtaccagcagtcagactattccactggttaagtgtttactaccattaaagcgaggcatgaagcaaagagctgagtgagtcctctgctctccagaggaccaagaaatacctgtgtgacacagacccacttcagtgtgtacagcaaattctatagtgcttctgagcccagcagggctttacctgcccctggagagttttagccgtcttgtgtttcttgtttacttcacaaccaaatttgtcccctcttctctctgttaagggagagaagtcactttagctggataatacctatgtaacaaactgagcagctgttatttgggcaaaatcaaaggaagaaagagactatggtcttctatttattgtgggaaggaaaacagggtggggcgggtgagtgaaaaggtggaaatccctggtaccttgcctggtggttacacagtttaaccataggccaattttaggggcctctgaagtatctttctacaaacgcagacaagctccactacccctaacctgccaggatgctcaagtccactgtcacaatccctttcagaaaacattagtggccgctgccccagctacagagacggccgaaatgctttcactccttagctttgccaactccatcctccaaaacttcccagaatacctccctttccagttctaccaaatctgtacttgggagcagcctgctggatccagaacatgacaacagagagctgcgtccacagggaacaaagccctgacctctctctccacattacccttacaaaaacaggccctccccatgagagagctacacggcaggggcagacactgtgagtataagctactttcctccctggagtgctctatgtgggcagaacatgctctccttgcctctcctggaaggtgtcttctctatggcctggctagagctgcaaaaaagggacacaccccacttcggtaaaagaaaatagggaaaggccataaacaaagacagacttgtagtttattttgtattttttttaaataaatacactttacattaaagaaaaaaaaaaaaaa

SEQ ID NO: 3599 - DNA, 1986 bp, Homo Sapiens
  NM_013289
ataacatcctgtgcgctgctgagctgagctggggcgcagccgcctgtctgcaccggcagcaccatgtcgctcatggtcgtcagcatggcgtgtgttgggttgttcttggtccagagggccggtccacacatgggtggtcaggacaaacccttcctgtctgcctggcccagcgctgtggtgcctcgaggaggacacgtgactcttcggtgtcactatcgtcataggtttaacaatttcatgctatacaaagaagacagaatccacattcccatcttccatggcagaatattccaggagagcttcaacatgagccctgtgaccacagcacatgcagggaactacacatgtcggggttcacacccacactcccccactgggtggtcggcacccagcaaccccgtggtgatcatggtcacaggaaaccacagaaaaccttccctcctggcccacccaggtcccctggtgaaatcaggagagagagtcatcctgcaatgttggtcagatatcatgtttgagcacttctttctgcacaaagaggggatctctaaggacccctcacgcctcgttggacagatccatgatggggtctccaaggccaatttctccatcggtcccatgatgcttgcccttgcagggacctacagatgctacggttctgttactcacaccccctatcagttgtcagctcccagtgatcccctggacatcgtggtcacaggtccatatgagaaaccttctctctcagcccagccgggccccaaggttcaggcaggagagagcgtgaccttgtcctgtagctcccggagctcctatgacatgtaccatctatccagggaggggggagcccatgaacgtaggctccctgcagtgcgcaaggtcaacagaacattccaggcagatttccctctgggccctgccacccacggagggacctacagatgcttcggctctttccgtcactctccctacgagtggtcagacccgagtgacccactgcttgtttctgtcacaggaaacccttcaagtagttggccttcacccacagaaccaagctccaaatctggtaaccccagacacctgcacattctgattgggacctcagtggtcatcatcctcttcatcctcctcctcttctttctccttcatctctggtgctccaacaaaaaaaatgctgctgtaatggaccaagagcctgcagggaacagaacagccaacagcgaggactctgatgaacaagaccctgaggaggtgacatacgcacagttggatcactgcgttttcacacagagaaaaatcactcgcccttctcagaggcccaagacaccccctacagataccatcttgtacacggaacttccaaatgctaagcccagatccaaagttgtctcctgcccatgagcaccacagtcaggccttgaggacgtcttctagggagacaacagccctgtctcaaaaccgagttgccagctcccatgtaccagcagctggaatctgaaggcgtgagtcttcatcttagggcatcgctcctcctcacgccacaaatctggtgcctctctcttgcttacaaatgtctaggtccccactgcctgctggaaagaaaacacactcctttgcttagcccacagttctccatttcacttgacccctgcccacctctccaacctaactggcttacttcctagtctacttgaggctgcaatcacactgaggaactcacaattccaaacatacaagaggctccctcttgacgtggcacttacccacgtgctgttccaccttccctcatgctgtttcacctttcttcggactattttccagccttctgtcagcagtgaaacttataaaattttttgtgatttcaatgtagctgtctcctcttcaaataaacatgtctgccctcaaaaaaaaaaaaaaaaaaaaaaaaaaaaaaaaaaaaaaaaaaaaaaaaaaaaaaaaaaaaaaaaaaaaaaaaaaaaaaaaaaaaaa

SEQ ID NO: 3600 - DNA, 4494 bp, Homo Sapiens
  NM_013291
ggcccggccggactgagttcgctgctgtcccggttcctctcgagtcggctccaactgccagcccgggttggcgccatgtacgccgtgtacaaacaggcgcatccgcccaccggtctggagttctccatgtactgcaacttcttcaacaacagcgagcgcaacctggtagtggccgggacctcgcagctctacgtgtaccgcctcaaccgcgacgccgaggctctgaccaagaatgacaggagcacagaggggaaggcccaccgggagaagctcgagcttgctgcctccttctccttctttggcaacgtcatgtccatggccagcgtgcagctggcaggagccaagcgggatgccctgctcctaagcttcaaggatgccaagctgtctgtggtggagtacgacccgggcacccatgacctgaagaccctgtcactgcactactttgaggagcctgagcttcgggacgggtttgtgcagaatgtacacacgccgcgagtgcgggtggaccccgacgggcgctgtgcagccatgcttgtctacggcacgcggctggtggtcctgcccttccgcagggagagcctggctgaggagcacgaggggctcgtgggtgaggggcagaggtccagcttcctgcccagctacatcatcgacgtgcgggccctagacgagaagctgctcaacatcatcgacctgcagttcctgcatggctactacgagcctaccctcctcatcctgtttgagcccaaccagacctggcctgggcgcgtggccgtgcggcaggacacgtgctccattgtggccatctcactgaacatcacgcagaaggtgcaccccgtcatctggtccctcaccagcctgccctttgactgcacccaggctctggctgtgcccaagcccataggtggggtggtggtgtttgccgtcaactcgctgttgtacctgaaccagagcgtccccccgtatggcgtggctctcaacagcctcaccacaggaaccacggctttcccgcttcgcacccaggagggtgtgcggatcaccctggactgcgcccaggccaccttcatctcctacgacaagatggtcatctccctcaagggcggcgagatctacgtgctgaccctcatcaccgacggcatgcgcagtgtccgagcgttccactttgacaaggcggccgccagcgtcctcaccaccagcatggtcaccatggagcccgggtacctgttcctgggttctcgcctgggcaattccctcctcctcaagtacacggagaagctgcaggagcccccggccagtgctgtccgtgaggctgccgacaaggaagagcctccctcaaagaagaagcgagtggatgcgacggccggctggtcagctgcgggtaagtcggtgccgcaggatgaggtggacgagattgaagtgtacggcagcgaggcccagtcgggaacacagctggccacctactcctttgaggtgtgtgacagcatcctgaacattggaccctgtgccaatgccgccgtgggcgagcctgccttcctctctgaagagtttcagaacagccccgagccggacctggagattgtggtttgctccggccacgggaagaacggggctttgtcggtgctgcagaagagcatccggccccaggtggtgacaacctttgagcttcccggctgctatgacatgtggacagtcatcgccccggtgcgtaaggaggaggaggacaatcccaagggggagggcacagagcaggaacccagcaccacccctgaagcagacgacgacggccgcagacacggattcctgattctgagccgggaagactccaccatgatcctgcagacggggcaggagatcatggagctggacaccagtggcttcgccactcagggccccacggtctttgctgggaacatcggggacaaccgctacattgtccaagtgtcaccactgggcatccgcctgctggaaggagtgaatcagctgcacttcatccccgtggacctgggcgcccccatcgtgcagtgcgccgtggccgacccctatgtggtcatcatgagtgccgagggccacgtcaccatgttcctgctgaagagtgactcctacggtggccgccaccaccgcctggcgctgcacaagcccccgctgcaccatcagtccaaggtgattacgctgtgcctgtaccgagacctcagcggcatgttcaccactgagagccgcctgggtggggcccgtgacgagctcgggggccgcagtggcccggaggccgagggcctgggctcagagactagccccacagtggatgacgaggaggagatgctgtatggggattcgggctccctcttcagccccagcaaggaggaggcccgaagaagcagccagccccctgctgaccgggaccctgcacccttccgggcagagcctacccactggtgcctgctggtgcgggagaatggcaccatggagatctaccagcttcccgactggcggctggtgttcctggtgaagaacttccctgtggggcagcgggtccttgtggacagctcctttggacagcccactacacagggcgaggcccgcagggaggaggccacgcgccagggggagctgcccctcgtcaaggaggtgctgctggtggcgctgggcagccgccagagcaggccctacctgctggtgcatgtggaccaagagctgcttatctacgaggccttcccccacgactctcagctcggccagggcaatctcaaagtccgctttaagaaggtccctcacaacatcaacttccgtgagaagaagccaaagccatccaagaagaaagcagaaggtggcggcgcagaggagggggctggggcccggggccgcgtggcgcgtttccgctacttcgaggatatttatggctactcaggggtcttcatctgcggcccctcccctcactggctcttggtgaccggccgaggggctctgcggctacaccccatggccatcgacggcccggtcgactctttcgctccattccacaatgtcaactgtccccgcggcttcctgtacttcaacagacagggcgagctgaggatcagtgtcctgcctgcctacctgtcctatgatgccccatggcctgtcaggaagatcccgctgcgctgcacggcccactatgtggcttaccacgtggagtctaaggtgtatgctgtggccaccagcaccaacacgccgtgtgcccgcatcccacgcatgactggcgaggagaaggagtttgagaccatcgagagagatgagcggtacatccacccccagcaggaggccttctccatccagctcatctccccggtcagctgggaggctattcccaatgccaggatcgagctgcaggagtgggagcatgtgacctgcatgaagacagtgtctctgcgcagtgaggagaccgtgtcgggcctcaaaggctacgtggccgccgggacctgcctcatgcagggggaggaggtcacgtgccgagggcggatcttgatcatggatgtgattgaggtggtgcccgagcctggccagcccttgaccaagaacaagttcaaagtcctttacgagaaggagcagaaggggcccgtgaccgccctgtgccactgcaatggccacctggtgtcggccatcggccagaagattttcctgtggagcctgcgggccagcgagctgacgggcatggccttcatcgacacgcagctctacatacaccagatgatcagcgtcaagaacttcatcctggcagccgacgtcatgaagagcatttcgctgctgcgctaccaggaggaaagcaagacgctgagcctggtgtcgcgggatgccaagcccctggaggtgtacagcgtggacttcatggtggacaatgcccagctgggttttctggtgtctgaccgcgaccgcaacctcatggtgtacatgtacctgcccgaagccaaggagagtttcgggggcatgcgcctgctgcgtcgggcagacttccacgtgggtgcccacgtgaacacgttctggaggaccccgtgccggggggccactgaagggctcagcaaaaagtcggtcgtgtgggagaataagcacatcacgtggtttgccaccctggacggcggcatcgggctgctgctgcccatgcaggagaagacctaccggcggctgctgatgctgcagaacgcgctgaccaccatgctgccacaccacgccggcctcaacccccgcgccttccggatgctgcacgtggaccgccgcaccctccagaatgccgtgcgcaacgtgctggatggggagctgctcaaccgctacctgtacctgagcaccatggagcgcagcgagctagccaagaagatcggcaccacaccagacataatcctggacgacttgctggagacggaccgcgtcaccgcccacttctagccccgtggatgccgtcaccaccagcacacggaactacctcccaccccctttttgtacaaaacacaaggaaaaacattttttgcttga

SEQ ID NO: 3601 - DNA, 1584 bp, Homo Sapiens
  NM_013299
acaaagcggttggttgcggcagggactacaccggtgtatcatgggagcggcccgggctacacgttaaaaacactaaggggagcgcgcgaagctgaacttggcgctcgatgggggccgttagccgccctagagcgcgcggagccgcagaggcgtagctggactacaacgcagtgcatctcgggaggccaactcgactggactgggtgagaggacagaggtggctcgatgggcggcccgaaggccggggatcatggcgggaaggcgggcccagacaggttcagccccgccccgacccgccgctccccaccccccggccggcctcgcgtgccttcccgcagcactgccgtccccgggatgctgagcgcccaccgtctccccgcagccccctcatgcccggctgcgagctgcccgtgggcacctgcccggacatgtgcccggccgccgagcgcgcccagcgcgaaagggagcaccgcctgcaccgcttggaggtggtgccgggttgccgccaggacccgccccgcgcggatccgcagcgcgcggtgaaggagtacagccgacccgccgccggcaagccccggcccccgcccagccagttgcgtccgccctccgtgctgctggccaccgtgcgctacctggccggtgaggtggcggagagcgccgacatcgcccgcgccgaggtggccagcttcgtggcagaccgcttgcgagctgtgctcctggacctggcgctgcagggagcgggcgacgccgaggcagctgtggtgctggaggcggcgctggccacgctgctgaccgtagtggcgcggctcgggcccgacgcggcgcggggacccgcggacccggtgctgctgcaggcccaggtgcaggagggcttcggctcgctgcggcgctgctacgcgcggggcgccgggccgcacccccgccaacccgccttccagggcctctttctgctctataacctgggctcggtggaagccctgcatgaggttctacagctgcctgctgccctgcgcgcctgcccgcccctccgcaaggccttggcggtagatgctgccttccgagagggcaatgctgcccgcctgttccgtctgctccagaccctgccctacctgccaagttgcgctgtgcagtgccatgtgggccatgcccgccgggaagccctggcccgcttcgctcgtgcctttagcacccccaagggccagaccttgcctctgggcttcatggtcaacctcttggccctggatggactcagggaagcacgggacctgtgccaggcccacgggctgcccttggacggagaggagagagttgtgttcctgaggggtcgctacgtggaggaagggctaccgcctgccagtacgtgcaaggtgttagtggagagcaaacttcgaggacgtaccctggaggaggtggtcatggcagaggaggaagatgagggcacggacagacctgggtccccagcctgaggagggagcgtgagcctcccagagccccaggactgggccagagcacttaggtttctttttccatggtttccaggtaataaaaggaacttgttttgttggtaaaaaaaaaaaaaaaaaa

SEQ ID NO: 3602 - DNA, 1529 bp, Homo Sapiens
  NM_013300
agttgatggaaatcggccgttgggatgctgtctaagcttggatacctgagtaataacggacaacagataaagctccgcatccttgcgccacgtgcttcggtccgtggtttgcgtgcagacgtttgacctgtatggtgaccctcgcgatttgcaaatgtgctgaggatctggaatactgaagtggaaggcacctcttgttttggggagcatgtatatttccctcctgtgacgcactgcttccacagagaggtgcaaacgtgcaaacgctcagcgaccgcagcgctcctgcccctcccccaccgtaactccggggtcgcggatctgcccgccccgctctcccgaagctgttcgggcagtgtccgaacggcttcggaggggcgagaagccagcatccgagccgcctctccggaataccagcagcctgacgcacgcgtgctgtcgggggagggatgctgggacagctgctcccgcacacggctcgcggtctcggcgccgcggagatgcccggccagggtccggggtccgactggacggagcgtagctcttctgcagagccgcccgctgtggccgggaccgagggtggcggcggcggatcagctggatactcttgttaccagaattccaaaggttctgatagaatcaaagatggatacaaagtgaactcacacatagctaagctgcaagagttatggaaaactccccaaaatcaaacaatccacctctctaaatcaatgatggaggcgtcctttttcaagcatccagacctcaccacaggccagaagcgttacctgtgcagcattgctaaaatctataatgcaaactatctgaagatgttaatgaagaggcagtacatgcacgtacttcagcacagctcacaaaagccaggtgtcctcactcatcacagaagccgccttagctcccgttactcacagaaacagcattacccttgcactacatggcgacatcaactggagagagaggactcggggtcttctgatatcgcagctgcatctgcacctgaaatgctcatacagcattccctttggcggccagtgagaaacaaagaagggataaaaactggatatgcatctaaaacaagatgtaagtcactgaagatttttagaagaccaaggaaactgttcatgcaaacagtttcttcagatgattctgaatcacacatgagtgaagaaaaaaaggaagaagatttactaaataattttatgcaatcaatgtcaattgaagaacagggagaacatctgatgttaacttgacagtcttgtctcgtgtattgaattcgtgccaaaggtgagggtaaggggttgtgagttgtgtcctgtatgtttaggatggtattgttatttattaaatcattaagtaattttggtttgttcagaaacttaaaacaatgtaattggtctgatgtagttccatgtaccaatgatagttatgtaagaaaatttacatgtaacatatacttgtacttctagctagatacaattaaaacttttcttgcattcaataaaaaaaaa

SEQ ID NO: 3603 - DNA, 1993 bp, Homo Sapiens
  NM_013301
ggctggggaggagcaggaacagtcaggactggaatctagctttgctccaaagccagctcttaattaccaacatggggatgggggtggcgtgttcctggccctcattttccgggagaggggtaactcccccgattttggcccccacatccctgagaaccttggggtctggctgtaggaggtaggggagctctgaggggtccgcgctggctagttcctgagagagcgttaaaagtagattctcctttcgctccaactttctcggtgtctcaaacactctcctgccttctgggcccattgggcacaccgccacccaatccggggacccccggagactcgccagctctccaggatgggaatttcgtgatgttccctgcctgagcttcggggagggcgggggagtgctgtaaggggctatcgcgcaagtgcagaccctctgcttctgccgcaaacggcgggcctcacctggacccggggactcttcaacgaggggcgctagcctggcccgactgggcgagtccccgcgtccctgcccgttccgtcgctcagttccacgacacgctcccctgccgccccgcctgttcgcgggtgggtgggcgcttccctcggctccccgtgacactttgcagacgctccccggcgccgggcatgggcgccgccgccgtcggtccccgagccggattccgcgagcggtgcccctgaggccctcggctgctggggtccgtaggaagccgcgccatgaatgaccggagcagtcggaggcggacaatgaaggacgatgagaccttcgagatctccattcccttcgatgaggcaccccacctagacccacagatcttttacagtctgagcccctctcggagaaacttcgaggagcctccggaggctgcgtcctccgccctggctctgatgaacagcgtcaagacccagctgcacatggctctggagaggaactcctggctgcagaagcgcatcgaggacctggaggaagagagggacttcctgcggtgccagctggacaaattcatctcttctgctcggatggaggcagaggaccactgccggatgaagcctgggcccaggcggatggagggggacagccgtggtggggctgggggcgaggcctcggaccctgagtcagcagcctcctccctcagcggagcgtccgaagaaggcagcgccagtgagaggaggcggcagaagcagaagggaggtgctagtcggaggcgctttgggaagcccaaggcccgggagaggcagcgagtgaaggacgccgacggggtcctctgccggtacaagaagatcctgggcaccttccagaagctcaagagcatgtcgcgggccttcgagcaccaccgcgtggacaggaacaccgtggcgctgaccacgcccatcgccgagctgctcattgtggcccccgagaagctggccgaggtgggcgagttcgacccctccaaggagcgcctgctcgagtactcccgccgctgctttctggccctggacgacgagacgctcaagaaggtgcaggcgctcaagaagagcaagctgctgctgcccatcacctaccgcttcaagcggtgatcgcaccacgcctccgcgcctccacccgggccttcctcccccgtggaccccggtggatgacctgcccctctccccgccgcgcccctgcccctcctcctcgctccctgggttgggggctcccttagccgggcccccaagcgcgacggccccggaccggccgcggccccttcccgaacgccggcacccccttccgcttgggctgcccagccctgtcctcgccgggccccttcctcctggaaaaccaggcaggcgggtgcccccccctcgagtgggggactgtacagaccccgtctccgccctggccccgcggaggagctgcccacctgattcccggacagacctccccaactccgcgtgagacagagaattattcagataatttaaattaaaaaacgacgtgaaaatttggaataaa

SEQ ID NO: 3604 - DNA, 7412 bp, Homo Sapiens
  NM_013302
cgcttctgctcaacctagaccagccccagcttcagcctcagctcccctccttcctggatcgagcgcccgcactcccggccctgcagccacccgagtcccgctcgctgtcgcctgcacgcgagtcccccctggcacgcgctcccacatcccgggatcgtcccaacggcccctgcgcccttcctgggatcactccgactgccccgcgcgccctgggatcggtccatctaccccgcgtggccccagctgcttgcccggagcgccagctagcgctccccgctctccgctccccggcactctcggggggcccgcccgccctgcaccctggagctccgggccgcgagcctctgccaactcctctggaccctcgcggccgtgggcagcggctgccgcgcctgtctgcccgagggaggaccttcgcctctgcatttgtccagtaactctggctgtgccggatactgcttgggtaaaacgggcaccccaggaacatggcagacgaagatctcatcttccgcctggaaggcgttgatggcggccagtccccccgagctggccatgatggtgattctgatggggacagcgacgatgaggaaggttacttcatctgccccatcacggatgacccaagctcgaaccagaatgtcaattccaaggttaataagtactacagcaacctaacaaaaagtgagcggtatagctccagcgggtccccggcaaactccttccacttcaaggaagcctggaagcacgcaatccagaaggccaagcacatgcccgacccctgggctgagttccacctggaagatattgccaccgaacgtgctactcgacacaggtacaacgccgtcaccggggaatggctggatgatgaagttctgatcaagatggcatctcagcccttcggccgaggagcaatgagggagtgcttccggacgaagaagctctccaacttcttgcatgcccagcagtggaagggcgcctccaactacgtggcgaagcgctacatcgagcccgtagaccgggatgtgtactttgaggacgtgcgtctacagatggaggccaagctctggggggaggagtataatcggcacaagccccccaagcaggtggacatcatgcagatgtgcatcatcgagctgaaggacagaccgggcaagcccctcttccacctggagcactacatcgagggcaagtacatcaagtacaactccaactctggctttgtccgcgatgacaacatccgcctgacgccgcaggccttcagccacttcacttttgagcgttccggccatcagctgatagtggtggacatccagggagttggggatctctacactgacccacagatccacacggagacgggcactgactttggagacggcaacctaggtgtccgcgggatggcgctcttcttctactctcatgcctgcaaccggatttgcgagagcatgggccttgctccctttgacctctcgccccgggagagggatgcagtgaatcagaacaccaagctgctgcaatcagccaagaccatcttgagaggaacagaggaaaaatgtgggagcccccgagtaaggaccctctctgggagccggccacccctgctccgtcccctttcagagaactctggagacgagaacatgagcgacgtgaccttcgactctctcccttcttccccatcttcggccacaccacacagccagaagctagaccacctccattggccagtgttcagtgacctcgataacatggcatccagagaccatgatcatctagacaaccaccgggagtctgagaatagtggggacagcggataccccagtgagaagcggggtgagctggatgaccctgagccccgagaacatggccactcatacagtaatcggaagtacgagtctgacgaagacagcctgggcagctctggacgggtatgtgtagagaagtggaatctcctcaactcctcccgcctccacctgccgagggcttcggccgtggccctggaagtgcaaaggcttaatgctctggacctcgaaaagaaaatcgggaagtccattttggggaaggtccatctggccatggtgcgctaccacgagggtgggcgcttctgcgagaagggcgaggagtgggaccaggagtcggctgtcttccacctggagcacgcagccaacctgggcgagctggaggccatcgtgggcctgggactcatgtactcgcagttgcctcatcacatcctagccgatgtctctctgaaggagacagaagagaacaaaaccaaaggatttgattacttactaaaggccgctgaagctggcgacaggcagtccatgatcctagtggcgcgagcttttgactctggccagaacctcagcccggacaggtgccaagactggctagaggccctgcactggtacaacactgccctggagatgacggactgtgatgagggcggtgagtacgacggaatgcaggacgagccccggtacatgatgctggccagggaggccgagatgctgttcacaggaggctacgggctggagaaggacccgcagagatcaggggacttgtatacccaggcagcagaggcagcgatggaagccatgaagggccgactggccaaccagtactaccaaaaggctgaagaggcctgggcccagatggaggagtaaccaggaaaatcactgccggctagtcccaagcaaacgggctaggaggaaagattaaaaaaacaacaacaacaacttatttagtttggggaggggaagcatttttaagtgtgttgtaaaatcaaattttatatttcattttttgactcttgaaaaatgtctttgctccttggcagctaccagcagagactctatagctgtctcttagggcagtattttggggaagtggggcttgaagaagcagcctaatgaaccaacataccgttttgtgtgtggttttttttgtttgtttgtttgtttgttttgagacagagtcttgctctgtcacccaggctggagtgcagtgacatgatcttagctcactgcaacctccgcctcctgggttcaagtgattctcctgcctcagcctcccaagtagctgggattactggtgcacaccaccacactcagctaatttttgcatttttagtagagatggggtttcaccatgttggccaggctggtctcgaactcctaacctcaggtgatccacctgcctcagcctcccaaagtgctgggattacaggtgtgagccaccatgcctgcccattttgtggttctattttcatttttatttctttttttttttttgtcacgagatataagaaagtgctttttgccttgaatggacaattttagggctgtgctcactagtcttttcaggctggactgaaatgtcgggcccatggagccctgtgttttgtgcatcgggatgagaaatgaagcacttcacgctggctttcctaagtcacggggcgtgtattgccgtggcttagtgcaaagcattctttctcagagcatttagaggcatgcgtggcattttttcagtgggtgtgagattgcacaatacccaggctcccttctactgtggggaagggcctgcatgttggctgttttttaaacttctagttcaatttccttccataatgctactgattttctggcatacagccgaattccatcttttaagcatgctttctacggtgggcttttcaaaacaggtttgagttttgtatgcacacgtttactacctctaactcctacatcagctagtgtggaagagggtgcacctcaaagcttttacacgtaaggacagcggcttggaatgtgagagccttttctccaagcagacccacactctgcatctcagtggcagctcccacaacgtgactgcaatgtctcttatacagtattccttggtgttttcttagtgtctggatgttcttacgtgaaatctgctccccagccctggtccttggcattttctgcttgaagctgggctgattttcttgtaatttacagcaggacgctttcagcagcagtctcttgggattttatctaagatgtttgaggatgagagggcaagaactataaacactcattaattctagtagtctccccatggccagacaatggcgattgttatttaatgagcttttcctttcaatggaattcagctctcacattagtatgatttcatttgatgtttcaaatagcaaagatgctaggtgcggtggctcccgcctgtaatctcagcactttgaggagggccaaggtgggaggattgcttgagctcaggacttcaagaccagcctgggtaaacatggcgagaccctgtctctaccaaaacaacaaaaaaaagacagactgctttgatcaaccctaaatgcaaaagcagcctatttttctttgtttaaaagtcaaaacataaaaaagcagagtataacatacaaaccattcttaactattcattaaaatgggtccttcaacaccttagtggggtttgttgttgttgcttatgcagagagattattttctttttattattttataatttttgaaatagagatggggtctcactgtgttgcccaggctggtctcgaactcctggacttaagtgagcctcccgcctcagtctcccaaagcgctgggattacaggcaggagccactgagcccagccaagacttcagtgttgactgctttggaggcacaaacccatgcaagcgttagttccaaagttcagtgtgtacccttaaatgaacaatgaagcaggtaaaattacccttgaaaaaaatcccttggaccacccataaatgacagtgactttttcaatatggactcatcatagccagttttccttttgaagttggaactgatcacccttttgtcatctgtaccagatcagtagttggcttgtgttacattttgtgtgtgtgtgtgcgtgttttaaaccagtgcatataaattgtatgttaaatgtaagtaactttaagttgacttatctcttcacagtaatcaagcctcacgtaattcatgctttttaaattcagccagccccccctctctgaaattttattatgtaaataatttgtgttccctgatcactcgtttaagttcttagttgtatgtcatctcttctctagcaggaattggcaaacttttttgtaaaggggtagaaagtgaagattttaggctttgcaggccatatagcctctgctgcaaatgctcagccctgctgttgtaatgtaaaagctgccacagacactacatgaacacgaatgagtgtggctggtgttccaataaaactttatttacacaaacgggtggcccttttgggctgtagtttgtcaacccttgctctaacccttgactgagagctactttattaagccctgagggcaggagctatcccaattttgtgttccccagggcaccaaaacacagtgctttggcatagagtaggcactcaacaagtgtgtgaacagatggagagccagccctagtcagtgcactcaccctttgaggctctggttcctccaaacaatgattcgttgtctggattggctggaactgtcacccccgcaattctactccccacccacccatgtgaccttaatgtcagttgctggtctgttgctcttcggggagggagagatggcctggatacagagctaagcaaatgcttctttaagggcccttaaaagtgaaaagtaacttgcaagaggttgagatccttctgagctaggagaacttattccaccttcaaaacctagtttgggctgggtgcagtggctcacgccactttgggaggctgaggtgggcggatcacctgaagtcagctactcgggaggctgaggcaggagaatcgcttgaacccaggaggcagaggttgcagtgagccgagattgcgtcactgcactccagcctgggcgacagagtgagactccgtctcgaaaccaaaaacaagaaaaacccctagttttgtgccttctgaagatagttaggacatcttctttttccgcaaatgctggacatgccaaaaacctaacgcaaaacccaggacattccagcccaactgggacgatatcagagaccatcttcaagtgcaagaagcaggtgaaagcccaggaaattggcagagccaggattatcatccagtactttcatttcacaaatggagaaaccgaggttctgccagctagattttttttcacagtgtcactgctagcaagccactaagctggagctgggatttgagagctgctgctatttagaggatcttgggaataaaatttaaactggagtttaatggccctttcagttttgctataggcaagagaataaaatgaatgaatggataggtggctttatgggtgtaagaaagaagcgaaaaaaactcccaaaccccagtgttcctgaatatctgttctccccctgaccactctgggaatttatcaaatgcagctttgacctccaagccaagtaaactgctcttgttgctattttagtggtttttgtttttttaagacacaaggtctcactttgttactcaggctggagtgcagtggcatgatcataactcattgtaggctcaacctcctgggccccagtgatcctcctgcctcagcctctcaagtagctaaaactacagatgtgcaccatcacatctggctaatttttttttttttttttttgaggtggagtctcgctctgttgcccagattcaagtgcaatggcacgttttggctcactgcaacctctgcctcccaggttcaagcgattctccctgtctcggcctcccgagtagctgggactacaggcacctgccaccacgcgcagctaatgtttgtatttttagtagagacgggggtttcaccatgttggccaggctggtttcaaactcctgacattaggtgatccacctgcctcggcctcccaaagtgctgggattacaggcatgagccaccgtgccaagccacgcctggctaattttttaaaattattttttgcagagacagagtttcactatgttgcccaggctggtcttgaactccttggcctcaagtgatcctcccacctcagcctcccaaagcattggggttacaggcgtgagccactgcacctggccctgttttcatggcttttatttcctttcatcccacacatttgtctgcagtactagacatgttttacaaatcaacaagtttacacaagtatatgcagcttgttttggggggaaaggagacaaaatatgcatattttctgtgtggatttgtgcctcttaattgtgtttctagtctctaaggtgaccctttaacctactcaagatggggcccagagaagtggcctgcgttacagatttattttggcatatgtactaagttccattttctctttacaaataaagtgttttctttcttttctgtctcaga

SEQ ID NO: 3605 - DNA, 2026 bp, Homo Sapiens
  NM_013304
gcccctccagcctgctggagccggagccggagccggagccggagccggagccggagccagagccagagctcgaggactcaccggcccagtctccgtccgggatggggccccgctcccgggcgcgttgccgcccagtcccggggaccgtccctaccgcgagggtctgaggcgcggctgccccggggagggtggaaggccaggcgtggggcccgaacctctggctgactttggcagggcccatctggcacggcctccgcggcgcgcagctgttttcaagtcagcaaacatttactgaggatctactatgtacaagatgaacatctgcaacaagccctccaacaagacggcccctgagaagagtgtgtggacggcaccggcacagcccagcggaccctcccctgagctgcagggccagcgatcccgccggaatgggtggagctggccccctcacccgctccagattgtggcctggctgctgtacctcttctttgctgtgatcggctttgggatccttgttcccctcctgcctcaccactgggtgcccgctggctacgcttgcatgggcgccatctttgctggccaccttgtggtgcacctgaccgccgtctccatcgatccagcagatgccaacgtgcgggacaagagctatgcggggcccctgcccatcttcaaccgaagccagcacgcacatgtcattgaagacctgcactgcaacttgtgcaacgtggatgtgagcgctcgctccaagcactgcagcgcctgcaacaagtgcgtgtgcggtttcgaccaccactgcaagtggctcaacaactgtgtgggcgagcggaactaccggctctttctacacagtgttgcatccgctttactgggcgtcctgctcctggtgctggtggccacatatgtcttcgtggagttctttgtcaaccccatgcgtctgcgcaccaaccgacactttgaagtcctgaagaatcacacggatgtgtggttcgtgttcctgcctgccgcccccgtggagacccaggcccctgccatcctggccctggccgccctgctcatccttctgggcctcctgtccacagccctcctggggcacctgctctgcttccacatttatctcatgtggcacaagctcaccacctatgagtacatcgtgcagcaccgcccaccacaggaggccaagggggttcacagggagctcgagtcatgtcctcccaagatgcggcccattcaggagatggagttctacatgcggaccttcagacatatgcgcccagagccccctggccaggccgggccagcagcagtgaatgccaaacactctcgccctgcctccccggatccgaccccaggtaggagggactgtgctgggcctccggtccaggtggagtgggatagaaagaagcctctaccctggcgctcgcctctgcttcttttggcgatgtggggccctcaggctcccccgtgtctctgcagaaaaagaggaagaggcgcgtgtataaagtgcgaacgtctgagacctcggatccggcgtcggggcctagggcccccagccgccgctccagctcgtcgacggattccgcggacgccagccctgtgcacgccgctggccctgccggcgcctaccactcggcgtcggcagagtccgtggacgagattccagtggcgcagacgcgcctgggcagcgccgctctggccgccccgcggggccggggccgacagcccacgctggcgcggcaggcgcgtgcgcccgccgttttcgtgagcccgagcagcggcgagcccagggcgccgggcggccgggaggctggtctggcttagctgggccgagaggccggagggccgagttagagcggccggcctgactctctatgcaacaccccatccttgccgcaccgagtgcactttaggggcccctacggccggcgggatcggcctccctcccccacgactcagcaatacccgccccaccggctgtgatgctccaataaacttttttatgcttttgcggaaaaaaaaaaaaaaaaaa

SEQ ID NO: 3606 - DNA, 4301 bp, Homo Sapiens
  NM_013313
caggcggcccgcggggcggcggcgggaggatgcctcgcgccctgcctaggcgttaacggcctcagcgcgtcccgggccgcgccgggaacgcctgagagccgagcccgcgctgaccggggcccgggccggatgggcgctgcgggccggggcgcggaccgcggagcggccgttacgtttttctctcgtcccagctgtgtggacagtgccacacgccctcctggacaacgacggctcttgcgtgcattttccagtgttgcttttgtcagagaggccagcagagccacggttcttccagaaccagccctgagctgagtgaggagtgcccaggagagatggtgaaaatgacaaagtccaaaactttccaagcgtatctgccgaactgtcaccgaacgtacagctgtatccactgcagagcacacctggccaatcatgacgagctcatctccaagtcctttcaggggagccagggacgcgcctacctcttcaattccgtggtgaacgtgggctgcggccctgcagaggagagggtccttctcaccgggctgcatgcggttgccgacatctactgcgagaactgcaagaccacgctcgggtggaaatacgagcatgcctttgagagcagtcagaaatataaggaaggaaaattcatcattgagcttgctcatatgatcaaagacaatggctgggagtaatgtgcgaactttcccttctcctttgaatgctgttttgtgaaagaaactgtgaatgtaatggaaacgtaggagcatctggtgacagcctttcttgccctctgacctcaaaggctagctgcgcatagctcttgacactctcggccatctctgtgggtaaggtgtccctcggatctgtcctcttcgtgtacacagttgtttctgaaaattttcaatgagctttttctaacttctcaagttctagagaaagaattaaccaactgatgacttacctgcctagttaatatcttcctttcacctttgtcttcaatatagttgggctctgcttttttaaggttcagttgaaaaccaaactggggccgggtgcggtggctcacgcctgtaatcccagcactttgggaggccaagatgggtggatcacctgaggtcaggagttctagatcagcctggccaacatggtgaaaccccatctctactaaaaatacgaaaattagccgggcatggtggcgagtgcctgtaatcttagctactcaggaggctaaggcaggagaatcacttgaacctgggacacggaggttgcagtgagctaagatcatgccatcgcactccagcctgggggacaaaagtgagacatcgtctcaaaaaaaaaaaaaaaagctgggtatggtggcgcatgcctttaatcccagctactcgggaggctgaggcacgagaatcacttgaacccaggaggcggaggttgcagtgagccaagatcgcgccactgcactccagcctggcaatagggcgagactccgtctcaatttaaaacaaaagagaaccagactgagtctctgaagaccacagggacagggtctctttagatagcaagtctcaccattcccttttttagagaaaaggtattgtagcccaccctccaccccgctgtttttcttaaatttgcagaacttcaaattggctattcctcttgcaaatgaacccttaaagtacagtgttatttaagaatcttccagaggcagtcaacagacttatacactaagggcatttttggtttttagcttgttcaaaaacagaggccagcacagatgacattttagatacactctaaattgagaatggtgtctagtggaacatgtttatttaagccagtagattccttatctagaaagcaggtgagctagcccttagagaaggctgtcccggggcccgcagaggtgcccttactgaggtgacagcctcacagggtctggtaccaggggttgtgccctcagcagtgacagcagcttaggtgtcaggcagttgctgagtggctggtccatgtctatagagtaacacactggaccgaggaaaagtcagatttcattttctaccctggatgtacttgaagaaaaagaattatttttgcatatgaaagaggccagaacccacaggaaaaacttcaaaacttgacatttgccagaatgtttaaaatttgttcagaaaaggttaaagcaacaagtttagcctttgtgcatgaagacgcctggcctgctagacgcgttgcccgtccctgcgtggtgctgtcccatgtcacttgaactgatagaggggcctgtgcaatctcctaaggcctgtgtttctgccatatattttattataaattacaatccactcatccacctgccctccaccaggagtgggcaccccataagggtttaggccactttgcagaggatggaggtcaaaaaccactcccagataagtttggttttcaacatttagtaacttgtctcagggcagagggcaggcagggggaccgaggggcagcagataggagagcactgagcccggatagttctcagcctggcaagtggctctgaagctgccttcagacaaggctagtctaggggcaagagtgcgagctggctgacaataagaacgtggccacctgcccagcttcacacctcccccgacttcagcccttcctaaacccagacctgcggtccaggcaggcactgggctgtgcccactcgagctcactgcccacacacagcatgcctttgggtgccatctctttgcccaagcctggaagccttggcaggtgggaaatgccgctgccctggtgggcatggcactgagatgcatccactcagcaggagtgacagaggcagaagttcctttaaagcacatcttccacttaggaaaggaaggaaatctttgtactgtcttggaagcctccacatccggctatggccctgcaagctgctttatccctgcgctagtctcccccgagggtttaggctggcccagcacatcctgtcctcctgagctcgcgtgcagccacccagagcgcaggggtcactgcacgctgcagggctcttgctgccatggtctcaagcctgaagaggctccgcccacaagctggcccatgaagttagcaatgcctgtggcttcagtcaattgtcttgagactgtgaagaggctgaaagacaccttcccgggtggaagaaggagttcactgaaaacttatcttaaactgacccttccctttgagtgagtcttcattcctctcccatgtgggaacccagcctccgatgccccggggactaggggaaacagttggaggttcgtgccgtccccagcctgccacgggtgcgaggacagccaagtcctgagtgactcaagatgcttcacttacatggaagaaacttctaaaactctaccgagtggtttttgtatatactaaagttctatttagagcttttctgttttgggcaagttcgctgctccttctatttgggcactttggtttttgtactgtcttttgtgacggcattgattgaacattttttactagtagtcttatgacttttgtatttttttttttttttgtaatttataccaacaacacttttatcactttttttttgttgggcttctgcaaaatacaagctcatttttaaaccaaatgaacagaccatgagctggcttcaggggaagtgctattcacaggaccatatccaccaccctcttaaattcctaaacaatatcatctaggacttctatttaagttatttaaaataaatcttccttgagagccttgggaggtgatgtcagggttataaatggcacagtgcatttgctgtaggaatgtggtttggcattgttttatacacacagtattttttataccttaatgcttattcttgatggcatctgtcagatattagaattgaaaataagaatcttcccaaaatcctttaatttacctgatgccctcatcaggtcgttaaaaattcaaatggttttaatagctaaaaaactacaaattaagctctaaaacaaacaaactacagaaatgtaaaccttcatttgccaaaggtccttggtggcctgtcccctgccctgggagcagatggccctgaagcccttccctcactgtgcaggccaccgggtgaggctggacggtcacccatggtggcttcactgcaaggagcaggactgccgagctcaagcacggggccttcagcttcccctgtcctctggccacaccgccagcccttggtccttatctgtgtgaggtttacaaataaagcttctgatgtcaaatgtttaaaaaaaaaaaaaaaaaaa

SEQ ID NO: 3607 - DNA, 3341 bp, Homo Sapiens
  NM_013316
agcgtgcgcctgcgcacgggaggccggaggagtcttaccctaatgtaagatggtggcccgtctggctgtggaacccaccgaaagctgagagtctctctctcagccgtaaaggtcggactcgctgaagcaatcaggcccggttctgaagagttttttccccgacgctcgttcggtggtttcttgtgaggacgcggcagcccgtggagtcggctgagggaaaagcgaggcaaggcaggcgggtcgtcaaagtcctacattttagctttcagtgctgaacttccttctcccttaaattattataaacttttgctgctgtttaataaacgtgaagatgtctcgcagtcctgatgcgaaggaagaccctgtggagtgccctctttgcatggagcccttggagatagatgatatcaactttttcccttgcacctgtggctaccagatttgccgattttgttggcatcgaattcgcactgatgaaaatgggctttgtcctgcatgtagaaagccatatccagaagacccagcagtttataaaccactctcccaggaagagctgcaaaggataaagaatgagaaaaaacagaaacaaaatgagagaaaacagaaaatatcagaaaatcgcaaacatttggctagtgtacgtgtcgtacaaaaaaacctcgtctttgttgtaggtttatctcagcgcctagcagacccagaggttttaaaacgaccagaatattttgggaagtttggtaaaatacataaagttgtcatcaataatagcacatcatatgcaggctcacagggtccaagtgccagtgcttatgtaacctatatccggtcagaagacgctctcagagccatacagtgtgtcaacaatgtggtagtagatggcagaacacttaaggcatctctaggtacaacaaaatactgcagttacttcttaaagaatatgcagtgtccaaaacctgactgcatgtatcttcatgaattgggggatgaggcggccagcttcacaaaagaggaaatgcaggcgggtaaacaccaagaatatgaacagaagctacttcaagaattatataaattaaatcccaattttcttcagctatctacgggttcagttgataaaaataagaacaaagtgacaccactgcagagccccattgacaaaccttcagattctctcagtatagggaacggtgataattcccagcagatatctaacagtgatacgccttcaccaccacctggtttgtcaaaatccaatccagtcatccccatcagttcatccaatcacagtgcacggtccccttttgaaggggcagtaacagagtcacagtcgttattctcagacaattttcgccatcccaaccctatcccaagtgggcttcctcctttccccagctccccacagacatccagtgactggcctacagcaccagaaccacagagcctcttcacatcagaaacaatcccagtatcatcctctacagactggcaagcagcttttggctttggttcttctaaacaaccagaggatgacttgggttttgatcccttcgatgtcactcgaaaagccttagcagacctgattgagaaggaactgtccgttcaagaccaaccttccctttcgcccacatctcttcagaactcctcttcacacactacaaccgccaaaggtccaggctctggattcctgcatcctgctgcagctacaaatgccaattctctcaatagtaccttttcagtcttgccccagaggttccctcaatttcagcagcaccgagcggtttataattcattcagttttccaggccaggcagcccgctatccttggatggcctttccacgcaatagcatcatgcacttgaaccacacagcaaaccccacctcaaatagtaatttcttggacttgaatctcccgccacagcacaacacaggtctgggagggatccctgtagcaggtattccagcgtcttcaggaaacagtttagactctcttcaagatgacaatcctccacactggctaaaatcccttcaggccctcacagagatggacggccccagcgctgctccatcacagacccaccacagcgcccccttcagcacacagatcccgctgcacagagccagttggaatccctaccctcctccttcaaacccttccagcttccactccccacccccaggctttcagacagccttcagaccccccagcaaaacccccacagatttactacagagttcaacactggaccgccattaggcaaagaggagcaaccattagaaaatgcaggatttgtcccactctgttttctccctctcagcccaccacccacagctcccttctcatctcttatgttctgaagaatccagtacctgatcaattttttttctccctaaccccagatgcaatgcgatcacagggtcattaccatctctttattaattgtaaaaatttttgttgatccagcatttgagtgacactgttgaatgtttctaaaaatgcctttttaaggagagaaaaaaaaatcaaagggcagtctcaatacttagaaaattattgtttgtctgttgcgcataataatgacataatctgcttagcagaaaatgacgattaatctataggaaagctcaagtaaatgcattatcaactgcagaagtttgaaaaccaggttcatttacgtgagattgctaaatgcatgggggaaagcagtggtcctagcatccatcttgtattcagcttatcattattgcagggaaaatgcttttaatttaaattaatttttaattcttttggcaagttgatggcaaggacttgattgtgtcattaagcaaaagaatgtattggaagttgatggaaagacaaattcatctgtagtagtaactggccgattgctaaagagttcataaggaggtgagaagtaatttttttaaaggagaaaaattttttggctttagatttaaagtaaattgaaatgttttaaagaaaaaagtattcacagatttaatacctattaataatataagagctgaaatgtaagtcatttcttcagtccttctcctctgtcggaatcttttttgttttaccataaattcacctgacgagggcactctgagatagcactgctctggggccatctgatcaccatcgggagcaaatctctgacctccttgcctgcagcttttacttaaccctgtagtttctggacgtttgtgcagtattgaaaagacaggagaaaagaaaacagaaacctggttataacctgacgctaaaactaaaaacaaggaaatgtacctctttcttcagaattaaaactaaaatcttaaataaaacagaaaacttgatggtgaca

SEQ ID NO: 3608 - DNA, 3687 bp, Homo Sapiens
  NM_013319
gtttccgggcgggcctccagaggccggcgcacaagatggcggctctggcggcctaaagaaggcggccgcggctcagccgtgggctctaacgcggggctgggggccggagacagacttcgcccaggtgacgggtagtaggggcggcgccgcttggcctcgtggggtgtaagacccacttgctgttgcccccggaccttgccgccacaccagccctgtcctggggcggaaccgaaggaaggtcgggccctgctgccccgccccgtccttcctccttcccgggcggtcactgtgcgtggctcacttttagagtttacttcaaccacgtggagcttccatggcggcctctcaggtcctgggggagaagattaacatcctgtcgggagagactgtcaaagctggggacagggacccgctggggaacgactgtcccgagcaagataggctcccccagcgctcctggaggcagaagtgtgcctcctacgtgttggccctgaggccctggagcttcagtgcctcactcacaccggtggccctgggcagtgcccttgcctacagatcccacggtgtcctggatcccaggctcttggtgggttgtgccgtggctgtcctggctgtgcacggggccggtaatttggtcaacacttactatgacttttccaagggcattgaccacaaaaagagtgatgacaggacacttgtggaccgaatcttggagccgcaggatgtcgtccggttcggagtcttcctctacacgttgggctgcgtctgtgccgcttgcctctactacctgtcccctctgaaactggagcacttggctcttatctactttggaggcctgtctggctcctttctctacacaggaggaattggattcaagtacgtggctctgggagacctcatcatcctcatcacttttggcccgctggctgtgatgttcgcctacgccatccaggtggggtccctggccatcttcccactggtctatgccatccccctcgccctcagcaccgaggccattctccattccaacaacaccagggacatggagtccgaccgggaggctggtatcgtcacgctggccatcctcatcggccccacgttctcctacattctctacaacacactgctcttcctgccctacctggtcttcagcatcctggccacacactgcaccatcagcctggcactccccctgcttaccattcccatggccttctcccttgagagacagtttcgaagccaggccttcaacaaactgccccagaggactgccaagctcaacctcctgctgggacttttctatgtctttggcatcattctggcaccagcaggcagtctgcccaaaatttaaggggacaagtagctccccccacgacatgtctccctttcttagaatatattaaagtcagagtctctgaggaaggaatgtgatttggcagtcagggtactaagcatgggtgggaactcctgccttataaaaattgtttttgtgttcttaaagataatatgttgtttttctgttttttgttttttccattttatggggaatttaaaaaccattcttgtatcagaaggtgaattaggcgcatggtctttgttttattaataatttccactagagggtgttctcaggtcactttgcagtgaagtggacttagttcctccttgttctgtacaaaatgtctccagactttgtaaaggagctgcccagtttggcctcctgtcccgaaaagaccctaataactaggcagagtgttgtcctgctttcttcgtctcgtaggatgtgctatgattggtgccaggcctcactaacacaggggctacctgtctcttattctcagcacctgtgtcctgagatacgctgcctgagacagagagagtccctcattaacagcctgtgtggctgtcagctttttgcctaaattgtgattcagatgcttttgttctctctcctttcacttattgccacagttgaggaaaagtgtcagattaccctgcagcaagacaagccaaggactgggagggaaaaaaaaaccactctggaggcaactgagaaaatcactgcttttggataggaatcagtagggtggctgttttccctttgttgaatctactagagtgacaggaaggactcccagccctttcagtaactatcaggagccctgaaacggtagaggcactgccatccttgtgggatactcaaagcccacagggcttttccctccctattgcatcttctgatgctccccacacctaccctccacctctccacctctgtggtgttcccatttgtgtgtttcccatctgtggagccagactgagcaatagcttagcagcgagtcagggacagctgccactttccacagagccacaggatgggcagagcagggacccagggaatgaatagccagtggacaaacagtcttgagctctgttcagccagagtgatgggccctgccagttaaggggctgtgtcttcatccttgaagacagatgtgcaatattgaccctgcctctccccagggctttgtggaaagatagttgagggctttagtgagatcacactcagagtggggcaattccagcatttatcctggctgcgtttcattgcattgtctgtgaagtataatttctgggccagaattgctcagttgcatttgatccaggactatagattggaaatgggtcatcattgttttctgttgtgattatagccattctagtaggcgtttaaggtcatggcctgcagaaaatgatgtaagaactagttcttaatctttcagatcaagctaatgatgatatggaaccttgagttcgaattgattggtttacttggaaaaaaacatgtttgaaaattgcaaaagttccgccgggcgcggtggctcatgcctgtaatcccagcactttgggaggccgagacgggcggatcacgaggtcaggagatcgagaccatcttggctaacacggtgaaaccccgtttctactaaaaatacaaaaaattagccaggcgtgttggcgggcgcctgtagtcccagctacctgggcggctgaggcaggagcatggcgtgaacccaggaggcggagcttgcagtgagctgagatcatgccactgcactccaacctgggggacacagcaagactccgtctcaaaaaaaaaaaaagaaaaagaaaattgcaaaagttcctctaaagttaaatcaaaggtggtttgtctagcagagagccagaatcttctaatagtgggcagagcccagagacaaggggaagaaagatgaccttctccccagtccttcccagcaccatttttgtttcacaccaggcttgtggcattttggtgctcacaggggttttgccttctgacctctccttggagtaggccattctcatgcagggctcaccctgaggcaggaggaccaagggctccctgcgtccacggaccacgtatgccttggtggtcactcccatcggggctatcagttctgcactgtgccctggtgcggattttaatgcatatttttatatataaatgttcccaaaggccaaatttgttgccaggttttatacgcaggtcaccataatttgtattatgttccctgagtcaatgaaggttttctttagacttcttaattaaaaagagaagaaagaaaatgttcaaaaaaaaaaaaaaaaaaaaaaaaaaaaaaaaaa

SEQ ID NO: 3609 - DNA, 1708 bp, Homo Sapiens
  NM_013328
gaatagggttgcaccatcccagaagctgctgttagctcgccggtcctcggcacgccgcccgttcgcccctgcgctgtccgcccttcccctagcgttacttccggtccctcgctgagggggttcgtgcggctcccaggaggcgtgaaccgcggaccatgagcgtgggcttcatcggggccggccagctggcctatgctctggcgcggggcttcacggccgcaggcatcctgtcggctcacaagataatagccagctccccagaaatgaacctgcccacggtgtccgcgctcaggaagatgggtgtgaacctgacacgcagcaacaaggagacggtgaagcacagcgacgtcctgtttctggctgtgaagccacatatcatccccttcatcctggatgagattggggccgacgtgcaagccagacacatcgtggtctcctgtgcggctggtgtcaccatcagctctgtggagaagaagctgatggcattccagccagcccccaaagtgattcgctgcatgaccaacacacctgtggtagtgcaggaaggcgctacagtgtacgccacgggcacccatgccctggtggaggatgggcagctcctggagcagctcatgagcagcgtgggcttctgcactgaggtggaagaggacctcatcgatgccgtcacggggctcagtggcagcgggcctgcctatgcattcatggctctggacgcattggctgatggtggggtgaagatgggtttgccacggcgcctggcaatccaactcggggcccaggctttgctgggagctgccaagatgctgctggactcggagcagcatccatgccagcttaaggacaatgtctgctcccctgggggagccaccatccacgccctgcactttctagagagtgggggcttccgctctctgctcatcaatgcagttgaggcctcctgtatccgaacacgagagctacagtccatggccgaccaagaaaagatctccccagctgcccttaagaagaccctcttagacagagtgaagctggaatcccccacagtctccacactgaccccctccagcccagggaagctcctcacaagaagcctggccctgggaggcaagaaggactaaggcagcatctgtcccctctgtgattcagagcccttagttgagagcccctgccgcccctgccacccccctgccccgctcccaccattgcccctcctcagctgtgcaaggagaaagcatgcttaggaagttttcaggtccttgtgataaaacctccttaaatctgttcagaccaagcaatgcgagcttcctctcctgtcccatgttggaagttgctctgaaggggtggtagatgctggaagccagacacaaccctgcgtacgctgctcagttggtggagactggggctgggactggagtcagcccagctgggaggaggggctggggaggatctgcagctgaagcccgaggcagggttggtgtgatgccaaggcaaagtggtgaggagaaaacaggaaacgggctttctctgaattggtaaatgggaaagaagtgagcaacttaagattgtcacaattaatcacaagtgtacaggattagactgggtttatatttaactcttgcttcataggtgtaccatttaaagagtgttatttaatgctaagtttaactgctttaataaagtttatttttaaataaaaaaaaaaaaaaaa

SEQ ID NO: 3610 - DNA, 2836 bp, Homo Sapiens
  NM_013329
ctctctctctttctccaagtattgagagcgcgtgggagcataggcgcatgcgcgctcgtggggtgcgcggtagcaacagaggactcgacccggctggagctccggagagcgcgcgtgcgccgtcacgagctcggcgctgccggggccgcggtgtggaagcgagtattcgaccgccgtgcgggccgcggggatgttccgaaaggcccggcgggtgaacgtgcgcaagcggaacgactccgaagaggaagagcgggaacgcgatgaggagcaggagccgccgccgttgttgccgccgccgggcacgggcgaagaggcgggccccggtggcggcgacagggcccctggcggggagtcgctgctgggcccggggccgtcgccgccttccgcgctgaccccgggcctcggggctgaggccgggggcggcttccccggcggcgcggagcccggcaacgggctgaagccgcgcaagaggcctcgcgagaacaaagaggtgccccgggccagcctgctcagcttccaggacgaggaggaagaaaatgaagaagttttcaaagtgaagaaatcaagttatagcaaaaagatagtaaaattgctcaagaaggaatataaagaagatcttgaaaaatcgaagattaagacagaactcaactcatcagctgaaagtgaacaacctttggacaaaacaggacatgttaaggatacaaatcaagaagatggagttatcatcagtgaacatggtgaagatgaaatggatatggaaagtgaaaaagaggaagaaaagccaaagactggtggagctttttcaaatgctttatcttcattgaatgttcttcgtccaggagaaattccagatgcagcttttatacatgctgcaaggaaaaagcgccaaatggcccgagaattgggagatttcactcctcatgataatgagcctggtaaaggccgccttgttagagaagatgagaatgatgccagtgatgatgaagatgacgatgagaaacgccggatagttttttctgtgaaagaaaagtcacaaagacaaaaaattgctgaggaaataggaattgaggggagtgatgatgatgctttagtaactggagaacaggatgaagagctcagccgatgggaacaggagcagataaggaaaggaattaatatccctcaggttcaagccagtcaacccgcagaagtgaatatgtactaccagaacacttaccagacaatgccttacggctcatcctatggcattccttatagttatacggcctatggatcatcagatgccaaatctcaaaaaacagataatacagtccctttcaaaactcccagtaatgagatgactcccgttactattgatttggtaaagaaacagcttaaagacaggttggactccatgaaagaattgcacaaaacaaatcgacagcagcatgagaaacatctgcaaagccgagtggactctaccagggctattgaaagattagaagggtcttctgggggtattggtgaacggtataaatttttgcaagaaatgcgagggtatgtccaagacttgcttgagtgtttcagtgaaaaggtgccactgattaatgaacttgaatcagcaatacatcagctgtacaaacagcgagcttcccgccttgtccaaagacgacaagatgatattaaagatgaatcttcggagttttcaagccattcaaacaaagctctgatggcaccaaatcttgactcctttggacgcgatcgggcactgtatcaagagcatgcaaaacgtcgcattgcagagcgggaggccaggaggactcgtcgtagacaagccagagaacaaaccggtaagatggcagatcaccttgaaggcctttccagtgatgatgaagaaacttctacagatattactaatttcaatctggaaaaagatcgaatttcaaaagaatccggcaaagtttttgaagatgtccttgaaagtttctattcaattgactgtattaaatcacagtttgaagcatggcgttcaaaatactacacatcctacaaagatgcttacattggcctttgtttgccaaaattattcaaccccctcatacgacttcagctcctcacttggactcctcttgaggcaaaatgtcgtgactttgagaatatgctgtggtttgaatctttgctgttttatggttgtgaagaacgagagcaagaaaaagatgatgtagatgttgccctactacctaccattgtggaaaaggtgattcttcctaaactaacagtgatagctgaaaatatgtgggaccctttttctacaacacagacttcaagaatggtgggaattacactaaaattaatcaatggatatccttcagtagtgaatgcagaaaataaaaatacacaggtatacctaaaggcacttttattgagaatgagaagaactttagatgatgatgtatttatgcccttatatcccaaaaatgtcttagaaaataaaaattctgggccttacttgttttttcaacgacagttttggtcttcagttaaggtcataaaacccccattccagagagggtcctgccccatacccagaaggaaagaatgctgctcagagaggccaagaagaatctggacggacaggccttgtgttgtcttctcttgagcagtagatcatacctttttgtccagtcatgtttctgcatgcctgtacatatttcgttaaacctaaacatagtagacaatttctcctccatctttgggtcttcattctgaaggctgtcatgttacataaaactgtgatcaaataaatttatatgccttttctcctgttaaaaaaaaaaaaaaaaaaaaaaaaaaaaaa

SEQ ID NO: 3611 - DNA, 1646 bp, Homo Sapiens
  NM_013330
acagaataatggcgtctcgtagccccaggcgacagcgtggaggggcgggtctgtcgattggatgaacgcagctgagattactcccagccactaaggacgaagaggtggggcggtggcgtcccacgcctcgtgcgacagtgggcggggctttgttgcctgagtaaccgtatgatggtggtggtggtggtgtcttcctgtctcaacgatacctattttctagtgctgagatcctgagacaatgaatcatagtgaaagattcgttttcattgcagagtggtatgatccaaatgcttcacttcttcgacgttatgagcttttattttacccaggggatggatctgttgaaatgcatgatgtaaagaatcatcgcacctttttaaagcggaccaaatatgataacctgcacttggaagatttatttataggcaacaaagtgaatgtcttttctcgacaactggtattaattgactatggggatcaatatacagctcgccagctgggcagtaggaaagaaaaaacgctagccctaattaaaccagatgcaatatcaaaggctggagaaataattgaaataataaacaaagctggatttactataaccaaactcaaaatgatgatgctttcaaggaaagaagcattggattttcatgtagatcaccagtcaagaccctttttcaatgagctgatccagtttattacaactggtcctattattgccatggagattttaagagatgatgctatatgtgaatggaaaagactgctgggacctgcaaactctggagtggcacgcacagatgcttctgaaagcattagagccctctttggaacagatggcataagaaatgcagcgcatggccctgattcttttgcttctgcggccagagaaatggagttgttttttccttcaagtggaggttgtgggccggcaaacactgctaaatttactaattgtacctgttgcattgttaaaccccatgctgtcagtgaaggactgttgggaaagatcctgatggctatccgagatgcaggttttgaaatctcagctatgcagatgttcaatatggatcgggttaatgttgaggaattctatgaagtttataaaggagtagtgaccgaatatcatgacatggtgacagaaatgtattctggcccttgtgtagcaatggagattcaacagaataatgctacaaagacatttcgagaattttgtggacctgctgatcctgaaattgcccggcatttacgccctggaactctcagagcaatctttggtaaaactaagatccagaatgctgttcactgtactgatctgccagaggatggcctattagaggttcaatacttcttcaagatcttggataattagtggtgtggaaagtaaagaagtcacaggttgggacatttagacaagagtgaatcacacacgaggaatgtgttcattcttttattgtccgttgttttaacctgactgaatacaagatcaacaagagcactgtactcctggcaattattacatatgttagaacatggattttgcactgtagacaacatttaacaccagtctatggggtactgcattgctttttataaagttcaaaataaagatttattttcaaacaaaaaaaaaaaaaaaaaaaaaaaaa

SEQ ID NO: 3612 - DNA, 2423 bp, Homo Sapiens
  NM_013333
gcaatttccgcttccggtccgtcgcctccttctgttgcttcccgtctcctcggcggctcccctcccccgcccggctctccgcgccccttctgggcggcggggcggcggagccgtcggcgtgcggccctccttgcgttcgtgcgtgcgcccgtggcccggcgcacgtcccgcgacaccgaggccgagcggggcagggggctgaccgccatgaccccccagagcccggcgtgagggggccgagatgcggtgacctgccagcacctgccgcagccttcgtccgggagtcgccccatctctccacgcatcggggccctgtgccccttgctgctgcagccgggcaccatgtcgacctcgtccttgaggcgccagatgaagaacatcgtccacaactactcagaggcggagatcaaggttcgagaggccacgagcaatgacccctggggcccatccagctccctcatgtcagagattgccgacctcacctacaacgttgtcgccttctcggagatcatgagcatgatctggaagcggctcaatgaccatggcaagaactggcgtcacgtttacaaggccatgacgctgatggagtacctcatcaagaccggctcggagcgcgtgtcgcagcagtgcaaggagaacatgtacgccgtgcagacgctgaaggacttccagtacgtggaccgcgacggcaaggaccagggcgtgaacgtgcgtgagaaagctaagcagctggtggccctgctgcgcgacgaggaccggctgcgggaagagcgggcgcacgcgctcaagaccaaggaaaagctggcacagaccgccacggcctcatcagcagctgtgggctcaggcccccctcccgaggcggagcaggcgtggccgcagagcagcggggaggaggagctgcagctccagctggccctggccatgagcaaggaggaggccgaccaggaggagcggatccgtcgcggggatgacctgcggctgcagatggcaatcgaggagagcaagagggagactgggggcaaggaggagtcgtccctcatggaccttgctgacgtcttcacggccccagctcctgccccgaccacagacccctgggggggcccagcacccatggctgctgccgtccccacggctgcccccacctcggacccctggggcggcccccctgtccctccagctgctgatccctggggaggtccagcccccacgccggcctctggggacccctggaggcctgctgcccctgcaggaccctcagttgacccttggggtgggaccccagcccctgcagctggggaggggcccacgcctgatccatggggaagttccgatggtggggtcccggtcagtgggccctcagcctccgatccctggacaccggccccggccttctcagatccctggggagggtcacctgccaagcccagcaccaatggcacaacagccgggggattcgacacggagcccgacgagttctctgactttgaccgactccgcacggcactgccgacctccgggagcagcgcaggagagctggagctgctggcaggagaggtgccggcccgaagccctggggcgtttgacatgagtggggtcaggggatctctggctgaggctgtgggcagccccccacctgcagccacaccaactcccacgccccccacccggaagacgccggagtcattcctggggcccaatgcagccctcgtcgacctggactcgctggtgagccggccgggccccacgccgcctggagccaaggcctccaaccccttcctgccaggcggaggcccagccactggcccttccgtcaccaaccccttccagcccgcgcctcccgcgacgctcaccctgaaccagctccgtctcagtcctgtgcctcccgtccctggagcgccacccacgtacatctctccccttggcgggggccctggcctgccccccatgatgcccccgggccccccggcccccaacactaatcccttcctcctataatccagggcggaagggggcctggctccatccggctgccccattccggctccctgggagatcagtgttgtgagtgcatgtgaaatgggggatccccacccccagtgcccttccccttcctggggcccactcacactacaccctcttcctttcccaccccacctccccggagagaaactggacatggggcctggggaggggagctggccagaggaggacccctttcccgtggcattagaagggggaggggtggctggggcccccacccattccccctccctccaaactcccaacccccagtcagtgtttgagcctcctcgttcccctcacgcacccgctcacgcaccctcggtgaatccttggtgatgattttggcaactttgggaataaatggcaattcccacgggcttggcaaaaaaaaaaaaaaaaaa

SEQ ID NO: 3613 - DNA, 1691 bp, Homo Sapiens
  NM_013337
cgagggttgcttgggcagcgactgtcatggcggcggccgcccccaatgccggaggctcggcccctgagacagcgggttccgccgaagctccgctgcagtacagcctgctcctgcagtacctggtgggtgacaagcgtcagccccggctcctggagcctgggagcctgggcgggatcccaagtccagccaagagtgaggagcagaagatgatcgagaaggcgatggaaagctgcgctttcaaggctgcgctggcctgcgtgggaggatttgtcttaggaggtgcatttggggtgtttaccgctggcatcgataccaacgtgggctttgaccctaaggatccttaccgtacaccgactgcaaaagaagtgctgaaagacatggggcagagaggaatgtcctatgccaaaaatttcgccattgtgggagccatgttttcttgtactgagtgtttgatagaatcttaccggggaacatcagactggaagaacagtgtcatcagtggctgcatcacgggaggagctattggtttcagagctggcttaaaggctggggccattggttgtggaggttttgctgctttctctgctgcgattgattattacctccggtgagagtaattgcctgcagggaaggatgatgccagccccggatccgggctgctctctggaggacagtttctgtaccacaccagggccttgcttcagggcctgaagacattcattttccctcatgtcgttggtattctgagggagctgcctggcttctctgcctccagcctttggggtagccacactttgctgctcctggactccagccagccttcacagaggacgtcccgtgccagattctctcacagcagatcgggagacaggatgttgacatataggaattcagctccacaaagcttcaggcctgaccacagctggccctctaggttgtttggtgttgtgggcacagaggtgacagtgtctctgcaggcactcaggaagctgttctaccttggaactccatgcaactatccgtctcgaataccagggcagggcaaggcggactgatgccgtccaaccaattatctcacttgttttgtgttctgtcatccttgttttttttttaaaaatacactcccctcccccaccgccacacaccttacagttcaaaaggttggtttatttgtattttattttcaaattccctattccaaaaatagtgccgggtggcccaaagataacatctgaagggaaagaatgagaaagctcccagggaagcgggggatggggcgctgaggcagggttgttagaggactgtgtcatcctcaccaagctcattacatctgccagggcctgcctcaagaagcccagcccagccttttcctgggatgcagtgaaatcccatccatgaactcgatgggcccctcctgtgccggccgagaggcacacactgccttcacgacgtgactgctggacctggccgagcttgaggccacatgtgaagggtcctgctgtggtcatcttggtgactcggtcacagcagctactggccaagatcagacgtcgctgaggggctgttcaccaccatcctcgttctccagggtcaaggaagtgttttaacatgtcgtgttttcgacttgaccttgtggtatttttcttggcctagttgtgtgccatggatattaaaaaaaaaaaaaaaaaaaa

SEQ ID NO: 3614 - DNA, 642 bp, Homo Sapiens
  NM_013346
ggggccgtgcgcgctcctgcctcaggcctctgtcccccaccccctttccccggtcccaggctctccttcggaaagatgtcggacacggcagtagctgatacccggcgccttaactcgaagccgcaggacctgaccgacgcttacgggccgccaagtaacttcctggagatcgacatctttaatcctcagacggtgggcgtgggacgcgcgcgcttcaccacctatgaggttcgcatgcggacaaacctacctatcttcaagctaaaggagtcctgcgtacggcggcgctacagtgactttgagtggctgaaaaatgagctggagagagatagcaagattgtagtaccaccactgcctgggaaagccttgaagcggcagctccctttccgaggagatgaagggatctttgaggagtctttcatcgaagaaaggaggcagggcctcgagcagtttattaacaaaattgctgggcacccactggctcagaatgaacgctgcctacacatgttcctgcaagaggaggcaattgacaggaactacgtcccggggaaggtgcgccagtaggagcccctctcaccacctgccctctactttcctgctgaaatgacattggtttttacactaagcctctctctgtctttg

SEQ ID NO: 3615 - DNA, 1560 bp, Homo Sapiens
  NM_013347
ctagtaaaaatgcatttttatagagatgttgggaaaggcttgcttgaaattacacgtgggacttttaatagataggcgctttgaccagctaagcaacagggctcccctcgtgtgggacttttagaatgtagcaaccactgacacacagggaaggattatgcgatcaggtgagaaggtggccgaccctgactggctggaagcagatgcattctggtagttgattggtccacaggtagcgtgacgcttgtcacgtcctcagcctcccagcattcaatcgtagcctttcggacagctcgaagccttctgtggagagctcgaagccttctgtggagaactcaaagccgtccgtggagccccagacgagccaaagcccaccttctcctcagcctgagctgtcttgaagatgagtaagagtgggtttgggagctatggcagcatttctgctgctgatggagcgagtggaggcagtgaccaactgtgtgagagagatgcaactcctgctattaagacccaaagacctaaggtccgaattcaggacgttgtaccgtgtaatgtgaaccagcttctcagctctactgtgtttgaccctgtgttcaaggttaggggaattatagtttcccaggtctccatcgtgggggtaatcagaggggcagagaaggcttcaaatcacatttgttacaaaattgatgatatgaccgcgaaaccaatcgaggcccgacagtggtttggtagagagaaagtcaagcaggtgactccattgtcagtcggagtatatgtcaaagtgtttggtatcctcaaatgtcccacgggaacaaagagccttgaggtattgaaaattcatgtcctagaggacatgaacgagttcaccgtgcatattctggaaacggtcaatgcacacatgatgctggataaagcccgtcgtgataccactgtagaaagtgtgcctgtgtctccatcagaagtgaatgatgctggggataacgatgagagtcaccgcaatttcatccaggacgaagtgctgcgtttgattcatgagtgtcctcatcaggaagggaagagcatccatgagctccgggctcagctctgcgaccttagcgtcaaggccatcaaggaagcgattgattatctgaccgttgagggccacatctatcccactgtggatcgggagcattttaagtctgctgattgaggcagggaaaacatcctttcatttttcgaagacccttgcatccagctgtgagtaattttgacctgttgactttttaggaagtaggactaaaaaaaaaaatctcaagtggcattctttgtcaactcgctgcttttctaactgctttgaacttttcggattttctgtatttgaagctcagagagagacggtgatggataaattgacaactctgtaggatttactagcaagctaatggaaacatgattttcggggaagaaaaactacagaaaatgtagaaatttattatttaattgtgttggagcttctttttccaaaagaaaaactagttgcagtcagggagccagcgaaaagacaaaaaaaaaaaaaaaaaa

SEQ ID NO: 3616 - DNA, 4077 bp, Homo Sapiens
  NM_013352
agtagcgtcgcccgaggctgcagcagcgcatcccggggcatggcgcggcgggggcgcggagggctcggttcggagggggccgggagcccgggcgccctggagtgaggaggaccgggagctggctctggaggctgcggaggcgacgccggagagaacgaagcctcggctgggagcggatctttcgaagatggtttggctgccttggagatttggagatctgatgccacgatgaggactcacacacggggggctcccagtgtgtttttcatatatttgctttgctttgtgtcagcctacatcaccgacgagaacccagaagttatgattcccttcaccaatgccaactacgacagccatcccatgctgtacttctccagggcagaagtggcggagctgcagctcagggctgccagctcgcacgagcacattgcagcccgcctcacggaggctgtgcacacgatgctgtccagccccttggaatacctccctccctgggatcccaaggactacagtgcccgctggaatgaaatttttggaaacaacttgggtgccttggcaatgttctgtgtgctgtatcctgagaacattgaagcccgagacatggccaaagactacatggagaggatggcagcgcagcctagttggttggtgaaagatgctccttgggatgaggtcccgcttgctcactccctggttggttttgccactgcttatgacttcttgtacaactacctgagcaagacacaacaggagaagtttcttgaagtgattgccaatgcctcagggtatatgtatgaaacttcatacaggagaggatggggatttcaatacctgcacaatcatcagcccaccaactgtatggctttgctcacgggaagcctagtcctgatgaatcaaggatatcttcaagaagcctacttatggaccaaacaagttctgaccatcatggagaaatctctggtcttgctcagggaggtgacggatggctccctctatgaaggagttgcgtatggcagctacaccactagatcactcttccaatacatgtttctcgtccagaggcacttcaacatcaaccactttggccatccgtggcttaaacaacactttgcatttatgtatagaaccatcctgccagggtttcaaaggactgtggctattgcggactcaaattacaactggttttatggtccagaaagccaattagtgttccttgataaatttgtcatgcgtaatggcagtggtaactggctagctgaccaaatcagaaggaaccgtgtggtggaaggtccaggaacaccatccaaagggcagcgctggtgcactctgcacacagaatttctctggtatgatggcagcttgaaatcggttcctcctccagactttggcacccctacactgcattattttgaagactggggtgtcgtgacttatggaagtgcactacctgcagaaatcaatagatctttcctttccttcaagtctggaaaactggggggacgtgcaatatatgacattgtccacagaaacaaatacaaagattggatcaaaggatggagaaattttaatgcagggcatgaacatcctgatcaaaactcatttacttttgctcccaatggtgtgcctttcattactgaggctctgtacgggccaaagtacaccttcttcaacaatgttttgatgttttccccagctgtgtcaaagagctgcttttctccctgggtgggtcaggtcacagaagactgctcatcaaaatggtctaaatacaagcatgacctggcagctagttgtcaggggagggtggttgcagcagaggagaaaaatggggtggttttcatccgaggagaaggtgtgggagcttataacccccagctcaacctgaagaatgttcagaggaatctcatcctcctacatccacagctgcttctccttgtagaccaaatacacctgggagaggagagtcccttggagacagcagcgagcttcttccataatgtggatgttccttttgaggagactgtggtagatggtgtccatggggctttcatcaggcagagagatggtctctataaaatgtactggatggacgatactggctacagcgagaaagcaacctttgcctcagtgacatatcctcggggctatccctacaacgggacaaactatgtgaatgtcaccatgcacctccgaagtcccatcaccagggcagcttacctcttcatagggccatctatagatgttcagagcttcactgtccacggagactctcagcaactggatgtgttcatagccaccagcaaacatgcctacgccacatacctgtggacaggtgaggccacaggacagtctgcctttgcacaggtcattgctgatcgtcacaaaattctgtttgaccggaattcagccatcaagagcagcattgtccctgaggtgaaggactatgctgctattgtggaacagaacttgcagcattttaaaccagtgtttcagctgctggagaagcagatactgtcccgagtccggaacacagctagctttaggaagactgctgaacgcctgctgagattttcagataagagacagactgaggaggccattgacaggatttttgccatatcacagcaacagcagcagcaaagcaagtcaaagaaaaaccgaagggcaggcaaacgctataaatttgtggatgctgtccctgatatttttgcacagattgaagtcaatgagaaaaagattagacagaaagctcagattttggcacagaaagaactacccatagatgaagatgaagaaatgaaagaccttttagattttgcagatgtaacatacgagaaacataaaaatgggggcttgattaaaggccggtttggacaggcacggatggtgacaactacacacagcagggccccatcactgtctgcttcctataccaggttgttcctgattctgaacattgctattttctttgtcatgttggcaatgcaactgacttatttccagagggcccagagcctacatggccaaagatgtctttatgcagttcttctcatagatagctgtattttattatggttgtactcttcttgttcccaatcacagtgttagcactgaagctataaattacctggtcattttgtgatcacaagagtctatgcaaaaaaaaaaatttctttaccccagattatcagatttttttccctcagattcattttaacaaattaagggaagatattttgacacaagaaagcaggaacgtggagaaattggagcaggaaaagaaattatcaaagcaatagaaatagcttggtggtcctatggtgtttttggaagtatttggcattgctaattgagcagtccatatagtactacttttagaagaaacaaaaagtctattttttaaagtaatgttttttcttatgagaaaaaggtttagatagaattgggttttattaatattaatttaatgctattagcaatttccatatactatattgtggaaaagactgaagaatacaattctgagaaatataaaaaaattttaatggtatactcatgttgaaagataaatgttgctaagtcctggtatgatggtgtgagcttccttggggaagtacttcttgagttatgtaactaacaggatgttttactacagatctggatggctattcagataacatggcaaaaaatgatagcagaagatcattaaaaacttaaaatatattttattagaaaacatttatctatgaatgaatatttccttgatgctggtctctgcacacatatgcttggttacttgcatgcattcattggttgttcaataagtgagatgattacagataatactgtattttccttatatggaaaaccgttatagacccaataacaactaaacctttcaaaagaaaatattttctattatgaatgttgattttcataccaaagaagatggagagtctaaaatttggatatgattcttatgtttttttaatagaaaaccttcttcaagtttattttcctaaataaacatcataattgtgaaaaaaaaaaaaaaaaaaaaaaaaaaaaaaaaaaaaaaaa

SEQ ID NO: 3617 - DNA, 1322 bp, Homo Sapiens
  NM_013353
agagctaaaataataaaatgctgagctcactgttcccccaccctctcccccggcaccgggctcctcctgctgctgggacagtgctctagtagaacagacagacctactgacacaggggaggtgagaagggaggtgaccaccaggactggctctgtgagtaccacacagtggggagggggtgggggccaccatgtcatcatatcagaaggaactggagaaatacagagacatagatgaagatgagatcctaaggaccttgagccccgaggagctagagcagctggactgcgaactacaggagatggatcctgagaacatgctcctgccagctggactaagacaacgtgaccagacaaagaagagcccaacggggccactggaccgagaggcccttttgcagtacttggagcaacaggcactagaagtcaaagagcgtgatgacttggtgcccttcacaggcgagaagaaggggaaaccctatattcagcccaagagggaaatcccagcagaggagcagatcaccctggagcctgagctggaggaggcactggcacatgccacagatgctgaaatgtgtgacattgcagcaattctggacatgtacacactgatgagtaacaagcaatactatgatgccctctgcagtggagaaatctgcaacactgaaggcattagcagtgtggtacagcctgacaagtataagccagtgccggatgaacccccaaatcccacaaacattgaggagatactaaagagggtccgaagcaatgacaaggagctggaggaggtgaacttgaataatatacaggacatcccaatacccatgctaagtgagctgtgtgaggcaatgaaggcaaatacctatgtgcggagcttcagtctggtagccacgaggagtggtgaccccattgccaatgcagtggctgacatgttgcgtgagaatcgtagcctccagagcctaaacatcgaatccaacttcattagcagcacaggactcatggctgtgctgaaggcagttcgggaaaatgccacactcactgagctccgtgtagacaatcagcgccagtggcctggtgatgcagtggagatggagatggccaccgtgctagagcagtgtccctctattgtccgctttggctaccactttacacagcaggggccacgagctcgggcagcccaggccatgacccgaaacaatgaactacgtcgccagcaaaagaagagataacactgcatttccctttaccaactagcgctgggagcactggacacttaaatcctcatctgtcctcctttcctgtaaataaaagcccttctatcca

SEQ ID NO: 3618 - DNA, 2646 bp, Homo Sapiens
  NM_013354
atctagcgcccccgtcaggacgtgcgaaaagcgacggcgcagcacggtgcggcgcagctcctgctcgcctttcccttcgctgggcgagaggtgtctatggggcacccgctgccgccgccgctaccgccaccgccaccgccaccgccgccgagtgctgtctctatggcgaggaggaggaggaggagcgcgagctcagcgacacaagtacataaataaaggataaaatattttatgaaacaaatcttcaatcaagtataacattttgatgcttggcatctagactcccttgtgccctcactatgccagcggcaactgtagatcatagccaaagaatttgtgaagtttgggcttgcaacttggatgaagagatgaagaaaattcgtcaagttatccgaaaatataattacgttgctatggacaccgagtttccaggtgtggttgcaagacccattggagaattcaggagcaatgctgactatcaataccaactattgcggtgtaatgtagacttgttaaagataattcagctaggactgacatttatgaatgagcaaggagaataccctccaggaacttcaacttggcagtttaattttaaatttaatttgacggaggacatgtatgcccaggactctatagagctactaacaacatctggtatccagtttaaaaaacatgaggaggaaggaattgaaacccagtactttgcagaacttcttatgacttctggagtggtcctctgtgaaggggtcaaatggttgtcatttcatagcggttacgactttggctacttaatcaaaatcctaaccaactctaacttgcctgaagaagaacttgacttctttgagatccttcgattgttttttcctgtcatttatgatgtgaagtacctcatgaagagctgcaaaaatctcaaaggtggattacaggaggtggcagaacagttagagctggaacggataggaccacaacatcaggcaggatctgattcattgctcacaggaatggcctttttcaaaatgagagaaatgttctttgaagatcatattgatgatgccaaatattgtggtcatttgtatggccttggttctggttcatcctatgtacagaatggcacagggaatgcatatgaagaggaagccaacaagcagtcatgacatgaaatagtccttttatttttatttcgagctacacacatgcttgtatataggttttatctctggttgaatccctcgaacaatagacagtacctttcccccccctttcatggcccattttattgtctgcctttcagtactaagtatgaccgttcctatctcagatcttaataaaaagaaaaaaaaaaacgcattcaggttaaatttggccttaatttaatatacttgttagcaagcgtgtgtgacagagagtggggaaagctacatcattgaatattttgataaactttaccgacttgagtttggtttatttttcccttttcctaaattaactagcactgactgtaatttatttccctgtttcacgtctctcccttccattctgcaggagttttagctatttgagatcgtggaccatcagttttgcactttagagagtgtttctgactctaaacctgttttatcagaaaatttgttttttcttgatcttagctggaaaaatctgccaactttacacagtatttacttggttttgacccacagaatatagcacgttgtgcaaactgtcgattcagcgaaacttaaaaaagacaagaaactactgaggagcttagtaactgctgtttctgtacgtagtgtttaatcttccaagcacatctagtgtctgtcagtttctaattggcatgtgtaggctgctctgtgactgaagaattttcaaaccagctttacacccttcaggaaaaatcccttgtgattggatgtttactatctgccaggaaactggtactcaagatgttgaagctacagttattttatgatagcacacttcccttgatctgcttatttttattccatcaccatttaccctttttttttttttaaattttgtagccattcttatgatgctcttgatttgttggttacacaaatcaattttattaaaaatccaaagataagtctttaggtatattttgtaccaaattaaattagaagacaaaaattgtgctttcatagttgctacaaaggtaaataatggagagatttggtacaaaacaacaaaatatatatatattctcatatatatatatatagctgataaaattacctgaggagtgtaatgcttatttttttgtgtatatctttgcaatctattttatatatattgacaaaagagactgtgaaatacttagccatgcagaatatgtgaccagaccagagcatgtgtaggaagactttacggtaatcattaactctaccccgaaatgatggactacaagttataatgtgtgttacctacacttcaatcagtaatattagcaaatctccaaatgttagtcacattggtttgtctcccttgtacattctttattcatgatattacagtgctgtaactgggtggtcctttttaaacaaaacattatttgcaaaacagagggtattatttgtttttaaagcttttgtaaataaaggcttcaaaatgttttcttat

SEQ ID NO: 3619 - DNA, 2047 bp, Homo Sapiens
  NM_013363
gaacaaacgggatattcagcagtggcctgtggctgccagagcagctcctcaggggaaactaagcgtcgagtcagacggcaccataatcgcctttaaaagtgcctccgccctgccggccgcgtatcccccggctacctgggccgccccgcggcggtgcgcgcgtgagagggagcgcgcgggcagccgagcgccggtgtgagccagcgctgctgccagtgtgagcggcggtgtgagcgcggtgggtgcggaggggcgtgtgtgccggcgcgcgcgccgtggggtgcaaaccccgagcgtctacgctgccatgaggggcgcgaacgcctgggcgccactctgcctgctgctggctgccgccacccagctctcgcggcagcagtccccagagagacctgttttcacatgtggtggcattcttactggagagtctggatttattggcagtgaaggttttcctggagtgtaccctccaaatagcaaatgtacttggaaaatcacagttcccgaaggaaaagtagtcgttctcaatttccgattcatagacctcgagagtgacaacctgtgccgctatgactttgtggatgtgtacaatggccatgccaatggccagcgcattggccgcttctgtggcactttccggcctggagcccttgtgtccagtggcaacaagatgatggtgcagatgatttctgatgccaacacagctggcaatggcttcatggccatgttctccgctgctgaaccaaacgaaagaggggatcagtattgtggaggactccttgacagaccttccggctcttttaaaacccccaactggccagaccgggattaccctgcaggagtcacttgtgtgtggcacattgtagccccaaagaatcagcttatagaattaaagtttgagaagtttgatgtggagcgagataactactgccgatatgattatgtggctgtgtttaatggcggggaagtcaacgatgctagaagaattggaaagtattgtggtgatagtccacctgcgccaattgtgtctgagagaaatgaacttcttattcagtttttatcagacttaagtttaactgcagatgggtttattggtcactacatattcaggccaaaaaaactgcctacaactacagaacagcctgtcaccaccacattccctgtaaccacgggtttaaaacccaccgtggccttgtgtcaacaaaagtgtagacggacggggactctggagggcaattattgttcaagtgactttgtattagccggcactgttatcacaaccatcactcgcgatgggagtttgcacgccacagtctcgatcatcaacatctacaaagagggaaatttggcgattcagcaggcgggcaagaacatgagtgccaggctgactgtcgtctgcaagcagtgccctctcctcagaagaggtctaaattacattattatgggccaagtaggtgaagatgggcgaggcaaaatcatgccaaacagctttatcatgatgttcaagaccaagaatcagaagctcctggatgccttaaaaaataagcaatgttaacagtgaactgtgtccatttaagctgtattctgccattgcctttgaaagatctatgttctctcagtagaaaaaaaaatacttataaaattacatattctgaaagaggattccgaaagatgggactggttgactcttcacatgatggaggtatgaggcctccgagatagctgagggaagttctttgcctgctgtcagaggagcagctatctgattggaaacctgccgacttagtgcggtgataggaagctaaaagtgtcaagcgttgacagcttggaagcgtttatttatacatctctgtaaaaggatattttagaattgagttgtgtgaagatgtcaaaaaaagattttagaagtgcaatatttatagtgttatttgtttcaccttcaagcctttgccctgaggtgttacaatcttgtcttgcgttttctaaatcaatgcttaataaaatatttttaaaggattacagaacaaccaaaaaaaaaaaaaaaaaa

SEQ ID NO: 3620 - DNA, 3771 bp, Homo Sapiens
  NM_013364
ccgccgccgcgcccccgccccgtgtccgcactgcagagagccgcggcgagcaggcgccggcgcactggcccacgtgctgcgcgagcgagggagagccacagtctgagcgaacgtccgcgctgggagccaggggtgcccgacccccgtccgccgccgccgccgccgccgcgcatagcccccggagagccctctggggaccccgaccagaagggaccttgccctgggagaaggctgtggagacctgggccttctgcgatcaccctaggagttgatccagatatgtgcctcacgccctgatcactccccccaaattagtatccgcagagattcgaggacatgccgttgaccttgttacaggactggtgtcggggggaacacctgaacacccggaggtgcatgctcatcctggggatccccgaggactgtggcgaggatgagtttgaggagacactccaggaggcttgcaggcacctgggcagatacagggtgattggcaggatgtttaggagggaggagaacgcccaggcgattctactggagctggcacaagatatcgactatgctttgctcccaagggaaataccaggaaagggggggccctgggaagtgattgtaaaaccccgtaactcagatggggaatttctcaacagactgaaccgcttcttagaggaggagaggcggaccgtgtcagatatgaaccgagtcctcgggtcggacaccaattgttcggctccaagagtgactatatcaccagagttctggacctgggcccagactctgggggcagcagtgcagcctctgctagaacaaatgttgtaccgagaactaagagtgttttctgggaacaccatatccatcccaggtgcactggcctttgatgcctggcttgagcacaccactgagatgctacagatgtggcaggtgcccgagggggaaaagaggcggaggctgatggaatgcttacggggccctgctctccaggtggtcagtgggctccgggccagcaatgcttccataactgtggaggagtgcctggctgccttgcagcaggtgttcggacctgtggagagccataaaattgcccaggtgaagttgtgtaaagcctatcaggaggcaggagagaaagtatctagctttgtgttacgtttggaacccctgctccaaagagctgtagaaaacaatgtggtatcacgtagaaacgtgaatcagactcgcctgaaacgagtcttaagtggggccacccttcctgacaaactccgagataagcttaagctgatgaaacagcgaaggaagcctcctggtttcctggccctggtgaagctcctgcgtgaggaggaggaatgggaggccactttaggtccagatagggagagtctggaggggctggaagtagccccaaggccacctgccaggatcactggggttggggcagtacctctccctgcctctggcaacagttttgatgtgaggccttcccagggctaccggcgccggaggggcagaggccaacaccgaaggggtggtgtggcaagggctggctctcgaggctcaagaaaacggaaacgccacacattctgctatagctgtggggaagacggccacatcagggtacagtgcatcaacccctccaacctgctcttggtaaagcagaagaaacaggctgcagttgagtcgggaaacgggaactgggcttgggacaagagccatcccaagtccaaggccaagtaggctcgggagaacagggcaacatttcctaccacaggccaaggagacaaaagagatattggaaggaggggaaagagaagcccagacaaacagcagatgagttgagtggggcagagggacagggcagccagaccaaggccaagccttctcacccttggccagctggaagggacttcagcaaccaagaccacctggcaacaggctcagtgggggtcaggtccaggtccccgaagaggtgctggagaggaaagcagggagccactgcatccagcacatggggtgcctgggcctcagatggggaccccaaagaagcagaagctgaagaaggtacggctgggggttctgtcctgctcatccaaccacccctaaatacccaccctgtggactttgagctgaacatgcccactggcccccaggccacatgggacctggaggagcctacctggggcctgcccctgccagcaggtgccagggctggtgaggaagagctggggggcagaggtaaagccctgcaggggaggccacagggtccatcccgtcttcaggatcatctacactgcactaggggagccccaggaaggcagcaccctggaggccctgtgccagtgaggacaggagaccctaaggccccgggagcccagtgccagccagaggttgtgcaggcaaggagaccaaagattgatgagaagacccccagcaggggtactgggtacccggcaggccagtgccctcacagttgacttggaccagggtggctgtgaagggaagtctttgttgcaaaggaggaggaggaaaagggaggacttggtagggttttgtttcttctgcttgtttctgtacagggccaccagactcctggagagatcaagcaaggagaacctggggctgccatggccaaagcaactcaacagatgccaatgccaattccaaggccagccacaaccctgccaccttggggaatccagcctggaggcatcccctaagcagccagccatggcctgggtggaggcacctgaagacgtctgtcccaaactcccccagccctgagctgggagatgacagggggaaagaggccctctcaagggtgccagatgcctgggtctcccaagaggggtcccccaactcaccgttcccgggacaggctgccccctgttccaggaagctcatcctcacctgtgtaggcccctgtagtgacccacgcgtccagcagacgcccacccaccgctagccgttgttcctgtgcaaagtagtgtgctatgcacccacccaggtggccgcctctgggcccaaggcacatgctgtgagcttcctgtgagcccaggctctgctcactgctgtcccgcgtcatgagcaccacctctgctttccctgtgtagatctaggccagtggctgcttgttcttgtggagctgtgtgtgttcttctctgagcagctcctccccggagtcccccagcacagtcccaggagatgacaggaaggaagcaccagggcaaggcggacgctcaccctgtgaccacgatggtgaccgtgactgtgggaggaagaactggacccaggacggagcggggctgccctgcctgaggctcccgaggagctttgtgctttggtgttccacccctgttgttactcatgactcagtttccttgacctggtagggtgttccctgctgtgttttccagtgtcctgtgactgtcctgtgcgggccatagggcagggccctgtcccagcagatgggcttgggagggggctccctaaagccagtggacactgccagagtctaccttcctggcaagaggcagaccccggggccctcaggaaggagggagttggcagcgggggctgcagcaggagtaggagcagatgaggcgtcttgccaggaacctcaggaggagggggcccgggacctgtgtgggacctgtgtcctgtggtggccgtttgcagtttctctctgtgttgtgattcccttctcttcaacgttttcagtacgtgtttctcttcaataaacttcattcagtgttccagccggaaaaaaaaaaaaaaaaaaaa

SEQ ID NO: 3621 - DNA, 2733 bp, Homo Sapiens
  NM_013366
tcatggctgcgcgtgcagacgtgcgtcatcgccgcgcgccgcgccgagcgaatctcggagtcggtgggtgcagatggcggcggcagttgtggtggcggagggggacagcgactcccggcccggacaggagttgttagtggcctggaacaccgtgagcaccggcctggtgccgccggctgcgctggggctggtgtcttcccggaccagcggtgcagtcccgccaaaggaagaggagctccgggcggcggtggaggttctgaggggccacgggctacactcggtcctggaggagtggttcgtggaggtgctgcagaacgatctgcaggccaacatctcccctgagttctggaatgccatctcccaatgcgagaactctgcggatgagccccagtgccttttgctactccttgacgcttttggcctgctggagagccgcctggatccctacctgcgtagcctagagctgctggagaaatggactcgcctgggcttgctgatgggcactggtgctcaggggctgcgagaagaagtccacactatgttgcgcggagtcttgttctttagcacccccagaaccttccaagagatgatccagcgtctgtatgggtgcttcttgagagtctatatgcagagtaagaggaagggggaagggggcacagacccggaactggaaggggagctggacagccggtatgcccgtcgccggtactaccggctcctgcagagcccgctgtgtgcagggtgcagcagtgacaagcaacagtgctggtgtcgccaggctctggagcagttccatcagctcagccaggtcttacacaggctcagtctgctggagcgggtcagtgccgaggctgtgaccaccaccctgcaccaggtgacccgggagaggatggaggaccgttgccggggcgagtacgagcgctccttcctgcgtgagttccacaagtggatcgagcgggtggtcggctggctcggcaaggtgttcctgcaggacggccccgccaggcccgcatctcccgaggccggcaacaccctgcgccgctggcgctgccacgtgcaaaggttcttctaccgcatctacgccagcctgcgcatcgaggagctcttcagcatcgtccgagacttcccagactcccggccagccatcgaggacctcaagtactgcctggagaggacggaccagaggcagcagctgctcgtgtccctcaaggctgccctggagactcggctcctgcatccaggcgtcaacacgtgtgacatcatcaccctctatatctctgccatcaaggcgctgcgcgtgctggacccttccatggtcatcctggaggtggcctgtgagcctatccgccgctacctgaggacgcgggaggacacagtgcggcagattgtggctgggctgacgggggactcggacgggacaggggacctggctgttgagctgtccaagaccgacccggcgagcctggagacaggccaggacagtgaggatgactcaggcgagccagaggactgggtcccggaccctgtggatgccgatccagggaagtcgagctccaagcggcgttcatcggacatcatcagcctgctggtcagcatctacggcagcaaggacctcttcatcaatgagtaccgctcgctgctggccgaccgcctgctgcaccagttcagcttcagccccgagcgggagatccgcaacgtggagctgctgaagctgcgctttggcgaggccccaatgcacttctgtgaagtcatgctgaaggacatggcggactcccgccgcatcaatgccaacatccgggaggaggatgagaagcggccagcagaggagcagccaccgttcggggtctacgctgtcatcctgtccagtgagttctggccgcccttcaaggacgagaagctggaggtccccgaggatatcagggcagccctggaggcttactgcaagaagtatgagcagctcaaggccatgcggaccctcagttggaagcacaccctgggcctggtgaccatggacgtggagctggccgaccgcacgctgtctgtggcggtcaccccagtacaggcggtgatcttgctgtattttcaggaccaagccagctggaccctggaggaactgagcaaggcggtgaagatgcccgtggcgctgctgcggcggcggatgtccgtgtggctgcagcagggtgtgctgcgtgaggagccccccggcaccttctctgtcattgaggaggagcggcctcaggaccgggacaacatggtgctcattgacagtgacgacgagagcgactccggcatggcctcccaggccgaccagaaggaggaggagctgctgctcttctggacgtacatccaggccatgctgaccaacctggagagcctctcactggatcgtatctacaacatgctccgcatgtttgtggtgactgggcctgcactggccgagattgacctgcaggagctgcagggctacctgcagaagaaggtgcgggaccagcagctcgtctactcggccggcgtctaccgcctgcccaagaactgcagctgacacatcgcccgcccgcccgcccgcccgccaggcgctgccctgcaggtgctctcgtcctcccgtgccagcccccgcccgcccgtgtcccagaatgcactgctgaggagcatgcccacccccacccccgcagtgtgcagattaaagcaagtcagatcatcaaaaaaaaaaaaaaaaaaaaaaaaaaaaaaaaa

SEQ ID NO: 3622 - DNA, 2701 bp, Homo Sapiens
  NM_013367
gtgcctggagcgcgcgacagcggcggggcggggcggcctggaggctgtggcgcgcggccggcagagggaggggagaggccactggggccgtgttagtctgccggtggggactcttgcagggccgtccccatgttgcgttttccgacctgtttcccatccttccgggtggtgggagagaagcagctcccgcaggagattattttcctggtctggtcgcccaagcgggatctcattgctttggccaacacagctggcgaggttttacttcatcgactggcaagttttcatcgagtttggagttttccaccaaatgaaaatacaggaaaggaggtgacgtgtctggcatggagaccagatggcaaacttttggcctttgctcttgctgataccaagaaaattgttttgtgtgatgtagaaaaacctgagagcttacactctttttctgtggaggctccagtttcctgtatgcattggatggaagtgacagtagaaagcagtgttctcacatcattttataatgctgaggatgaatcaaatcttctcttacctaaactacctacactgccaaaaaactatagcaacacctcaaaaatatttagtgaagaaaattctgatgaaattattaagctcttgggagacgtcaggcttaatattctcgtccttggaggaagctctggatttattgagctttatgcttatggaatgtttaaaattgctcgagtcacagggattgctggtacttgtcttgcattatgtttatcaagtgatttgaaatcattatcagtggtcacagaagtctctaccaatggtgcttcagaagtttcatactttcagcttgaaactaatctgttgtactctttcttacctgaagtaactcggatggccagaaagtttactcatatttcagctctgttacagtatataaatttgtcactaacatgtatgtgtgaagcatgggaagaaatactaatgcagatggattctcgtctcaccaagtttgtgcaggaaaagaacacaaccacatcagtgcaagatgagttcatgcacttgctattatgggggaaagcaagtgctgaacttcagactctcttgatgaatcagttaacagtaaagggcttgaaaaagcttggccagtctatagagtcatcatactccagtatacaaaaattggtcataagtcatttacagagtggctcggagtctttattataccatttgagtgaattgaaaggaatggcttcatggaagcaaaaatatgaacctcttggactagatgctgcaggaatcgaagaagctataactgctgtgggttcttttatactcaaggcaaatgaacttcttcaagttatagatagtagtatgaaaaacttcaaagcattttttcggtggctttatgtggcaatgttgagaatgacagaagaccatgtgcttcccgagctgaataagatgactcagaaagatatcacatttgttgctgaatttcttactgaacatttcaatgaggctccagacctttataatcgaaaaggaaaatactttaacgttgaaagagttggtcagtacttgaaagatgaagatgatgatcttgtgtcaccccctaacacagaaggaaaccagtggtatgactttcttcaaaatagcagccaccttaaagaaagtcctttgctgtttccttattatcctcgaaaatcattgcattttgtgaaaaggcggatggagaatattattgatcagtgtttgcaaaagccagcagatgtaattggaaaatcgatgaatcaagcaatctgtattccattgtatagagataccagaagtgaggattctacacgtagattgttcaaatttccttttctgtggaataataaaacttcaaatctacattatcttctttttactattctagaagattcactttataaaatgtgcatcttaaggagacatactgatatttctcaatctgtgagtaatggactaattgctattaaatttgggagctttacatatgccacaacagaaaaagtcagaagaagcatctacagttgtttagatgcacagttttatgatgatgaaactgtaacagtagttcttaaagacactgtaggacgtgaaggaagagatagactcttggtccagctgcctttgtctttagtatataacagtgaagattctgcagaatatcagttcactgggacttattctacaaggctagatgaacagtgtagtgctattcccacccgtaccatgcattttgagaagcactggagattactggaaagtatgaaagcacagtatgttgctgggaatggttttcgaaaagtgtcctgtgtgttaagctcaaatcttcgtcatgtgagagtatttgaaatggacatagatgatgaatgggagctcgatgagtcttcagatgaagaggaggaggccagtaataagcctgtaaaaataaaggaagaagtgttgtcggagtcagaggcagagaaccaacaagctggtgctgccgctttagctccagagatagtcattaaagtggaaaaacttgaccctgagctagactcctaatctagcttgccattattgtgtgtgtaattatggccaaaaggacataggagatggactaagatgtcttggaccacctttgtgtaacaaagaaataaacagtaaattttattttttcaaaaaaaaaaaaaaaaaaaaaaaaaaaaaa

SEQ ID NO: 3623 - DNA, 1527 bp, Homo Sapiens
  NM_013368
aggaaactgaggccctgagaattgactcattcagatcacttcccatgatcacgcagctgagcagtttccaatacagaattcagatttggggttccctacttccaatccaggtctctgtgctccacacttgtctttcgtgctccatgtttgaagaaattaatattgtggaagaacagttttaaggcttagaggaacttgagttaggatccgtacttggcagatgaggaaattgattctcatggatgtaaattcactgtttgaggccacaacagggcatcatggtgggaggcttgaagaggaaacactctgatttggaagaggaggaggagaggtgggagtggagtccagcaggccttcagagctaccagcaagccctgctccgcatctccctagacaaagtccagcgcagcctgggcccccgagcacccagcctccgcaggcatgtcctcatccataacaccctccaacagctgcaggctgcacttcgcctggctcccgcccctgccctgccccccgagcccctcttcctgggcgaggaggatttctccctgtcagccaccattggctctatcctcagggagctggacacctccatggatgggactgagccccctcagaatccagtgactccccttggcctccagaatgaagtgccaccccagcctgatccagtcttcttagaagctctgagctcccggtacttgggggactctggcctggatgacttctttctggacattgacacatctgcggtagaaaaggagcctgcacgggccccaccagagcctcctcacaacctcttctgtgccccaggttcttgggagtggaatgaactggatcacatcatggaaatcattctggggtcctaaaactgtgatagaggggatcgatccttcctcatgtcatcttcggtggcctggatccctgaatgcaactctgggtgtgtgtttttgtgggggctcgaagcagtgactatggcctcctttgttcccatttcagggttccacaaactgtcttgcatgtgtgtgtgtgtctggttaccccgaccttctgtgaaggtgggtcttcctgaattaatttatctattccaaatgccttaacgagactctgtttctgggagtctgattttccacttacacatttcttccacctttcctgctagttcccactcccctgtgaccactggggcctcagggaagataaagaaagctgggcctgtcgaaggatgacagggatgtgctgccaggttgctatagaaacccaggctctgcctcttgcaccttgagggggtgggaggggctggtgtcctccctccaggctgaaccccacttcctcggcaggaccccagtctcagcagcctcctgatttcataaccaggccggaccacgtgcaatagggtggaaaccaaactgctccatgccgggttatttaaaagaaaggcagagtttgtggtggcttttttttttttttttggattgtttgtaatttttttaaataaaagtattttggaaggagggaaaaaaaaaa

SEQ ID NO: 3624 - DNA, 5029 bp, Homo Sapiens
  NM_013373
gccgcgggtcctgcgccgcgtccagcccgcccgcccgaccccggcccgaccccggccggccctgcccgcccggccccggggagggatgcggcggcgcggcgcccaggatgccccgcagccccgggacgcgcctcaaacccgccaagtacatcccggtggccacggccgccgcgctgctggtcggctccagcaccctcttcttcgtgttcacgtgcccgtggttgacacgagctgtgtccccagctgttcccgtctacaatggcatcatcttcctctttgtcctggccaacttcagcatggccactttcatggaccctggtgttttcccccgagcggatgaggatgaggacaaggaggacgacttccgggctccgctgtacaagaacgtggatgtgcgaggtatccaggtccgcatgaagtggtgtgccacgtgccacttctaccgcccgccgcgctgctcccactgcagcgtctgtgacaactgtgtagaggactttgaccaccactgcccctgggtcaacaactgcatcgggcgtcgaaactatcgctacttcttcctgttcctgctgtcactcagtgcacacatggtgggcgtcgtggccttcggcctggtctacgtgctgaaccacgctgaggggctgggagccgcgcacaccaccatcaccatggctgtcatgtgtgtggccggcctcttcttcatccctgtcattggcctcactggcttccatgtggtgctggtcactcgggggcgcaccaccaacgagcaggtgactgggaagttccgcgggggtgtgaaccctttcacccgaggctgctgtgggaatgtggagcacgtgctgtgtagccccctggcgccccggtacgtggtggagccaccccggctgccgctcgcggtgagtttgaagccgcctttccttaggcctgaactcctggaccgagctgcaccgctcaaggtcaagcttagtgacaacgggctgaaggctggcctgggccgtagcaagtccaagggcagcctggaccggctggatgagaagccactggacttggggccaccactgccccccaagatagaggctggcacgttcagcagtgacctgcagaccccgcgcccaggcagtgctgagagtgccctgtcggtgcagaggaccagccccccgacacctgccatgtacaagtttaggccggctttccccacgggtcccaaggtgcccttctgtggaccaggcgagcaggttccaggccctgattccctgaccctgggggacgacagcatccgtagcctggactttgtgtccgagccgagcctggacctccctgactatgggccagggggcctgcatgcagcctacccgccatccccaccgctcagcgcctctgatgccttctcgggcgctttgcgctccctgagcctcaaggcctcgagccggcggggcggggatcatgtggccctgcagcccctgcgctctgagggggggccccccacgccccaccgtagcatttttgccccccatgcactgcccaaccgcaacggcagcctgtcctatgacagcctgctcaatcctggctcgcctggtggccacgcctgccctgcccacccagcagttggcgtggccggataccactcaccctacctgcatcctggggcaacgggcgacccgccacggcccctaccccgcagcttcagccccgtgctgggcccccgcccccgggagccctcgcctgtgcgctacgacaacctgtccaggaccatcatggcatccatccaggagcgcaaggacagggaggagcgtgagcgcctgctgcgctcccaggccgactcactcttcggcgactcaggcgtctatgacgctcccagctcctacagcctgcagcaggccagtgtgctgtccgagggcccccgaggtcccgcgctgcgctatggctccagagacgaccttgtggctgggcccggcttcggtggcgcccgcaaccctgccctgcagacgtcactgtcctcgctgtccagctccgtgagccgtgcaccgcggacgtcgtcctcctccctgcaggctgatcaggccagcagcaacgccccggggccccggcccagcagtggctcacacaggtcacctgcacgccagggcctgccctccccgcccggcactccccactcaccatcctacgcgggccccaaagctgtcgccttcatccacacggacctcccagagccaccgccctcgctgaccgtgcagagggaccaccctcagctgaagactcccccaagtaagcttaatgggcagtccccgggcctggcccggctgggacctgccaccggccccccagggccctctgccagccctacacggcacacgctggttaagaaggtgtccggcgtgggtgggaccacctacgagatctcggtgtgaggactgactgccacacatccgccatggtgccacggggaccaggaccccacagcgcaccccccctccccaccaacttctctgccccagggacccgaggccaccccagcctggtgtggacccatcggcgggagagagtgccacgcctccacagcttgccccaagcgctctgcctgcccgtccactcatctgcccatggggaagtcggctcactgggacaagggccactgggctggtctgtgtctgggcctgtcccatggctggggcagtgagggggcccagtcagcctctttggggcaccctctctcagccaggcttggcccactgccatcacccagcaccccagatcaccgccaggccagcccccaatggtccccttacggacaggtcccagagatggacagaggcacccagggcccccaccgtccttctgacacagcctgtgggctcccggaccgagtgtcccccgccaggctactcctaactaacgcgttgcctttcacggaccccgctggaagcttgtagcttggcaaggctgatgcttctgccctggcctgctctgggtggtggtggataggtggacagacggccagccagccagctgtggccgggggcccggctccatgtgtcccgtgtctgtgtgctgtgctgccgcgccgtgtctgatgtgtcagtgctccggccgccgctgtccctttcatcaaagccttaacctttgctttatgctcttgtgggaggcgacgggggggcaggcgggagcaggcacgggggtgatgctgccacagggggctggtgacacccagagccccctccccagccctcaggccctccctgccaaactggagaaccccaccccaaggcatgccacgtccgcagccccggcctggctgcggtgctcgcgccgtgggaaagcacactggggaggggtcagtgcttcccttggtgtcagggacctgagagtaagcacatgacagcgtctgcttgcgttgtgtctgttttatgtttttatatctacatctatatatctataattttattaaaaaaaagaaaaagagttattttgattctttccttgggcaaggccagggctattgctgcaggatcccgagttaggggagggcaggggccgggccccagaagagggagtggctgctgtctggtgtgcaggggtcggtgggttcctcaggggcatttctgccgacttgggctgagtcagaggcttgggaagagggggcggccgatggtctgtggctgggaagtgtgagggtctctcgccttgggtctgtgtcagttctggcagtgacagggtgtttgggggaaagacttgggtctgccgctacccacaggggactctcaggaacccgagagcttggggagatgaaatgggggtgcataggggccacctgttggctcagggccctgtgggggccgctgaacctgctggaactctcctgcctgccacatgccaggggcagggctgagggagtgtgagggatgcacagctgttcagggctgagacattctgggctggggctgtcccagcgtgggaggcgtgcgggctgtagggccccgaagctgacctccacctttctgcttctctctcacggacgccgcggcccgcagggggcggattggcacctgcacccgtggatgggggcggcgtggccagccttgggtgcctcctgggctgcacctgtgccaccttggccgcccggaggaccgcccaccactgcgggccccctggagccaggccgccggggcacccccacgcggggccatgtgccgcctgcacttggctgcctccagtcttttccccagcctctcggggccctagcaggatgacaagtaggcggctctggggcccaggacagcccagctggggacccaggaggtcagactgcagtggaccctggggcagggctgggggtgggctgggctctctgctccaccagccacagcttgacagattcccagcctgccagggcctgagaccctgtgtccacatgacctcagggagtcccccacctgctgcagggggtccagcaccccacaggggggcagtcccagagctgtggggaccggcacgacctttgcccagcctccctacccaaccaagcactttagactaagccacttcctcctcggggagcccaggcctccgtgggttgggctgggtggggggggggtctcaggttgcccctgaaggtctctgcactcctcctgcccttcccctgacacatgaacagatgccttaacttcctggagccaccagcctggtgagccattggcctctgcctgccaccaaggtcctgtggtcttggccagctccgcctgggccccactggggctgcctgcacccagagacgatgccggcgggatctcagagggcctgaggcccaagccctgtgtcctccagcagtggtacggcctgcggcagggtggcactccggccagcccttctccgtcacagggtccctgtccctgggtccaccctgggctgtggctctacatctcccatttggggacgagaaagccacaaaaccattctctattgttcttaagggtacccctgctaattaattccccaaataaaatttttggtgttgatcaaaaaaaaaaaaaaaaaa

SEQ ID NO: 3625 - DNA, 2255 bp, Homo Sapiens
  NM_013375
tacggccgtcgtgccgctcgtgtcagtcaacatggaggcagaggaatcggagaaggccgcaacggagcaagagccgctggaagggacagaacagacactagatgcggaggaggagcaggaggaatccgaagaagcggcctgtggcagcaagaagcgggtagtgccaggtattgtgtacctgggccatatcccgccgcgcttccggcccctgcacgtccgcaaccttctcagcgcctatggcgaggtcggacgcgtcttctttcaggctgaggaccggttcgtgagacgcaagaagaaggcagcagcagctgccggaggaaaaaagcggtcctacaccaaggactacaccgagggatgggtggagttccgtgacaagcgcatagccaagcgcgtggcggccagtctacacaacacgcctatgggtgcccgcaggcgcagccccttccgttatgatctttggaacctcaagtacttgcaccgtttcacctggtcccacctcagcgagcacctcgcctttgagcgccaggtgcgcaggcagcgcttgagagcggaggttgctcaagccaagcgtgagaccgacttctatcttcaaagtgtggaacggggacaacgctttcttgcggccgatggggaccctgctcgcccagatggctcctggacatttgcccagcgtcctactgagcaggaactgagggcccgtaaagcagcacggccagggggacgtgaacgggctcgcctggcaactgcccaggacaaggcccgctccaacaaagggctcctggccaggatctttggagccccgccaccctcagagagcatggagggaccttcccttgtcagggactcctgagggcctgggtggccccttccatttcctggccctgctctgcttcctgtctacctcatactagaatgatcgtgactacccgggcagacattttactgtgtttctcagaccaagtgtctactgatggcccaaacatggagttttgtgggcttccactgtccccactccgaactcctgtatgtgcctggctgagtcacctaattcatactgtcatactagcataattatgactattgcatatgcttgttttgtttgactcttggctgcctacgtctgtagggtcccctgaaaatcccacttcctgcccccagaaagggcctttatttccaactaggaggataatgcctagtccaggcaatctttctctgtttagcagtcacaggtgagggtggtattagcatcttttttatgtagaaaaaattgagttaatggggtggactgggttgggaagaaatacatttcctaatgtatttatagaaaataaaaatatttttatgtgcctttttatttttgttggtggggaggtcattggacaagttccaactttcatcttgtgttcccttcaccttcatatcctgatcttagagcccccctccccctgccacccaccttactgtttaacctggatttttttttctatttaatttttgtctaatatcttagcccagtttatcaatcagttatcttaagtcagcattttctaagccattgtttgaggaaacagtgacaataggtaataacacatcttagtattaagagttttacaggccactagtataagataggcatcgtggtagatgcatataaagggtggaatgggagccatggcaggtcatagagtcctctcaatgggaacctgattgatgatcacagtcttcagtggtgagtcagtcctcaccaagttttccagatcattcctacaaagtaaactgggagaataataagtctgaaagagtgtggagtgctcccacaattacaaagaatgcttcctgggtggagtgttgagttggaaccattgtaaaggtgggcaaagcctagtagagaaccagtgcacctcaggtgcacttacatatggtggggctgaggcaaagcagccctgtaggcttcaaagaatcagtgtaagccactaaaaggaactgaaaacctaggtgtcacaataaacagtctacacagtctcacgtagaccaaaattctgatcattttccaggctgttgcatgaagtgatagagtatgattataatttctgtttgcttgtgctgtttgtttttgtttttcatctgtcaatgtgatgatctgtgttttatagggtagagtggatttgtctactttggctgtaaaataccctaatcacattatgatcttgacaggtgcactttactggggagaataaaaaggaccatacggtaaa

SEQ ID NO: 3626 - DNA, 602 bp, Homo Sapiens
  NM_013378
cttcccagccctgtgccccaaagcacctggagcatatagccttgcagaacttctacttgcctgcctccctgcctctggccatggcctgccggtgcctcagcttccttctgatggggaccttcctgtcagtttcccagacagtcctggcccagctggatgcactgctggtcttcccaggccaagtggctcaactctcctgcacgctcagcccccagcacgtcaccatcagggactacggtgtgtcctggtaccagcagcgggcaggcagtgcccctcgatatctcctctactaccgctcggaggaggatcaccaccggcctgctgacatccccgatcgattctcggcagccaaggatgaggcccacaatgcctgtgtcctcaccattagtcccgtgcagcctgaagacgacgcggattactactgctctgttggctacggctttagtccctaggggtggggtgtgagatgggtgcctcccctctgcctcccatttctgcccctgaccttgggtcccttttaaactttctctgagccttgcttcccctctgtaaaatgggttaataatattcaacatgtcaacaacaaaaaaaaaaaaaaaaaa

SEQ ID NO: 3627 - DNA, 1633 bp, Homo Sapiens
  NM_013379
cccacgtgacgggcgcccgcggaaggcgacatgggctccgctccctgggccccggtcctgctgctggcgctcgggctgcgcggcctccaggcgggggcccgcagggccccggaccccggcttccaggagcgcttcttccagcagcgtctggaccacttcaacttcgagcgcttcggcaacaagaccttccctcagcgcttcctggtgtcggacaggttctgggtccggggcgaggggcccatcttcttctacactgggaacgagggcgacgtgtgggccttcgccaacaactcggccttcgtcgcggagctggcggccgagcggggggctctactggtcttcgcggagcaccgctactacgggaagtcgctgccgttcggtgcgcagtccacgcagcgcgggcacacggagctgctgacggtggagcaggccctggccgacttcgcagagctgctccgcgcgctacgacgcgacctcggggcccaggatgcccccgccatcgccttcggtggaagttatggggggatgctcagtgcctacctgaggatgaagtatccccacctggtggcgggggcgctggcggccagcgcgcccgttctagctgtggcaggcctcggcgactccaaccagttcttccgggacgtcacggcggactttgagggccagagtcccaaatgcacccagggtgtgcgggaagcgttccgacagatcaaggacttgttcctacagggagcctacgacacggtccgctgggagttcggcacctgccagccgctgtcagacgagaaggacctgacccagctcttcatgttcgcccggaatgccttcaccgtgctggccatgatggactacccctaccccactgacttcctgggtcccctccctgccaaccccgtcaaggtgggctgtgatcggctgctgagtgaggcccagaggatcacggggctgcgagcactggcagggctggtctacaacgcctcgggctccgagcactgctacgacatctaccggctctaccacagctgtgctgaccccactggctgcggcaccggccccgacgccagggcctgggactaccaggcctgcaccgagatcaacctgaccttcgccagcaacaatgtgaccgatatgttcccggacctgcccttcactgacgagctccgccagcggtactgcctggacacctggggcgtgtggccccggcccgactggctgctgaccagcttctgggggggtgatctcagagccgccagcaacatcatcttctccaacgggaacctggacccctgggcagggggcgggattcggaggaacctgagtgcctcagtcatcgccgtcaccatccaggggggagcgcaccacctcgacctcagagcctcccacccagaagatcctgcttccgtggttgaggcgcggaagctggaggccaccatcatcggcgagtgggtaaaggcagccaggcgtgagcagcagccagctctgcgtggggggcccagactcagcctctgagcacaggactggaggggtctcaaggctcctcatggagtgggggcttcactcaagcagctggcggcagagggaaggggctgaataaacgcctggaggcctggccatgtaaaaaaaaaaaaaaaaa

SEQ ID NO: 3628 - DNA, 4874 bp, Homo Sapiens
  NM_013382
cgcctcctgccgcctcctagcggcccgggccgcgaccacgctgcccgccccgccccgagcccggggccccgcgctccgctgcagtgaagggcgttgcatttcccggggtaccccgagctgccctcttgtgactccttggcggggcggctggtcagacaaagtgtgcctccgggccggagggcgacccagaggagggggaagatgccgccggccacgggcggaggcctggcagagtccgagctgcgtccccggaggggccgctgtggcccccaggctgctagggccgcaggccgggacgtggccgctgaggctgtggcgcgaagccccaaacggcctgcttggggctcacggcgcttcgaggcggtcggctggtgggccctgctggccttggtgacgctgctgtccttcgccacccgcttccaccgcttggacgagccgccgcacatctgttgggatgagactcactttggaaaaatgggaagttactatatcaaccgtacatttttctttgatgtgcacccgcccctgggaaagatgctgataggtcttgctggctacctgagtggatatgatggtacctttttgttccagaagcctggggataaatatgagcatcacagctacatgggaatgagaggattctgtgcattccttggctcctggctggtcccctttgcctacctcactgtactggatctgtccaagtccctctcggcagcactgctcacagctgccctcctcacctttgacacgggatgcctcactctgtcccagtacatcctccttgaccccatcctgatgttcttcatcatggctgccatgctgagcatggtcaagtacaactcttgcgccgacaggcccttctctgccccctggtggttctggctcagcctgactggcgttagtcttgctggtgctttaggggtcaagtttgttggcctctttatcatccttcaagtggggctgaacaccattgcagacctttggtacctgttcggagacctcagtctttcattggtgactgtgggaaaacacctgactgctcgtgtcctgtgcctcatagtgctgcccctggctctctatacagccacctttgctgttcacttcatggtgctgagtaaaagtggccctggtgacggtttcttcagttctgccttccaggcccggctttcagggaacaacctgcacaatgcttccatccctgaacacctggcctacggctctgtgatcactgtgaagaacctccggatggccatcggctatctgcactcccacaggcacctctaccccgagggcattggtgcccgtcagcagcaggtcaccacctatttgcacaaggactacaacaacctgtggattatcaagaaacataacacaaactcagatcccctagacccttccttcccagtggagtttgtaagacatggagacattattcgactagaacacaaagaaacttcccggaacttgcacagtcactatcatgaggcccccatgacccggaagcactatcaggtcaccggctatggcataaatggaacaggggactcaaatgatttctggcggattgaggtcgtaaacagaaaatttggaaaccggatcaaagtgctgagaagtcgaattcgcttcatccatttggtcacaggttgtgtcctgggctcctcgggaaaggttctgcccaagtggggctgggagcagttggaagttacttgcaccccatacctgaaagaaaccctcaactccatctggaatgtggaggaccatatcaatcccaagttgccaaacatcagcctggatgtgctacagcccagttttcctgagatcttgctggaatcccacatggtcatgatccgggggaacagtggcctcaaacccaaggacaatgagttcacgtccaaaccctggcactggcctatcaactatcagggcctacgcttctcaggggtcaatgacacagatttccgagtctatctgcttggcaacccggtggtttggtggctgaatctgttgagcatcgccctctacctcctctcagggagcatcattgctgtagccatgcagagaggggcacggctgccagcggaggttgcagggttgtcccaggtcctgctgcgaggaggcggccaggtcctgctcggctggacactccattacttcccgtttttcctgatgggccgggtcctctacttccaccactacttcccagccatgctcttctcaagcatgttgacaggcattctgtgggacaccctcctgcggctctgtgcctggggcttggcctcatggcccctggcgaggggcatacatgtggcgggaatcctgagcctgctcctgggaactgcctacagcttctacctcttccaccctctggcttacgggatggttggtcccctggcccaggacccccaaagtccaatggcaggactaaggtggctggactcatgggacttttgaggccactgcaaagattccagcctgggtccaggaacttcccaggagagccagctgggaagcagtactggaccatccggccatgaggaagctgcctaaggagcccgaagaattctgctgctcaccaggacccagctctgggagtgcagctggaatggaacccagcattggagagagccgggagagagccgcagctccgtccacagcaccacggagaggacagcgcctcttgggctgctccctcgtgcacagcgcaggggaggatgggtgccagagggtgggagtgggtgcgcgtgtgtgtatgtgagggcatgttgtccatatccctgtggaatacagaccgtgtaactggacagctgagtgtcataaactctaaaatagtccaggctatagtaatattttctggtatttttttctgttggatttctttggttttggtttgtaagatccatcaaaaattctcagacctctgagagggccttgagggcagagaatactgacctcaccttgggatgtcaccaaaggcagagcagatgggactgtcaaagttgtgctgccctccctcccacaaacaaatgaatccagcgtggaggaaggcgcgccgccccgagctggagggcctggctcccaccatgccccccagtggctgcaggtagctggacttcctgcctgtgacgcacagagagcagcggactccggagcgtcagcctgccttagcccttggttcctcgttttttgggattgtcacactgtgacactcgggaggaacgatgtcctatcctgggctgctcagtgttcccaggccctgtgtgccagaggccaggtctctccaagtgcatctagcctggcctggagggcaaggcagatgcattctcctggctgctgggagagcccatgggaaccttgcttagcgcccaaggtagatgagagacagggcagggaatctgcgtggtgctgggatgtggggactctggcctctccagactaatgttcctgtcacctgctgagctttcccagtgtcacttctgcagtcctcctctgctcacccctccctcactccgtgggcaattccctttctctctgtcactgcttcagcagtgaagacccatggcacctagaaatgcatgccagcttcctgcgtctaccactctgcagctcaaacaagaagctcagagctgccccttccacttcctccccaaaagggatgaagaaaaccctgtggtagaaccaaaccacccaaggccagcccttaagcctgcctccaccttcctggtgcatgacaaaatatttcttttgtctcagaggactttgatgcttcaatatttaatgatgaatccgccacactccattttccctcctctgaagctcccaacaactctgacagggtcagatctctttaaagcatcttcaggaggcggttgccacggagactggatattggtcccagggacaggctgtgctacctactgggtggtggggagggaagcttctggccatgcttgggcattcagaccaaccatcattaatgttaatagaggaaatgcagcaacgtcaaaagcaaggcaggttggttaattagatctggggcccgatgacctccctttcccactgctacagcccttttgacttcccccagcaggaagcgctgtctgtgcggctgagtctgggccacttgcttaattgcatttctggcagggaaggagaggagggatggagaagctctgctcgctgcttccacctcaccgtgtgtcctcccctcccctcccttcctctcctccccacaggcggaattgctttcttctgagccgggtgggctctcctgcagggagaatgcaggggtctgtgcttggctcttagcaaagcaggtggcccacagtgacctccaggaggtggctgattttcctttgtgccttcttatttctcagtaggaacttggaagggaagagctctgaaggagccagaggggcagccaccttgcatgagggtgaggaaggagaagcccagccagcctctacccatccctccctcccaattaggctgcactggggccgaacgcttccctgggctcccactgccttctaaggagccaaggagaattccctgcccactttctgttcctccatgcccaaactggcagatgcttctctgggagcaaggccacatgggctgatgcagctttgagtgctcaggttctgttttctggaagttgctggagaagggctgtcagggtgcttctatgaatatgggcttcagctgtagcacttggcagaaacgtgatgtgtcccacaaactgctggtggaggaagaagatgttcgtcagccaattcaacctccagccagcttcttgagcctatttggtttaaaaaaaaaaagtcttctaatcagaagccactgattttataataaataacacttgttttgaa

SEQ ID NO: 3629 - DNA, 3138 bp, Homo Sapiens
  NM_013385
aagcaggaaggagcctgttacagtcaaggtgacgcatccttgccgggccagcccgaacagcagctgggtcggcaagcgacaggagcacgggtcatcttttccccagaggcgtcggaatggacctgtgccacccagagcccgcggagctgagcagcggggagacggaagagttacagaggatcaagtggcaccgaaagcagctcctggaggacatccagaagctgaaggatgagattgcagatgtgtttgcccaaatcgactgcttcgagagtgcggaggagagccggatggcccagaaggagaaggagctgtgtattgggcgcaagaagttcaacatggaccccgccaagggtatccagtatttcattgagcacaagctgctgacccctgacgtccaggacattgcacggttcctgtataaaggcgagggcctcaacaagacagccattggtacctacctgggggagagggatcccatcaacctgcaggtcctccaggccttcgtggactgccacgagttcgccaacctcaacctcgtccaggccctcaggcagttcctgtggagcttccggctgccgggcgaggcccagaagatagaccggatgatggaggcctttgccactcgatactgcctctgcaacccaggcgtcttccagtccacagacacctgctacgtgttgtccttctccatcatcatgctcaacaccagcctccacaatcccaacgtccgggacaggccgccttttgagcgctttgtgtccatgaaccgcggcatcaacaatggtagcgacctgcccgaggaccagctgcggaacctcttcgacagcatcaagagtgagccattctccatccctgaggacgacggcaatgacctcactcacaccttcttcaatccagaccgggagggttggctgctcaagctagggggccgcgtgaagacgtggaaacggcgctggttcatcctgaccgacaactgcctctactacttcgagttcaccactgacaaggagccacggggaattatacctcttgagaacctctcggtgcagaaggtggatgaccccaagaagccattctgcctggagctctacaaccctagctgccgaggccagaaaatcaaggcctgcaagaccgatggcgacggcagggtggtggagggcaagcacgaatcgtaccgcatctcagccaccagtgccgaggaacgtgaccagtggatcgagtccatccgagccagcatcacccgtgtccccttctacgacctggtctctactcggaagaagaagattgccagcaagcagtgagattcctggaggtggcactgggggctggtcaccctgagagtcccatcgcctgcagcacctggagacccacctcccaccccagtgcactcttttgggccacagacatcattgctgttccccgttacctcgagctgactctagaggggaaggcagagctcaggagggtgggtgggagctgcagtgggctcagagtccagcaatgaggccccctggcctgggcacccagctgcaggcccctgccctacgtgcactacaggaaggggtgaggagagcagccagaggaaaaccagccccagaatgctgcaacttctcttctctctggacttcggtgtcctcggctctgaaggcgctctctgcacttagatgctgtcagccctcaacgtaggaggggccgtggggtccctaagtgattcttctccctggcaaggctcttccttttcagggatatctctgccaacccctcccctgtcctcgggttgggcttggccctctctgcctgagagagctcagcacacacacagctcagacccacggacaggaccccgggacagaaccccgggagcactgccctaggagcccggaccccacgagctcagtcccagctctgcctctgactcgctgtgtgccctctgccaagtcatgcccattctctagttcttgcaaaactgcagtgtttggactagaaacgtattggcccctgctagccctgtgctccagcttccagctggagatggcagccgttgtttgcggagcccaggctgactccggattcaacgttgctggggagagaaaagcagtatagactccaccttccaggatgtccatttcggggagaggagcaggtgggaccctcaagaaaatgacggagaacatcccagacagatgggactcaagcaggatgggtgctatatccaagaagccaagaagggagagtttcgtgcactgtggttaacaggagggctgcctggaggcagtggctgagccagaaagtaacacagagctcatgcttggagagagagagtcttggccatggctttcctgcaagaccactgacgagcagtcccatggtgataaagggcagcccggcgggtcccagcatctcgagaccctctgcagaagtattatcagagtagagctgacttccagtacccgggcagccagctctgtctccagggaggcctggcctggaggaggagtccactaacaggaaacacttctcaccccctcacacaggcccaggggagcccctggagggaaattccttggcaggggaacaggaaatgtggccgcctctgccccactgccagcctgagtgggcaaggaagcaggtggatcccccagaaggaaccgcagctcgcgaggcacctctcctcgtccccacccacccccacatttgcacaccttccacagggtcaggatggagtagctgccttgcgaggtggtgagactcctgtctctggaggtctgcaagcactggtagtgatattgcagcagacaaggtctgggttgggcgtctgcaggaggacaccttgtgggacatctgaggacatccgcagattcttgtcagcctgtgaactaggccctgcctctgtcacctcattggtccatgaaggagcagccaggggtggtggaaggagcactgggctaggggtcaggggtcagagattctgtcctgctcctgggatgcactggctactcccttagtctactcccttcccctctctggtcctcagcttcctccatcatggaggagatgggatcatggattttctgggcataagtggctgttctgggagtcattccaaagagagaataaaactcctgatccaactcgtga

SEQ ID NO: 3630 - DNA, 3495 bp, Homo Sapiens
  NM_013386
gggacggccacaccctgcgctccgcgcgggctcgggtggggtctccgctcctgcgccctgcgccctgcgcgccgcagccgcaaccccgacggcgccccaaacgctgttgcgccgcgcgccccgcccagcccggcctcgcgctggtcccggtctcgccccgcagccctcgatctcccgtgacttcctcggccaggccgcctgcgcctctgggaccatgttgcgctggctgcgggacttcgtgctgcccaccgcggcctgccaggacgcggagcagccgacgcgctacgagaccctcttccaggcactggaccgcaatggggacggagtggtggacatcggcgagctgcaggaggggctcaggaacctgggcatccctctgggccaggacgccgaggagaaaatttttactactggagatgtcaacaaagatgggaagctggattttgaagaatttatgaagtaccttaaagaccatgagaagaaaatgaaattggcatttaagagtttagacaaaaataatgatggaaaaattgaggcttcagaaattgtccagtctctccagacactgggtctgactatttctgaacaacaagcagagttgattcttcaaagcattgatgttgatgggacaatgacagtggactggaatgaatggagagactacttcttatttaatcctgttacagacattgaggaaattatccgtttctggaaacattctacaggaattgacataggggatagcttaactattccagatgaattcacggaagacgaaaaaaaatccggacaatggtggaggcagcttttggcaggaggcattgctggtgctgtctctcgaacaagcactgcccctttggaccgtctgaaaatcatgatgcaggttcacggttcaaaatcagacaaaatgaacatatttggtggctttcgacagatggtaaaagaaggaggtatccgctcgctttggaggggaaatggtacaaacgtcatcaaaattgctcctgagacagctgttaaattctgggcatatgaacagtacaagaagttacttactgaagaaggacaaaaaataggaacatttgagagatttatttctggttccatggctggagcaactgcacagacttttatatatccaatggaggttatgaaaaccaggctggctgtaggcaaaactgggcagtactctggaatatatgattgtgccaagaagattttgaaacatgaaggcttgggagctttttacaaaggctatgttcccaatttattaggtatcataccttatgcaggcatagatcttgctgtgtatgagctcttgaagtcctattggctggataattttgcaaaagattctgtaaaccctggagtcatggtgttgctgggatgcggtgccttatccagcacctgtggtcagctggccagctacccattggctttggtgagaactcgcatgcaggctcaagccatgttagaaggttccccacagctgaatatggttggcctctttcgacgaattatttccaaagaaggaataccaggactttacagaggcatcaccccaaacttcatgaaggtgctccctgctgtaggcatcagttatgtggtttatgaaaatatgaagcaaactttaggagtaacccagaaatgatgttgcattttttgctttagcctgataattgaaactttcaacaatctctggagtgactttttctcctcgaattgaaacaagtctatggcaaaagaagctgcatttttttcacaaaagggaagatggtaacaatggtcacttcaaacttttgggctaaattatatgtacacagaaatgttcaaaatcatagttttaatgtgttttgaaaaggccacacaattatactttatcttttcttaataatcctgcaaatctctgccctgaatccgaaatctgaaaatgtactggcttgaacaaaatttgttttgtgtgttagagttataaatcattaatctttatttcgggtggtttacgtttatgccagttcctttatatttaaatttcttgttttatatattttgaatgtctttatagatttctttaaatttccttatagaaccattaatagaaaatcattacatttaaaatataccttacagcaaaagcatccaaataagtatagggtttatgtccttatttttctttcagctgaatacgaatgaacacagtggtggaatttctgaagggaagtgatgaaattatatttatttcagtgggcacttttccattttaccactgtaccattatttggttcctggagttatacactaattttcagtatattactgttaaattaccaacacaaggcaatttatttgaaagattccgtttatcctgccattgctttgaaaagcagcaggaaacgaaatcctttgacttgtatcagcttctgcagagcatctttgttttcctttgtcctttgtttcctaccttttgaatcagattccgttttagtcaggaagacttcttgggaccattcttagtaacctgaaatttcttttttaattgcatgaagtggattgatcatgagcaaatgatgtgcttatttctccctcactgttgaatatctttgaacttgctgttttcaatatgggcagcacaaaggtgagagatacatattaatagtagtatgtattactcttatacattagatacctatatttaaatgaaaggcccaatttgtaaacatatacattcatattctctcttgccccaagttttaggaacatgttaggatataggagacttaatttataataatgagagcatttttttattttactaaagccatttttatagtcaactatcttttcttatttgtgtgattagaacttagaaaaatatttactagttgaagttattatcagtttttaatttagttcttaaactcatttcacttctaataatttctgttataaatttccagcattttaatgaaaatctaatgatgtaataggcattttctttatttgaacctacctcttttattttctgaaccaaagagaaagatggactggtgtttgtgaaacatttttaaaaatgtagtttcatttatattagttatgtttgataaatgtctcagtatttttataatatgataagcctgggattctacttttagggttatttgtacttttgagtaatatataaagtgacaatattaaggtacatgatcagctctttctatttttactcgtaaaaattatggaaatgaataattttgctaacaactttgaaatttcaaacttctggaaaatatgaaaatattcattgttcattatgaatttaaattgtaaggtatgaatgtgatttgtctgtacatcttgtatcttttccaaaaaatgattctgtatcttttggaaaaaagccgagagttgaagatagtatatttctggtagtactgaatatttacttacagtttctatcaaaaatatatatttgtttctaaaaaaaaaaaaaaaaaaaaa

SEQ ID NO: 3631 - DNA, 6540 bp, Homo Sapiens
  NM_013390
cggcccagccgagccgggctgcttgtctggccggcggaggctgagcgcgaccctagcaagccgcggcgcccgccgaccagggacaagagcgactcctgggaccccactctgccccgcgccgccgcctcctcccctgttgtcgcggggacgctcaggcccgcgccgcccgggccacgattctcctcctctttctcccggaggggaaggaacggagaaagccgagcggcggctccgggagagagcgagccgaggcccctgcccccgaggctcggggcaggaggaggaggaggaggaggaggcggaggcggagggaagtgcgcgtcactctcgggaggagagtatttcacctccaggcagaggctgcggctgccagttgagtacgagcggcagctgcgggcgccggcaatcgagtggcttcctggccatggagaggagatctggacccgaggacgccagggactcctctccgtctccctggaccgctgtgtaggcacctgagttaacggacgctaagcggggtaggggaagtaacagtgtatcatgtatgccactgattccaggggacactcccctgctttcctccaacctcagaatggaaatagtcgtcacccatctggctatgttccagggaaggttgtcccattgcgtccccctcctcctccaaagagtcaagcttcagccaaatttacctccatcagacgagaagaccgggcaaccttcgcattctcacctgaagaacagcaagcccagagagaaagtcaaaagcaaaagagacacaaaaatactttcatttgttttgctattactagtttctcattttttattgcacttgcaatcattttaggaatatcctcaaaatatgctccagatgaaaattgcccagatcaaaatcctcgtctcaggaattgggatccaggacaagattctgcaaagcaagttgttatcaaggagggagatatgctccgtctgacctcagacgccaccgtgcattctatagtcattcaggatggaggactgcttgtatttggggacaataaagatggatccagaaatattactttgaggactcattacatcctgatccaggatggtggggcgcttcatattggagcagaaaaatgccgctataaatccaaagcgacaattaccttgtatggcaagtcagatgaaggtgaaagtatgccaacatttggcaaaaagtttattggtgtggaagctggcgggacactggagttacatggggcacggaaggcatcgtggacgttgttggcaaggaccctgaattcctcaggcttgccctttgggtcctatacctttgaaaaggacttttcccggggcctcaatgtgagggtcattgaccaagacacggccaaaattttggaaagtgagagatttgatacccatgaataccgcaatgagagcaggcggcttcaggagtttctgagattccaggatccaggtcggattgttgccatagctgtcggggattcagccgctaaaagtctcttacaaggaaccatccagatgatccaggaacggttgggaagtgaactgatccaaggactgggctacaggcaagcttgggctttagttggtgtcattgatggtggaagcacttcttgcaatgaatccgtgagaaactatgaaaatcatagcagtggcgggaaggctcttgcccaaagagaattttatactgtggatggccagaagttctctgtgacagcttatagtgaatggattgaaggcgtttctctttcaggattccgggtagaggttgtagatggagtgaagctaaatttgctagatgatgttagtagttggaaacctggagaccagattgtggtcgcaagcacagactattccatgtaccaagcagaggagttcactcttcttccctgttctgaatgcagccattttcaggtcaaagtcaaagaaacccctcagttcctgcacatgggtgagatcatagacggtgtagacatgagagctgaggttggaattcttacccggaatattgtgatccaaggagaagtggaggactcatgctacgcagaaaatcagtgccaattttttgattatgatacctttgggggacacattatgataatgaaaaattttacttcagtccatctttcttatgtggaattgaaacacatgggtcagcagcagatggggcgataccctgttcattttcacctgtgtggtgacgtggattataaaggaggatacagacatgcaacatttgtggacggcctgtctattcatcacagcttctcaaggtgcatcactgtgcatgggacaaatggcttgctaataaaagacaccattgggtttgacacactaggtcattgtttctttttggaagatggtattgaacagaggaatactttgttccacaatctgggactcctcaccaagccgggtactctcctgcccaccgataggaacaactccatgtgtaccaccatgcgagataaagtgtttggaaattacattcctgtgcctgctactgactgtatggctgtttcaactttctggattgctcatcccaacaataatctgattaataatgcagctgcaggctcacaggatgctggaatatggtatttattccacaaggaaccaactggggaatccagtggattgcagctcttggcaaaaccagaactcactccattgggtatattttataacaacagggtccattcaaattttaaggctggcttatttattgacaaaggtgtcaaaacaaccaactctagtgctgctgacccaagggaatacctctgtttggacaatagtgcaagatttcgacctcatcaggatgcaaaccccgaaaaaccacgtgttgctgctctaattgacaggctcattgcttttaaaaataatgataatggagcttgggtcagaggaggagatattatcgttcaaaattcagcatttgcagataatggaataggactgacctttgccagtgatggaagcttcccaagtgatgaaggttccagccaagaggtatctgaatctctctttgttggggagagcaggaattacggctttcagggtggtcagaacaagtatgtaggcactggaggaatagaccagaagcctcgaacattacccaggaacaggacgttcccaattagaggctttcagatttatgatgggcccattcatctcacaaggagcactttcaaaaaatatgtgccaactccagataggtacagcagtgcaattggcttcctcatgaagaattcctggcagataacccccaggaataatatctccctcgtgaagtttggtccacatgtctctctgaatgtcttttttggaaagcctggtccctggtttgaagattgtgagatggatggtgataagaactccatattccatgacattgatggctctgtgacaggatacaaggatgcttatgtgggaagaatggacaactacctgatccgccatccaagctgtgtaaatgtgtctaagtggaatgcagtgatctgcagtgggacctatgcacaggtctatgtacagacatggagcactcagaatctttctatgaccattacacgagatgagtatccgtccaaccctatggtgctccgaggtattaatcagaaggctgcctttccacagtaccagcctgtcgtcatgctggagaagggttataccatccactggaatgggccggcaccacggactacatttctatacctcgtcaacttcaacaagaatgactggattcgagttggcctttgctatccatcaaacacaagttttcaagttacctttggctatttgcagcggcagaatggctcattatccaaaatcgaagaatatgagcctgtgcattcactggaagaactgcaaagaaagcaatccgagaggaaattctattttgactccagcacggggttactgtttttgtatctcaaagccaaaagccacaggcatggccacagttactgttcatctcagggatgtgaaagagtcaagatccaagcagccacagactcaaaggacatcagtaactgcatggccaaagcatacccacagtactacagaaagccgtcagtggtcaagcggatgccggccatgctcactggactctgtcaaggctgtggcactcggcaggtggtgtttactagtgatcctcataaaagttacctccctgtgcaattccagtcacctgataaagcagaaacccagcgtggagacccgtctgttatttctgtcaatggcactgactttaccttccgaagtgcaggcgtcctcctccttgttgtggatccgtgcagcgttccattccgcttgacggaaaaaacggtttttcctcttgctgatgtcagtcgcattgaagagtatttaaaaacaggcatccctccaaggtccattgttctgttgagcacaagaggagaaataaagcagttaaacatttcacacttactagtacctctgggattagccaaaccagctcatctttatgacaaagggagtaccatatttttgggattcagtggaaactttaaaccatcatggactaagctatttaccagtcctgctggacagggccttggggtgcttgaacaattcatacctttgcagctggacgaatatggttgtcccagagccaccactgtccgcagaagagacctggaactgctaaagcaagcttcaaaagcacattagagactaactgtaacttaagtgctgggggaaaaaaaatgtgaactaacttatttaatttatggcattttaaaatgacactgttaacccaacggaaccattttccagtttgatacagaatggggagaaaagaaagcgtttgaaattattgcttggataccagcttcatgcaccttctagttgtacaaaatgttaaagacgttgtttgtatttgtaaggctggtgtattcagagagcagatctcttattcctcactttccacccccgtattttgtaatgaccatgagcaatgtttttactttttgtataatggggtggggtggagtgggggcttctgagagtcagcctgaggtctttagaggaccagctattgtagcaccttggatacttgaagtttaatgctcagttgggtcgggtggcagttgacttggtggctggcatgttcagcagtgcctggggccctgtttctgggcagcctttgaggattttctatgatattgaatgacagttttaagtggcaactcaggcccagctcatgcccttttttgcctggacatgtgctatttttattcacttatatatcaattacttgtaagggttaaactttcaaacaggaagtatattgggacaaaagggctcttggggattagatatccctttaatctgtgaccattgggcaaaaaattttcctgcagcaaaagtctgaggctgttgggaccatttttgcagctttaatccttagcctcttttgactgtatatttgtgtttaaaatgcagagctcaactgaatatttccttttttgttttgttttgttttgttttaagaagtaggttgttttcctgaaccgtaaacttgtatcattttaacttgcacaaaggaagtctgttcttggtattgctcttgcacttgggttttttgttattgttttgtgtggattttttaaagcttttctgttcaccctcctgccaggaaaatcccagaaagcttaatgataccccaaaatgattacacccagggaggaaaaaaaggagcgctttctagggtcagaatcgtggagagaatactcagaaatgaacctctttaaagccttgcaggaatgagtcactcttacttaatgaaatgttaaagccaattaaaaagcatgctgtgatgcccagcttccctttccacagggtgcatgcgtctcctgctggtgaatcacatgcggcaagaggcaactggctccacagcctgggatgctgccgtaccaagaggaaagaagcagcaaaatgcctttacgttgttctaaacccccgacgcataaagtgtagaggagggatggccaagggtgggtggtagaaagtgtgttcaggctgacactggcaatgagtacagataatttcactttcctcttctaggggcaaaggctgatggcctctacctttgtatccaggagaaactgcagagcagccctgtgactttacaaaatatgctacctcaaagtgctaccgataaacctttctaattgtaagtgcccttactaagggcacatgtcttaatcaaagttagttttttgttttctggtttgttttttttttttgtatattgatgaatgagatcttacctattaaatatattattggattatggttcctgaaggtcattagagtgtgtgtgtgtgtgtgtgtgtgtgtgtgtgttttatgacttaaatatctttacgtgtgttttttagagcttggttctttaaagatttggagaagatatgtaaattaccaaggcacttggtttttctgttttatatactaataatcagggcctaagttaaataaaaatatgtgtgcatgtattttaaaaaaaaaaaaaaaaaa

SEQ ID NO: 3632 - DNA, 1605 bp, Homo Sapiens
  NM_013393
gcggcgcgctgcaggcgcggggaacaccaatggcggggtacttgaagctggtgtgtgtttcctttcagcgtcaagggttccacactgttgggagtcgctgcaagaatcggacaggcgctgagcacctgtggctgacccgacatctcagggacccatttgtgaaggctgcgaaggtggagagttaccggtgtcgaagcgccttcaagctcctggaggtgaacgagaggcaccagattctgcggcccggccttcgggtgttagactgtggggcagctcctggggcctggagtcaggtggcggtgcagaaggtcaacgccgcaggcacagatcccagctctcctgttggcttcgtgcttggggtagatcttcttcacatattccccctggaaggagcaacttttctgtgccctgctgacgtgactgacccgagaacctcacagagaatcctcgaggtgcttcctggcaggagagcagatgtgattctgagcgacatggcgcccaatgccacagggttccgggacctcgatcatgacaggctcatcagcctgtgcctgacccttctcagcgtgaccccagacatcctgcaacctggggggacattcctttgtaaaacctgggctggaagtcaaagccgtcggttacagaggagactgacagaggaattccagaatgtaaggatcatcaaacctgaagccagcaggaaagagtcatcagaagtgtacttcttggccacacagtaccacggaaggaagggcactgtgaagcagtgaggatttcttgtgccattttcataatggtcattagctccttttaagctagaaacgtagcctgagctcctgaagagttcctgggagatttgagctgattttggagatggagcaggacaagtggggagtctctctctctctttctctctctctctttttaaccaaaaagagatgacaaaactaagttcaggggccatggaaaatgaaaaagtccgctatattgtgatttgggaagagaaagttatcaagagaaagaggtgaggatggaaggatggagaaaaacagactgtgggaaggatcagaaggaatccgccgaggcagggatgggtgtgcccatgtgtgccttgacgggacttcatcttatagactgttaaactgtcacacacaaacaggctttccacccctgctctgagagcaccacgcacagatttccagttcttagtgtggctgtttaaagtagaaaatctgggggctgggtgaggccactcatgcctgtaaacccagggctttagaaggctgaggctgggggattgcttgaagtcaggagttcaagaccaacctgggcaacatagcaacaccccccatgtctacaaaaatgaaaaaccaaaaagcaaaccaaaagaaaaatctgaaatttccatctggggattaacttctgtctttctggtgaacaatatagcaattcacgcattcttcaagcagcaaaagttcccggaacaattagggaagacgtatggtctgaatttatccaggcagtgggtctgctttggtttttgctggaaatttatatcagtgtctgggctcccaagaacataaatgtaattgccaaagcaaaaaa

SEQ ID NO: 3633 - DNA, 2483 bp, Homo Sapiens
  NM_013398
gaattctgggaagtggagtccaaacattcggtggagtcgcggacacttccgctcggggactgaggttgctgcagtttttccgcgatagtttggggcagttccgcgcgttgcaggcccttctgaatttcctggacctacgcattggatcctcaaagaactgctgaataccactagaaacatacctgtaaccagagacagctgattatagctttctgcagcaaggaagcccacgtaccaggggctgtcttggcacaattctgctttcccaggaactgcatcactcaggactctgcaagtttccagaagtaagagggaaaatgaccacgttcaaggaggcaatgaccttcaaggacgtggctgtggtcttcactgaggaagagctggggctgctggaccttgctcagaggaagctgtatcgagatgtgatgctggagaacttcaggaacctgctctcagtgggacatcaagcattccacagggatactttccacttcctaagggaagaaaagatttggatgatgaagacagcaatccaaagggaagggaattcaggagacaagatccaaactgagatggagactgtttcagaagcaggaacacatcaagagtggtccttccagcaaatctgggaaaaaattgcaagtgatttaaccaggtctcaagacttgatgataaatagctctcagttctccaaagaaggtgatttcccctgccagactgaggcaggactatctgtaattcacacaagacagaaatcttcccagggcaatggatataaaccatccttcagtgatgtctcccactttgattttcatcaacaattacactcaggagagaaatctcatacgtgtgatgagtgtggaaagaacttttgttacatctcagcccttcgtattcatcagagagtccacatgggagagaaatgctataagtgtgacgtgtgtggtaaggaattcagtcagagttcacatctgcaaactcatcagagagtccacactggagagaaaccgttcaaatgtgtggaatgtgggaaaggcttcagtcgtagatcagcacttaatgttcatcataaattacacacaggagagaaaccttataattgtgaggaatgcgggaaggccttcattcacgattcccagcttcaagaacatcagagaatccatacgggggagaagccattcaaatgtgatatatgtggtaagagcttctgtggtagatcaagacttaataggcattccatggttcacacggcagagaaaccattccgatgtgatacgtgtgataagagctttcgtcagagatcagcacttaatagtcatcgcatgatccacacaggagagaaaccatacaaatgtgaggagtgtggaaaaggctttatttgtaggcgagatctttatacgcatcatatggtccacacgggagaaaagccatataattgtaaagagtgtgggaagagcttcagatgggcctcgtgtcttttgaaacatcagcgagtccacagtggagaaaaaccattcaaatgtgaagaatgtgggaaaggattttacacaaattcacaatgctattcccaccagagatcccatagtggagaaaaaccatacaaatgtgtggagtgtgggaagggctacaaaaggaggttggatcttgactttcaccagcgcgtccatacaggagagaaactgtataattgtaaggaatgtgggaagagctttagtcgggccccatgtcttttgaaacatgagagactccacagtggagaaaaaccattccaatgtgaagagtgtgggaagagatttactcaaaattcacatcttcattcccatcagagagttcacactggagaaaagccatacaaatgtgagaagtgtggaaagggctacaatagtaagtttaatcttgatatgcaccagaaggtccacacaggagagagaccatacaattgtaaggaatgtgggaagagttttggctgggcctcgtgtcttttgaaacatcagagactgcacagtggagaaaaaccattcaaatgtgaagagtgtgggaaaagatttactcagaattcacagcttcattctcatcaaagagtgcacactggagaaaagccatacaaatgtgatgagtgtgggaagggcttcagctggtcctcaactcgtctgacccatcagagacgccacagcagagaaacacctctcaaatgtgagcagcatgggaagaacattgtacagaattcattctctaaagtgcaagaaaaagttcacagtgtagaaaagccatacaaatgtgaggactgtgggaagggctacaacaggcgcttgaatcttgatatgcatcagagggtccacatgggagagaaaacatggaagtgtagggagtgtgatatgtgctttagtcaggcctcaagccttcgacttcatcagaatgttcatgttggagaaaaaccttagtgatgtgatggtgcaataaagtcttcactcagtcttcatgaa

SEQ ID NO: 3634 - DNA, 2742 bp, Homo Sapiens
  NM_013399
gggcctcggccctggtccaaagtctacccgcctccttgtgacagaagtgcgactgccagctgccgaggcgttcggtcctgctgttgcggccgctgccccagggctgcggggacgctcccggagccctgcctgttccctgtccatccaggccagcagctgaaggagcctcacctgcctcccttctctgagtagcacggatttgaggagaagcagcgaagatgtccagcgagcctccccctccttatcctgggggccccacagccccacttctggaagagaaaagtggagccccgcccaccccaggccgttcctccccagctgtgatgcagccccctccaggcatgccactgccccctgcggacattggccccccaccctatgagccgccgggtcacccaatgccccagcctggcttcatcccaccacacatgagtgcagatggcacctacatgcctccgggtttctaccctcctccaggcccccacccacccatgggctactaccccccagggccctacacgccagggccctaccctggccctgggggccacacagccacagtcctggtcccttcaggagctgccaccacggtgacagtgctgcagggagagatctttgagggagcgcctgtgcagacggtgtgtccccactgccagcaggccatcaccaccaagatctcctacgagattggcttgatgaatttcgtgctgggtttcttctgttgcttcatgggatgtgatctgggctgctgcctgatcccctgcctcatcaatgacttcaaggatgtgacgcacacatgccccagctgcaaagcctacatctacacgtacaagcgcctgtgctaacggagctgggactcgggactcccccgcctgtcagtctggccccctgtgctttgctccctgtgctcagtggtcactttcccgctcccacttggggctgggagccgtgccaccatcccctagaagtcctgtcctcttcaccctgccctacctgagccgctgactcttctggcaaaaattctgttgggatttaaggccaagggtcagtgggtggcagggggctgacaatgagcttgtgtgttgttggtctgcttggtgtgtgtgatcgggaagataagctgggaggggtctcctgctggggtcctgatgcctctgtttccaaacaaggtacaggttcagtccagactctttccccctgggaccaacagcagccagagcagttagccagttagtccccaggcctgtggccacaggcgtttctgacctgctgggccgagaatgggtaagttgtctggagtcaggtgggcccacgtaggacagggtcacaaagcctgggtttgtttctgggtactttgcgcctctggggtgctagaggtggggcatggtggctggaagtaaaactgccaactctggccctcagaactctcaggtatagaagcccaggatgtctaataccctgtcccagtgcccgagagctgcctggtgtcaggtagagaggacactgtacctgggtgaatgatcagaccctggtagctaagaaggaacttgtccctttgagtcagtgtgcagaccccctttcaggccatgcctctgtgaaccctgtattgctggggccggaaggagcccctgagcctagccccttcccgtctgccctgtgtcctcactgcgtgtgggtatgacctctgcctggtggctggtgtatcccaactgggcaagagatggcagagggtcccccttgtgggtgcgcttggatgtgcagagccttctccatggattttcttccctgtaagtgccgggcccctcaccccagctgacaggctgttgctgtgcctgctcacacctgctcctgcaggcacactgggctagggacgaggaaggagcagccacaagtggtagaactgccttggtggacaccagcctcgccctgtctttatttcctgaatggtttgtgaacttgctcacctggaccactgtatcctgccactgtccttcctggtctcgcactgccactgcatggcctcctgtcactgtgaatcgtggcccagtctcagtttgtagtttctcattaaattggccctttcactcccccgccctgggcctctgctctcttgcctggcttccttcttttttgagggaaagagggtggggctgcaggcagtctactggcaggacgggaggctgagtcctcagggtctcacaccctcagtgctgatgccatgccaactgcctgggacaacaccaacacgtaaggacctaattaaaccaaaccagagtcgggtgtagaccagccctgggatttccagctgtgactgggccagggcacacgttggtctcggcagtggctgtaaggtcaccttccttcctctgatgctggtttcaaccatctatatatggcatccacgcatgggatctgcaagctggagccctcctacccgcaggcttgagcacagcatcatccagccctggggaggcgcacccttaagcaacacagactgggctgaggctgacaggcagaagactaacagagcgcagtctgcacacgcaggttctgggcgacctctggccctggccatctctgcactaactcatctgaattatgaaggtggcagtcttggtcagtagtttaaagagtttccctactttttaaccctttttgaaataaaacttttacaggtagtagattcctattaataaaattatttaagttcatgtttctcttttagagaatgaattgtttaaa

SEQ ID NO: 3635 - DNA, 2305 bp, Homo Sapiens
  NM_013401
cgagcccaggcgtctgagacctactgactggccgcgggcagggctgacaggcggtggggcggctcggcccctggcggagtcggcggcgggcggggacgcggcgctgggaggacgcggcggcgctgggaacggacgcctgggcgccccgaggcgccgggatgtggagcggcccaccccagccagaccagggcctcccgccgccccttgcagctgtcccggtcccctggaagagcacggacccctgccaaggccacagggagtccccaggagccctggtggagacctctgcaggggaggaggcccaaggccaggagggccccgcagccgcccagctggacgtgttgcgcctgcgcagctcttccatggagatccgagagaagggctccgagttcctgaaggaggagctgcacagagcgcagaaggagctgaagctaaaggacgaggaatgtgagcggctgtccaaggtgcgggagcagctagaacaggagctggaagagctgacggccagcctgtttgaggaagctcacaagatggttcgagaagccaacatgaagcaggcggcatcagaaaagcagctgaaggaggctcggggcaagatcgacatgctgcaggcagaggtgacagccttgaagacactggtcatcacgtccacaccagcctctcccaaccgcgagcttcacccccagctgctgagccccaccaaggccgggccccgaaagggccactctcgccacaagagcaccagcagcaccctctgccccgccgtgtgtcccgctgcgggacacaccctcaccccagacagagagggcaaggaggtggacacaatcctgtttgcagagttccaggcctggagggaatcccccaccctggacaagacctgccccttcctggaaagggtgtaccgagaggacgtgggcccctgcctggacttcacaatgcaggagctctcggtgctggtacgggccgccgtggaggacaacacgctcaccattgagccggtggcttcgcagacgctgcccacagtgaaggtggccgaggttgactgtagcagcaccaacacatgtgccctgagcgggctgacccgcacctgccgccaccgaatccggctcggggactccaaaagccattactacatctcgccatcttcccgggccaggatcaccgcagtgtgcaacttcttcacctacatccgctacatccagcaaggcctggtgcggcaggacgcagagcccatgttctgggagatcatgaggttgcggaaggagatgtcactggccaagctcggcttcttcccccaggaggcttagggcgcggcccaggcctgaaggggagctctgagacagagcaaacacccaccccagaacaagccgacacacagggagacgggggcctggagccagccctgagccagaggcagaatggatggacagacaggccatggaggcagcactgagccagcaccacacgtccatcctgggacagacgggcctggacttcacggcaagacccccctctcttccccactgggttctgccaccaccaggaggatttcaagaaagcaccaaagaccagggagctcggatccatactcggggggcctcagcccttgggaggggacacctgaggcagccagcgccccctccccagtccccagaactgcctgcaggtgccttgttgctggcttgtcttcagaaagggactgttctgggtggctggatctccagggtaccctccaccccagctgccaagccctgggccagcagcacccccttgtggccatcctgtgccttgttcccggtggcctccctattggactactaggaggggctggcagggcctccatagcacagaattgccccaaagccttgttaagatgagtcaagacccctcccccgcttcctcccttcctttcccccttcctccctcccccttcataaaggcctcccttgtcaccttccctcccaccccgtctcagccctgtgctcctggaggccctgctcccaaaaccgctggaaggactggggcactttctgccacagtagaacacagacagggcttcagatcacccacgcctgttttcagctgtgggtggccatgcagacacgcgccctggcatgtggggcctgggtgggcaggcaggacctgggccctcccacccatcagagcccactcaggaccagcgttcggagctcccacctggacgcatccctcaccacgtccggatttccttctttggatggaatgtaacgcgatctctatttaataaaggcaggctttgttggtaaaaaaaaaaaaaaaaaaaaaa

SEQ ID NO: 3636 - DNA, 1210 bp, Homo Sapiens
  NM_013406
ctcttgcggagacgcgcgcgtcggggtttaacgcgtttctgggccgccgtaagcccggcctaggggcagctttgactcgagagccggctataggcgcatggaaggttccctggaacgggaggcgccagcgggggcgctggccgccgtgctaaagcacagctcgacgttgccgcccgaaagcacccaggtccggggctacgacttcaaccgcggtgtgaattaccgcgcactgctggaggccttcggcaccaccggcttccaagcaaccaacttcgggcgcgctgtacagcaagtcaatgccatgatcgagaagaagctggaaccactgtcacaggatgaagaccagcacgcggacctgacccagagccgccgcccacttaccagctgcaccattttcctgggatatacatccaacctcatcagttcaggcatccgtgagaccattcgctaccttgtgcagcacaacatggtggacgtattggtgaccacagctggcggcgtggaggaagacctcatcaagtgcctggcgcccacatacttgggcgagtttagcctcagggggaaggagctccgggagaacgggatcaataggatcggaaacctgctggtgcccaatgagaattactgcaagtttgaggactggctgatgcccattctggaccagatggtgatggagcagaacacagagggtgtaaagtggacgccttctaagatgatcgcccggctgggcaaggagatcaacaacccagagtccgtgtattactgggcccagaagaaccacatccctgtgtttagtcccgcacttacagacggctcgctgggcgacatgatcttcttccattcctacaagaacccgggcctggtcctggacatcgttgaggcccaggagtttgatggctctgactcaggtgcccgaccagacgaggctgtctcctggggcaagatccgggtggatgcacagcccgtcaaggtctatgctgacgcctccctggtcttccccctgcttgtggctgaaacctttgcccagaagatggatgccttcatgcatgagaagaacgaggactgagcggctgcggtcccaggaaggtcttaccccctcttctatttattaatttgcagacccagcccctcccctactttttggtcagctacgtctctagaataagatggtatctgaagtccttaaaaaaaaaaaaaaaaaaaaaaaaaa

SEQ ID NO: 3637 - DNA, 6881 bp, Homo Sapiens
  NM_013410
aggtggagaagggcggggaggtgtagcgtggcgctcagtccgcctgctactcggtcccggcgctgggctgaggggaggggttgtcttaaaagtctctccttccccctgtaggggcggccggcgagtcccagtgagagcggagggtgccagaggtagggggccgagaaacaaagttcccggggcttcctccggggccgcggtcggggctgcgcgtttgaccgcccccctcctcgcgaaggcaatggcttccaaactcctgcgcgcggtcatcctcgggccgcccggctcgggcaagggcaccgtgtgccagaggatcgcccagaactttggtctccagcatctctccagcggccacttcttgcgggagaacatcaaggccagcaccgaagttggtgagatggcaaagcagtatatagagaaaagtcttttggttccagaccatgtgatcacacgcctaatgatgtccgagttggagaacaggcgtggccagcactggctccttgatggttttcctaggacattaggacaagccgaagccctggacaaaatctgtgaagtggatctagtgatcagtttgaatattccatttgaaacacttaaagatcgtctcagccgccgttggattcaccctcctagcggaagggtatataacctggacttcaatccacctcatgtacatggtattgatgacgtcactggtgaaccgttagtccagcaggaggatgataaacccgaagcagttgctgccaggctaagacagtacaaagacgtggcaaagccagtcattgaattatacaagagccgaggagtgctccaccaattttccggaacggagacgaacaaaatctggccctacgtttacacacttttctcaaacaagatcacacctattcagtccaaagaagcatattgaccctgcccaatggaagaaccaggaagatgtggtcattcattcaatagtgtgtgtagtattggtgctgtgtccaaattagaagctagctgaggtagcttgcagcatcttttctagttgaaatggtgaactgataggaaaacaaatgagtagaaagagttcatgaagaggccctcctctgcctttcaaaaggctggtcacctacacatgtttaaggtgtctctgcacatgtctcaagcccatcacaagaaagcaagtacagtgtggatttcaaatggtgtgtaacttcagctccagctggtttttgacagctgttgctgtggtaatatttttgacatgtgatggtgatagtctctggttctccccatccccacaaaggctgttgaaccacagcaccaggaagcctgagaatgaatcctgagggctctagcccaggctttgtcccaggctttctggtgtgtgccctcctggtaacagtgaaattgaagctacttactcatagtggttgtttctctggtcttgagtgactgtgtccacagttcatttttttccggtaggaataactccttttctacatccacgctccatagagtctctccttttcagacatcctgggatgaaagaatttggcttttttttttctttttttttttggacatctgttttcactcttaggcttttaaacaatagttattgcttttatccctctcagattctaataactgagagcgatggggctatattgaatctctgtatgcactgagaactgagctatgaagaggatcttattaaactgctggtctgactttatggattgacactgttcctttcttttattgtgaaaaaaaaaaaaaaccctgaaagtcttgggaaccccctaaagtcttttgggaatcctcaaaaagcatgggaagttaagtatttagctacataaatgttgtaagatcatatcttatgtatagaagtaataagaccatttggaattactggactaattgaatagttaaggtttctattcgggacaataaaatgtattttgaaagtgctgctaactattgatgctgacagtgtttcactcctatgagtgacccaaacatattataaatatgtggtaaagggaatggagcctgtggggttgagcagaatgttgtactagctgtgcctggactgagtataacagctttatgattatgagaaaacaaattctttattttttttttctgttccaaagattcatcctatggggtggccataaagtctagaattagatactaatattttgtcattcattataacatatcaataaaccatttgttaaaagatttgcctggtttccagacttggtggccaccttgaataattcttgctgtcttctgggaaggatgatgaaatttattcctgctgccttaaaaatatgtatcccttcttcacccatcatgactgtccccagtgagtgtcctttactattcttgggagtgactcctgtctaacttttcatactggcgagaagaaaagaagcctattttaacactttagtggtgttgaaacacattacttactttctgaagatgtcccagtgaatcctctgtcaattcactgccatatgtaatctatatgataaggaatgcatcttccttctaagtactgcccaaactcttgccagctcctctcccattgtcccttcatgtgaatatttcttggctaccttagtggaaatatagatcagttttctccccatccatcctctcaaacataatgagattgtttactttttagatttatgcagtgaaaatgcccagtcaggtctgaatcgtcagtgcattatattgactctgagcactttagaatttagagttgcaattgaatgccagctgtggagatggggtgcatatcagatatataaataaagctcaggtttgctagggaaccaggtatagagaaaaataagtctgatatgaggaaaattgcacaatttagagtagttatgccgtagagaaaatttccacaaactaggaaatgtagagagttattctatagaatactcaaaagaggaaagtatgtgatttttggaaacaggaaaatcttcaaacttctttcttcacttccctttgtgtttagctgaccctccaatgtgatcattgcctttggagtttgggagaggtacgggaagtggcctgatccctgcttccatacttcactcctccatccatccttccctccctcttcccctccagctaaatggacaattctagccaacattgagtcactcaataagtctcaacagtgggtgtgtttgctgagattgtccagcggttgagcagtttggtctcacctccctcgctagttgagaccaaaaagagacaaataactttttcatggtctttgaaacataatgcttatttcgtggtcaatggctttaaaaaaatctgtttcttgttttcttcaacaaactcactagttttcccttaaatgatattgtaaaaattaaagtaatcttgaaaatgttttgacaaaagtaaaattaaagggacatcttttcttgttttgttttttttttttctattgccacacatgaccgttccttcacctttaagcaaagagagtggttcagatggtttctaagatgccaacctgacctcgcattctgtcattctacccagctcttaattcaatttgcttccattatcctaacaggcttctttcttacttagaacttggaaaggctgctgtatttaataccctccaacactaacgcagacttaagataggtactgtttattgaaaacctactgagtgaaatgtgcggttttaggaccttcataaacatctcatttaatctttctagcatcctgtgaaacagccatgatttcacgttgataaacaaagaagacaggggtcccagggatgtgaagcatcttgcccaggcttctgctgctggtgaccagtgtagccaggactccagcccaggttttcctgactcagaagactgagctttttcctggatgttattaatagctaattgtgtccaagcaaccaagggccttgagtctgcttggttctgcttatggcctcacatcaagaaatggagctagtccatgtctgtagtcccaatgctttgggaagccatgatgggaaggttgtcggaggccaaaagttcaagaccaggctgggcaatatcacaagactccatctctacggaaaagtaaaaaattagccagtcatggtggtgtacacttatggtcctagttactcaggagacttaggcaggaggattgcttgatcctaggaattcgaggctgcagtgagctatgattgcacctctgcacccaagcctgggcgacacagcgagaccctctctcttaaaaaaaaaaaatagcagagctcaccaaagtgatgttcacctttttatgacattcctttttcttagcttaagaaaagaaagctgctagatgagagtcttagttttcctgcataagacctcctttatgaatagaataaaagactgtcaaagtaggctgggcttgggcccaggctaatctatgaaggaagcaagctcgtgttccttacctatccttttggtgtccattggattgtgccccgaagtggcctttacccttgagccgtccccagccatggtgctcacacataggcttttgagctccttggagctatccagatcctgctcacttttccttcctgagatcagaacaaatcacccccttactcccactccaaacaaggccttgatgataaactaatccttcctaaaatgctggtaggtaaacaagcaatgatgaagcattgaacacaggttaactcctgacttttgtaccattgtctattccattacacattaacatgactctgaatgccagatccaaacctttgcccaccatctgcttgtcgtgcaacagttgaggcagtaaccaggggagattcacttcctgtcttgtccttccccagggatcacccccctgctgccctctagcagccaaactcagatgagttccattgttaccctaggtgtgcccatctctttggtagggaaggagaaaggtaagaatagccatcagtgaggaaggattcttggagcgaggagccactgtggtttttcctgctatttaagatgttgagaccggataactttagaaagatacctgcacaaacccataaatagtgcttttataaagtttagttcaccggaacctgagttcagtatttgacattagctttttgtccaaagagttgaagcctgctggaggtctttgctcaaataataaataccacatatttccaagtgtgttcaggtataggcactaggtactgtctgtttacttcatgttaggcacattacatgcattggctaatcaaatcctcatcaattacatatgtaataatctaaacttgcctccttgtattataaatggaaataatcctgtttatttaaacgggttttcatgtacctgtagggattaggaaactcaaatggcctttttaatacctttccctagtttgagctccctgttctctttaacagataaaacaacatatttgcttcagcctggaatctgtttttggtgctttggtgcagagacaggaaatgggcactcagagtcacactggtagttgcacactgtatctacagagggcgtgtctcatctgtactctgctgggttacaggatttcagtaggtatttgtgtccacctgagaattctgtttattacctttcatttgacagtgtctttcctttctgcagttgattttgctagagaggcaattcataaggtgaggtcctgttcatagtatgacttgctttctcaatatctccttcaatttttagtaactcttggtctatttggtgtctttaaaaaaaataacctagtaataaagacttcttttaatgtggaaatgtggtctggtagtaagttatttctttccacatgtaactgacccaatctggtttccaaatgagaagtgtgcaggccccagaggttgagaagccatatttcaactgtgaaaaaaatctgcttcctgcatctgttgaaatatagttgttcatacttgccatcccttatctttcttgtaacaatttgcacagttcttgccagaataaatgccattatctgtatgtttcagggagttccccaatttgatcatttttgtgtgtgtgtggtgtgtgtgtgagagagagagatactgcagtaaaacatttctaaaggatgaaagctcttgtatggcatagatatgaattccttcctctggtaataattaggttattcccagaagcacagtgtcattctttaaataaaagctttcctgtttaaagcttttcaaaggagcagaccaccttgaagattccccctagggttgatatgtgtctaattcattttataaaaattattcttgtcttcattttaaagctttggctatatagtcagaaatgtcctaaataacaaactattttgtatttaatttagggaagactaaagggaagaaaaatgaaaactcagtctttatgtaagctccaaggatattagggcttaaagggcttttctagttttatgagaatttgtactactgatttttatatattcctgtttttgagatgaacagatctctggggaaattgttgagttacaatggcatttcactgtgatccctctcaagctcagatcagttctataacccaatgacaacctgtctctttggtttactgtcctgtgaaatgtcagctcaagtttcccagaagtcgtgtgtttatgatgagtcagagtgcttttcctcggtgggacagttgctggccctcttaattttggtgtatgtgcttccaagtatctaaacctccagtctgatctgtatatgctatcctaactgttaattgtattattgattatgttgattatcttgcttgaaggttcatacttttcaatttgatagaaataaagtttttttctgcttatagctagcgaa

SEQ ID NO: 3638 - DNA, 3671 bp, Homo Sapiens
  NM_013411
gtgcgtggcgtgcgtgcgttgacctgggaagcactggacctgtgaggcgtgcgaactggtggcagtgagagacttcggcggacatggctcccagcgtgccagcggcagaacccgagtatcctaaaggcatccgggccgtgctgctggggcctcccggggccggtaaagggacccaggcacccagattggctgaaaacttctgtgtctgccatttagctactggggacatgctgagggccatggtggcttctggctcagagctaggaaaaaagctgaaggcaactatggatgctgggaaactggtgagtgatgaaatggtagtggagctcattgagaagaatttggagacccccttgtgcaaaaatggttttcttctggatggcttccctcggactgtgaggcaggcagaaatgctcgatgacctcatggagaagaggaaagagaagcttgattctgtgattgaattcagcatcccagactctctgctgatccgaagaatcacaggaaggctgattcaccccaagagtggccgttcctaccacgaggagttcaaccctccaaaagagcccatgaaagatgacatcaccggggaacccttgatccgtcgatcagatgataatgaaaaggccttgaaaatccgcctgcaagcctaccacactcaaaccaccccactcatagagtactacaggaaacgggggatccactccgccatcgatgcatcccagacccccgatgtcgtgttcgcaagcatcctagcagccttctccaaagccacatcctagtatcagaaggccaggcgagactgcaacactgctcatcaccccgcggcgtgatccctgctcttaggtgctgggcagaggggaagggtggtcagggtgaggatggtgagggagggctggtgaggggctcagaggaatacttggaacaacagcagtgttattgtagtgtggcagtttcttttatacataggtgagagtttttaaagtgtaagggaaaaattaattttttaaaaaacaccatgcttggagggtgggggtagaaatagacacaatattatttctaaggaatcgggttttcatttactctggactggtgaaaatattttttaaagccagtgctctaagacctcagcttttatctcagaaccccatgggttccagaccaagagtacaggaaatcaaattgttgtcctgtctgtctatagcttggaacagggagctttgattactgactccggttccacacactgtaagatcaaaaaaccatctccacatttgaaagagatgtaaggtgtattcatagggatggtggctcaacaaatcaagcaaactggaatcaaggggagggggaagggaatgaaatggaaagggaggctgattcccttcccctgacttaccactaatttactaggctacctactttcatgagtaacctctcacagctacccagcacatgccacaatcctatgctcttgccttcttttatctgcactgtgtgaagggactcttttaaataaatgagcaagtgtcctaagctatgtcatccaaagattgtcctttccattctcaaatcctgtgactgggatcactcaacagcactgtgatgtattattttcaatgaggtgcctttcttaactgaccaaatgctgccttgtttggcccctaaatcaataaaatatgttaaaatttgtatcccctgttgtggcattttttttagataatctaagctagaaaaatgacattgaattctggacctggctggaaggaaaagaagccctttcttgtcgctggcagctgtgtggtagggaggtccaagtatgtgcatatgagataagcctgcaacctcttgaccttcagctcctatgcaggcttctcttgagcccagagacaaggcagcttggtctagtggagatagcactgtgcttggagttcaggggacctaggacaaatcccagccagttagttattcactgtgctcctgtttcctcagctgaaaaaggaagttggttatgccaccttcttggccttaatggcattaaatgaaatttataggaagaaggtttttgctcagtacctggcatgcaacagacattggataaatgttagttggatccagatatacacagaaagatatctgcttcctgccaggctggataactgttgaatggacacttgtccatagtctagaaagccagtgcttctaatccttaagccagatctttgactaccttttcagttgcttctttaacactctttgttgcttctctgtgtgtcctagtttaaattcatttcctctccagcaaaagtgagcttaaataatttctccaaactaaagctctcatgtttttggaagggctgcctttgcaagtgaggtttctgagaaatgactgttgttcccaaaacaagagggagctgggctggaagcaccactattcttctttaggcatcttgttacagagagaggcagggtcttcactgacatattaaatcctgttccctgaaccagcccctccctcttctgctccacttcctcacctgtgcagagtcattttcaggtgttagccttactgatttgcactgatctgtttgttccctgagctttttaaataccctgtgaaaattttctttcctcccttggtcatcatgcatctaattgtggggaaatgtttgtcaaaccaacctgcaaagcagcatggtgtagttgagaagaataaacagagaagactgggtgagctattgtttgtttgcttctttgggcctgggtttcctcatctaatctgcaaaccaagaatgcagactagtcctaccactcccggaagactgacgttgtgccaggtattatgcaaaggcttcatgtaaccctcgacttcacgtaaccctcacacagcaccctgtggagtcagaactgtccttcacttttataggtgaggaaaccagactcagagaggtgaagtggcattcctgaggtcatgcataagaggcagtcaggactgaaacacagtctctaacacttatccgtccccttgatcttgttgctgaagtgatttaattacttgcgtagctctgcacacaggaagggctgctctgaataagagctcttttccatggacactcagcgctgccggaactgattttgaagaagtcactgccggctctgagggcctagggtatgtgtcttaggatctcctgtgtgcacaaagtgtcactgacagaacacagcaggatggagagcagcctcctcagaagcctcacaagtctttcctcagatgaagacagagcaacgagtcagaagacagatttcaacagcgacttcaccatgcgaccttggacaagttatctcacctcatcagtagaataggaatgatccctacccctcaaaggtgctgatgacactagtgaccaagatactcatgtgggttggactgcccaggacacagcagatgcttagtaaacacagatggaattcagagggaaaatgtaggcattgaagaaagttgtcttactgaccatccggaaccaggctaaggatcccctagaaatcatagacctctgaaattatatgcagaattctttatgtgttttcataattaataatagtctaacatattaaattcttagctgtgtgagaggttctgcatgcattatctcatttattctcctcgataaccctgt

SEQ ID NO: 3639 - DNA, 2187 bp, Homo Sapiens
  NM_013412
gcagctgcgaggacgcggggcgagccggaagtggagtgcgctgcggtgcgagctgggccggcggggtggttcgagagcgcgcagagtccagactggcggcagggcccgaggggccgacccgcagcgtccctggtctctccagccctcactcggaaccgcactgacaataccctcccctcccttgggctggacccctctctacagctaggagccaatggcagaagacaaaaccaaaccgagtgagttggaccaagggaagtatgatgctgatgacaacgtgaagatcatctgcctgggagacagcgcagtgggcaaatccaaactcatggagagatttctcatggatggctttcagccacagcagctgtccacgtacgccctgaccctgtacaagcacacagccacggtagatggcaagaccatccttgtggacttttgggacacggcaggccaggagcggttccagagcatgcatgcctcctactaccacaaggcccatgcctgcatcatggtgtttgatatacagaggaaagtcacctataggaacctgagcacctggtatacagagcttcgggagttcaggccagagatcccatgcatcgtggtggccaataaaattgatgacataaacgtgacccaaaaaagcttcaattttgccaagaagttctccctgcccctgtatttcgtctcggctgctgatggtaccaatgttgtgaagctcttcaatgatgcaattcgattagctgtgtcttacaaacagaactcccaggacttcatggatgagatttttcaggagctcgagaacttcagcttggagcaggaagaggaggacgtgccagaccaggaacagagcagcagcatcgagaccccatcagaggaggtggcctctccccacagctgaggggctggggctaggggtgggtggagcccttttaaaatacccttcccttcaacaactctccagctctgaatggagaaactctctaggccatcccctcttctacctcctgcaacccacccatcctattagcctcccacattcaaggcccgtgatacagggatgaggtcagcaccagcaaactctggactggtggaagaattccccaccagatctccttgaagcagaattagggatcagcatcattaacaccttccccaccccctccccccaggcagacagtgaagagaatcagaaaacatgattatgtgtcactttaatacaggaaatttaggtgttttttggtgtttttgtttttgttttctttccaaagctcacctcggggacaattccttgggcttctcctgaggtaatgattacccccccacccacagctgagtctgtgaggccccatcctttccctacgttttctcccatcttttttcctcttcaatctcccagtcatctggtttgtttgtttctttgttcgtcctgagacggagtctcgctctgtcgccaggctggagtgcagtggcgcagtctcggctcgctgcaacctctgactccctggttcaaacgattctcctgcctcagcctcccgagtggctggcatcaccacgcccagctaatttttgtatttttagtagagacggggtttcaccatgttgcccaggatggtctcgatctcctcacctcgtgatccgcccgcctcggcctcccaaagtgctgggattacaggcatgagccaccgcgcccggccccaatcatctgtttttaaacaatcgtttttgagcagatagctattcattccagatttccgtgtacccactctgtttcaggagctcttctaggtaaagctgagatcacaggaacagcaggtgacaggcctagctatagttaggaatacacaagcggtaaaatcgagtccttacagccataccacaaggtacgtccatttggactacaagaagagcttcctttaaagttcctatttcagcataaagaggctgtcctttttttttaggaatagtttggaccttgtgcctcctgtgggaggctgaggactgcaagaggagagctagcagatatgcctgttcacccctctctggtacttgtggcttgctagtatgtttttatgataatctcgggcattgtttgcattgtgtttattaatagggttttgtttttattgtttccttttttacagtaaaggctgaatgacataaacattgaaaaaaaaaaaaaaaaaa

SEQ ID NO: 3640 - DNA, 1646 bp, Homo Sapiens
  NM_013416
ggaggaggagcctctgccagactggagagaagcaggcctgagcctccccaaaggcagctcctggggactcccaggaccacaggctgagacgagacgcagggtggctggaggaagtgagaggtgaactcagcctgggactggctgggcgagactctccacctgctccctgggaccatcgcccaccatggctgtggcccagcagctgcgggccgagagtgactttgaacagcttccggatgatgttgccatctcggccaacattgctgacatcgaggagaagagaggcttcaccagccactttgttttcgtcatcgaggtgaagacaaaaggaggatccaagtacctcatctaccgccgctaccgccagttccatgctttgcagagcaagctggaggagcgcttcgggccagacagcaagagcagtgccctggcctgtaccctgcccacactcccagccaaagtctacgtgggtgtgaaacaggagatcgccgagatgcggatacctgccctcaacgcctacatgaagagcctgctcagcctgccggtctgggtgctgatggatgaggacgtccggatcttcttttaccagtcgccctatgactcagagcaggtgccccaggcactccgccggctccgcccgcgcacccggaaagtcaagagcgtgtccccacagggcaacagcgttgaccgcatggcagctccgagagcagaggctctatttgacttcactggaaacagcaaactggagctgaatttcaaagctggagatgtgatcttcctcctcagtcggatcaacaaagactggctggagggcactgtccggggagccacgggcatcttccctctctccttcgtgaagatcctcaaagacttccctgaggaggacgaccccaccaactggctgcgttgctactactacgaagacaccatcagcaccatcaagtctgtggcctgggagggaggggcctgtccagccttcctgccatccctacgaccactgcccctcacatcaccttctcatgggtccctctcccactccaaagcccccagtggctcccagatgagccacaatgctgtaacaagccatcaacgtccagggtggcctggccagcctcattcccctttcccccaccccacaccccacttccagcctgatgcctccttactccagcctgtcacccccttagggacatcgcggtggaggaagatctcagcagcactcccctattgaaagacctgctggagctcacaaggcgggagttccagagagaggacatagctctgaattaccgggacgctgagggggatctggttcggctgctgtcggatgaggacgtagcgctcatggtgcggcaggctcgtggcctcccctcccagaagcgcctcttcccctggaagctgcacatcacgcagaaggacaactacagggtctacaacacgatgccatgagctgacggtgtccctggagcagtgaggggacaccagcaaaaaccttcagctctcagaggagattgggaccaggaaaacctgggaggatgggcagacttcctgtctttgaggctaatggacccgtggggcttgtaatctgtctctttctactatttacatctgatttaaataaaccattccatctgaaaggggcaaaa

SEQ ID NO: 3641 - DNA, 4905 bp, Homo Sapiens
  NM_013433
gagcagagcttagggggtggggcctcggagccaggccatgtcggggctcctcaagaagagggccagtgggactgctggggtcgggctggaggggatctgattgggggaagcgtctggggactgcttggggcctgattgggggacgtcgcgaggatcggcttgccttgcgccatggactggcagccagacgagcagggcctgcagcaggtcctgcagctgctcaaagactcacagtcgcccaacacagccactcagcgcatcgtgcaggataaactcaaacaactcaatcagtttcctgacttcaacaactacctgattttcgtcctgaccagactcaagtcagaagatgagccaacgcgctctctcagtggcctcatcctcaagaacaacgtgaaggcacactatcagagcttcccaccccctgtggcagacttcatcaaacaggagtgtctcaacaacattggcgatgcctcctcgctcatccgagccaccattggcattctcatcaccaccatcgcttccaagggtgagctgcagatgtggcccgagctgctgccccagctctgcaacctgcttaactcggaggattacaacacttgtgagggagcctttggagccctgcagaagatctgtgaagactcatcagagcttctggacagtgacgccctcaacaggcccctcaacatcatgatccccaagttcctgcagttcttcaagcactgcagtcccaagatccggtcccacgccatcgcctgcgtgaaccagttcatcatggaccgggcccaggcgctgatggacaatattgacaccttcatcgagcacctatttgccctggctgtggatgatgaccccgaggtgcggaagaatgtgtgccgtgccctggtgatgcttctggaagtgcggattgacaggctcatcccccacatgcacagcatcatccagtacatgctgcagaggacccaggaccatgatgagaacgttgcccttgaggcctgtgagttctggctgacgctggccgagcagcccatctgcaaggaagtcctggcctcccatctggtccagttgatccccatcttggtgaatgggatgaagtactcggaaattgacatcatcctgctcaagggggatgtggaggaggatgaggctgtccccgacagtgagcaggacatcaagccacgcttccacaagtcacgcacggtcacactgccccacgaggctgagcggcctgatggctccgaggacgcggaggatgacgatgatgatgatgctctgtccgactggaatttgaggaagtgctcagcggctgcactggacgtcctcgccaatgtcttccgggaggaactgctgccccacctactcccactactcaaaggcctcctcttccaccccgagtgggtggtcaaggagtcgggcatcctggtgctgggcgccattgctgagggctgcatgcagggcatggtgccctacctgcctgagctgatcccgcacctgatccagtgcctgtcggataagaaggccttggtccgctccatcgcctgctggacgctgagccgctatgcccactgggtggtcagccagccacccgacatgcacctcaagcccctgatgacagagctgctcaaacgcatcctggatggcaacaagagggtacaggaggcggcctgcagtgcttttgccaccctggaggaagaggcctgcacggagctggtgccctacctcagctacatcctggacacccttgtctttgcctttgggaaataccagcacaagaacctgctcatcctctatgacgccattggcaccctggccgactctgtaggccaccacctcaaccagccggaatacatccagaagctgatgcccccactgatccagaagtggaatgagctcaaggacgaagacaaggacctcttccccctgctggagtgtctgtcatcggtggccaccgccctgcagagtggcttcctgccttactgtgagcccgtctaccagcgctgtgtcaccctggtgcagaagacactggctcaggccatgatgtacacccagcaccctgagcagtatgaggctcccgacaaggacttcatgatcgtagcactggatctgctcagcggcctggccgagggcctgggtggtcacgtggagcagctggtggcccgcagcaacatcatgacattgctgttccagtgcatgcaggactcgatgcctgaggtccggcagagctcctttgccctcctgggagacctcaccaaagcctgcttcatccatgtcaagccctgtatcgccgagttcatgcccattctgggcaccaacctgaacccagagttcatctccgtctgcaacaacgccacctgggccattggtgaaatctgcatgcagatgggggcagagatgcagccttatgtgcagatggtcctcaacaacctggtggaaatcattaaccgacccaacacacccaagacactgctggaaaacacagccatcaccatcggccgcttgggctacgtgtgcccccaggaggtggcacccatgctgcagcagttcatccggccttggtgcacgtccctcaggaacatcagggacaacgaggagaaggactcagccttccgcggcatctgcatgatgatcggtgtcaacccggggggcgttgtgcaggactttattttcttctgcgatgctgtagcctcctgggtgagcccgaaggatgaccttcgggacatgttttataagattctccacggcttcaaagaccaagttggggaagataactggcagcagttctctgagcaattcccgccgctgctcaaggagaggctggcggctttctatggggtctaggtgatcatggagactgccaggtttctgtctgcgtcgtcgtcggagggattactggggagtgcgctgcatccggaagtcgctgtgccctggttgaggggggttagggaggagtgagtgggactcaaatccagatgccttccccgtccgtccgtccgtccgtccatccgtccacttgccctcctggcaggtgggtggggccaccatgctcatcctacaaacggggaggtgggggggacttctggtgggcaagggcccctgggctctaatagggtcatctctggcagcccacttgggccagctacgtgggagggaggaattacacagctgaccgaatccggcttcggatgaggtgagggaggagcaggtcaggaggggggccctcgtagggacgcgtacactcacacggacacacatggccacacgcatgtgcgggtgccataaccggcgaggctgggccagccgctccaccatttccccgactgcatggagacagtagaattagtgaacccctgagttaacccgtaaggccttccgtgtaacctgcatctagagtttaagaagcttctgctgttttgccggaattggcggtgactggggagggctgggtgggtggggggcctcaggcgggatctcggggcggggggaggaggatggtgaccttgggagtcgccctgtcagcacgcacatgcttgggacccactccacacactccctgccagctttgttgcagcctcagctggtggtgtctccgtccttatcctagcctagctcgcagggtgagaaccactggagtggctggggctggccagaggtcaccgtttctccttcctgtgtgctccagtggcttttgaagacactgggttgggacctttttcctgaagagagctgggtgtagccagagctactggcacctaccccgagcatctctctctgtaagcagcttcaggggcagtccgtttctctgtgcttctgaaacccccttctcacgtttcaggccccagttttaactcaaggcctggggcaggggcgtttaattgatgatgacagaggacacaggtttttgccagcaaaaaggaaaaccaaggcttggtggaagggaaaggtggtgtgtcccctgttccctattccatctccctgggacttcctgctcatcatagtacccagtgagcccagagatcctactagactgggtcagcaattctagagaaccttccggaatagtctgggaacatggtcaaggtggaaggggctcccctagagagggtgggggtgtagttacttcccagttggccagaaaactgggccttgcagacccccttagcattttttccctttttttccttccctgctttctacttctttggggagccccttgtgttttggagtctgactggagtctcgcatcctggggcctgctccatccatccctcctgggcgccagaccctccatccaagccctgtgtctttccatagtcagggtcaggccctgcatctattccaaggggcactcagtacacattccataaattagctgggtgtccctgcacgcccaccccatgaaactcgagcaggtctctggaagccatttgttaaaaaaaaaaaaaaaagttttaaaaataccttttaattttctggtaattccagttctttgaagcatcctctgctgggtcttggggtgtgtggatggattggctgtctgatgggattggtaacccctcgctactcaagatggggggatacaaacaccttcagggaaggggagcctggttcttctcgttttcctttttttttttttttttaaaaaaaaactatttaattttttaatttatttttggttgttttttgcacaatgaagtttcagcttctcaaccttctcccctacccagggctgtggacccagactggccttgagccacagtccctctttccctcctcaccctcttccccctgcgggctcccgggtctgtccatttgttactgtgctgtgctggggattggcgccgaggtggcgtgagattccacttgtgtagaactttgttgagtaaagatcagtttcttgtgaactcctta

SEQ ID NO: 3642 - DNA, 3632 bp, Homo Sapiens
  NM_013440
agaagggaggtagtcgccctccgtcgtggcctggcgtggattccgagcgttggtgtctggcggtttccgaccgttggtgtctggcacgcgccaccccgatgtaccaggtaaagccctatcacggggtcggcgcccctctccgtgtggagcccacctgcatgtactggctccccaacatgcacggcaggagcggcggcccagcactcggcactggccacttgcagacaagaagacaagaaaatgatttgaggacagcttcaatcgcggtgtgaagaagaaagcaacaaaacgaccactgaaaacaatgccggtggcaaaacatccaaagaaagggtcccaagtggtacatcgtcatagctggaaacagtcagagccaccagccaatgatcttttcaatgctgcgaaagctgccaaaagtgacatgcagtgtggccatgaggtctgccggaagtgacttgttggtgttatctcctgagttaaaatgtgaagggatttttttttttcagattactgagagtcttcagttactagaggcggatttccctgactgaagaccatgttgcaggcccacagctgcctacagaaccgtcccaaaatatggcaaagaaacctattctgagcgatagggtctcaccatgttgcccaggctggtcttgaactcctggactcatcctaaagtgctggcctctcattccctgtctgtgcacacctcacggcaagggccagcctgtttcctcccggtcacctccaaatcttgctgcttttaattcaactcagaggcctagccagggttgagttctcacccacctgtgccgccctgccttgttacctggaagcacagccttggggactgagcaggccctcactgtcactttaagaagggaatcagccactttgtgctcaccacctctggggaaggtgtgagaggagagaaggaagtggctgtttggctgctgacaacatgaagacttcctgcgatgagaacagaggcacaggtgccggccctgcagcccccagaacccggactggagggggccatggggcgccggaccctggccctgccctgggtgctgctgaccctgcgtgtcactgcagggaccccggaggtgtgagtacaagttcggatggaggccaccgagctctcgtccttcaccatccgttgtgggttcctggagtctggctccatctccctggtgactgcccgctgggaaacccagagcagcatctctctcatcctggaaggctctggggccagcagcccctgcgccaacaccaccttctgctgcaagtttgcgtccttccctgagggctcctgggaggcctgtgggagcctcccgcccagctcagacccagggctctctgtcccgccgactcctgcccccattctgcgggcagacctggccgggatcttgggggtctcaggagtccttctctttgactgtggctacctccttcatctgctgtgccgacagaagcaccgccctgcccctaggctccagccatcccacaccagctcctaggcactgagagcacgagcatgggcacccagccaggcctcccaggctgctctccacgtcccttatgccactatcaacaccagctgctgcccagctactttggacacagctcacccccgacagggggccgtcctggtgggcatcactccccacccacaccgcacactggccccagggccctgctgcctgggcctccacatccatccctgcacatggcagctttgtctctgttgagaatggactctacgcttaggctgggcagaggcctccctgcactggtcctggcctcactcttttccctgacccttggggcccagggccatggagggacccttaggagttcaatgagagagaccatgaggccactgggctttccccttcccaggcctcctgggtgccacccccttacgttattcttgggcctctaataagtgtcccacaggtgcctggccaggcccacctgctgcagatgtggtctgtgtgtgtgcatgtgtgggtgtgtgtgggcacaggtgtgagtgtgtgagcaacagtaccccattccagtcgtttcctgctgtgactaagtcagcaacacagttcctctgacatgggccttggctgtgcttctttgggggtgaagagattggggaggaagtctccacccctgggaggcagaagccaggcatagcgcgctggctaggactccagtaccgtgaagggaggcagtgagagcagacatctgtgcctcattcctgatctcaaggggaaagcaagaacaagggaggcttcctcaggatctcgaacctgcggaaggaggaccagtctgtgtacttctgccaagtccagctggacatacagatcagggaggctgtcgtggcagtccatcaaggggacccacctcaccatcacccaggccctcaggcagcccctccacagggcccctctcctgcctggacagctctgctggtctccccgtcccctggagaagaacaaggccatgggtcggcccctgctgctgcccctgctgctcctgctgcagccgccagcatttctgcagcctggtggctccacaggatctggtccaagctacctttatggggtcactcaaccaaaacacctctcagcctccatgggtggctctgtggaaatccccttctccttctattacccctgggagttagccatagttcccaacgtgagaatatcctggagacggggccacttccacgggcagtccttctacagcacaaggccgccttccattcacaaggattatgtgaaccggctctttctgaactggacagagggtcaggagagcggcttcctcaggatctcaaacctgcggaaggaggaccagtctgtgtatttctgccgagtcgagctggacacccggagatcagggaggcagcagttgcagtccatcaaggggaccaaactcaccatcacccaggctgtcacaaccaccaccacctggaggcccagcagcacaaccaccatagccggcctcagggtcacagaaagcaaagggcactcagaatcatggcacctaagtctggacactgccatcagggttgcattggctgtcgctgtgctcaaaactgtcattttgggactgctgtgcctcctcctcctgtggtggaggagaaggaaaggtagcagggcgccaagcagtgacttctgaccaacagagtgtggggagaagggatgtgtattagccccggaggacgtgatgtgagacccgcttgtgagtcctccacactcgttccccattggcaagatacatggagagcaccctgaggacctttaaaaggcaaagccgcaaggcagaaggaggctgggtccctgaatcaccgactggaggagagttacctacaagagccttcatccaggagcatccacactgcaatgatataggaatgaggtctgaactccactgaattaaaccactggcatttgggggctgtttattatagcagtgcaaagagttcctttatcctccccaaggatggaaaaatacaatttattttgcttaccatacaccccttttctcctcgtccacattttccaatctgtatggtggctgtcttctatggcagaaggttttggggaataaatagcgtgaaatgctgctga

SEQ ID NO: 3643 - DNA, 1700 bp, Homo Sapiens
  NM_013441
cctagtcccagcccagggggccgctctcgccggcgtcgagggcgtggcggcgaggctgctgctgcaggcggctcccggctctgccttcggccccgcccgccgcccaccaggctcccagaggccccgcagctcgcgccgtccggctccccgcagccccgtcgggcagcccgggcccgtccgctgccctcccggctcccgtcctgcggcggcggggcgtgcaggtgaggccccacggcgcccggcctctccagcagtgggtgcctgatagacatcctaggactatacagaaggaaaaggcccactttgggggataatgctgagggacactatgaaatcttggaatgatagccagtcagatctgtgtagcactgaccaagaagaggaagaagagatgatttttggtgaaaatgaagatgatttggatgagatgatggatttaagtgatctgcctacctcactttttgcttgcagcgtccatgaagcagtgtttgaggcacgagagcagaaggaaagatttgaagcactcttcaccatctatgatgaccaggttacttttcagctgtttaaaagctttagaagagtcagaataaatttcagcaaacctgaagcggcagcaagagcgcgaatagaactccacgaaacagacttcaatgggcagaagctaaagctatattttgcacaggtgcagatgtccggcgaagtgcgggacaagtcctatctcctgccgccccagcctgtcaagcagttcctcatctcccctccagcctctcccccggtggggtggaagcagagcgaagatgcgatgcctgttataaattatgatttactctgtgctgtttccaaattgggaccaggagagaaatatgaacttcacgcgggaacagagtcgacacccagcgtggtggttcatgtctgtgaaagtgaaactgaagaggaagaagagacaaaaaaccccaaacagaaaattgcccagacgaggcgccccgaccctccgaccgcagcgttgaatgagccccagacctttgattgcgcgctgtgaggcccttggttgtggtgcgaggcggctgccctggtgggctctggccatggcgctctgtgcctgcggccgatgcgttgctgcgaacagcataggtgagactctgccgagtgaggtataggtcttctcaccacgcctgtactgcagacacggtcgtgtagagtagcagctgatttgacctgtcccagattttaagtgatattccaaaagggactttacattaaaggagaagcccccaagatgtggccacccttaaccatttttaaatagtaacaaattaggaaaacagctcccctcccctccagccatgtaagtcctcctgattctgtatcacatgagacaccaaaaactggaaatgtagtcacacccagtacagtaccatttttatgaatttaaaaatagtcttataattttaattgtttgtgggtatttttctactggtataaatagcttctaattaataaatcgatcaaaggttgttactcagtatacatgaaattttttgcaggaaaagaaaccagaaatacagaataattcatagaaatcatggttctcaagtatttgttcaattagctttggggaagaaatgccaaatccactttgaggatgagtcttacgacacagatccacccacatgttgctcttatctggaatttgggacaaa

SEQ ID NO: 3644 - DNA, 2416 bp, Homo Sapiens
  NM_013443
ggcctgaggagcgcggaccccggcgctcggctcccggcgccatgtgagggggctcgggggccgcggggggccgggcgctccccgccggagatgaggaaactgaggctcagagaggtcacatggcttgctcgaggccccccagccagtgtgaacccacatccctgcccccagggccacctgcaggacgccgacacctacccctcagcagacgccggagagaaatgagtagcaacaaagagcagcggtcagcagtgttcgtgatcctctttgccctcatcaccatcctcatcctctacagctccaacagtgccaatgaggtcttccattacggctccctgcggggccgtagccgccgacctgtcaacctcaagaagtggagcatcactgacggctatgtccccattctcggcaacaagacactgccctctcggtgccaccagtgtgtgattgtcagcagctccagccacctgctgggcaccaagctgggccctgagatcgagcgggctgagtgtacaatccgcatgaatgatgcacccaccactggctactcagctgatgtgggcaacaagaccacctaccgcgtcgtggcccattccagtgtgttccgcgtgctgaggaggccccaggagtttgtcaaccggacccctgaaaccgtgttcatcttctgggggcccccgagcaagatgcagaagccccagggcagcctcgtgcgtgtgatccagcgagcgggcctggtgttccccaacatggaagcatatgccgtctctcccggccgcatgcggcaatttgacgacctcttccggggtgagacgggcaaggacagggagaagtctcattcgtggttgagcacaggctggtttaccatggtgatcgcggtggagttgtgtgaccacgtgcatgtctatggcatggtcccccccaactactgcagccagcggccccgcctccagcgcatgccctaccactactacgagcccaaggggccggacgaatgtgtcacctacatccagaatgagcacagtcgcaagggcaaccaccaccgcttcatcaccgagaaaagggtcttctcatcgtgggcccagctgtatggcatcaccttctcccacccctcctggacctaggccacccagcctgtgggacctcaggagggtcagaggagaagcagcctccgcccagccgctaggccagggaccatcttctggccaatcaaggcttgctggagtgtctcccagccaatcagggccttgaggaggatgtatcctccagccaatcagggcctggggaatctgttggcgaatcagggatttgggagtctatgtggttaatcaggggtgtctttcttgtgcagtcagggtctgcgcacagtcaatcagggtagagggggtatttctgagtcaatctgaggctaaggacatgtcctttcccatgaggccttggttcagagccccaggaatggaccccccaatcactccccactctgctgggataatggggtcctgtcccaaggagctgggaacttggtgttgccccctcaatttccagcaccagaaagagagattgtgtgggggtagaagctgtctggaggcccggccagagaatttgtggggttgtggaggttgtgggggcggtggggaggtcccagaggtgggaggctggcatccaggtcttggctctgccctgagaccttggacaaacccttccccctctctgggcacccttctgcccacaccagtttccagtgcggagtctgagaccctttccacctcccctacaagtgccctcgggtctgtcctccccgtctggaccctcccagccactatcccttgctggaaggctcagctctttggggggtctggggtgacctccccacctcctggaaaactttagggtatttttgcgcaaactccttcagggttgggggactctgaaggaaacgggacaaaaccttaagctgttttcttagcccctcagccagctgccattagcttggctcttaaagggccaggcctccttttctgccctctagcagggaggttttccaactgttggaggcgcctttggggctgcccctttgtctggagtcactgggggcttccgagggtctccctcgaccctctgtcgtcctgggatggctgtcgggagctgtatcacctgggttctgtcccctggctctgtatcaggcactttattaaagctgggcctcagtggggtgtgtttgtctcctgctcttctggagcctggaaggaaagggcttcaggaggaggctgtgaggctggagggaccagatggaggaggccagcagctagccattgcacactggggtgatgggtgggggcggtgactgccccagacttggttttgtaatgatttgtacaggaataaacacacctacgctccgaaaaaaaaaaaaaaaaaa

SEQ ID NO: 3645 - DNA, 3418 bp, Homo Sapiens
  NM_013444
tgccagagttgctgggagtgcgcgcggtcggatcacaaggcggcggcggaggaggcccagagaccggagcgcggagacctcagccagcggcctacgcccaggcctttctccaccggaggaccagggaaccgcagtcttcatcacagaggtaccgtgctccgcgctccccgcctgacccggcccagcccgctgcggcggtgcctccttccttcctccttccctcgcgctctctctttcgcccgcccgcgccttccctgcccgcctgcgtcaccgcggccgccatggctgagaatggcgagagcagcggccccccgcgcccctcccgcggccctgctgcggcccaaggctcggctgctgccccggctgagcctaaaatcatcaaagtcacggtgaagactcccaaagagaaagaggagttcgcggtgcccgagaacagctcggttcagcagtttaaggaagcgatttcgaaacgcttcaaatcccaaaccgatcagctagtgctgatttttgccggaaaaatcttaaaagatcaagataccttgatccagcatggcatccatgatgggctgactgttcaccttgtcatcaaaagccagaaccgacctcagggccagtccacgcagcctagcaatgccgcgggaactaacactacctcggcgtcgactcccaggagtaactccacacctatttccacaaatagcaacccgtttgggttggggagcctgggaggacttgcaggccttagcagcctgggcttgagctcgaccaacttctctgagctccagagccagatgcagcagcagcttatggccagccctgagatgatgatccaaataatggaaaatccctttgttcagagcatgctttcgaatcccgatctgatgaggcagctcattatggctaatccacagatgcagcaattgattcagagaaacccagaaatcagtcacctgctcaacaacccagacataatgaggcagacactcgaaattgccaggaatccagccatgatgcaagagatgatgagaaatcaagacctggctcttagcaatctagaaagcatcccaggtggctataatgctttacggcgcatgtacactgacattcaagagccgatgctgaatgccgcacaagagcagtttgggggtaatccatttgcctccgtggggagtagttcctcctctggggaaggtacgcagccttcccgcacagaaaatcgcgatccactacccaatccatgggcaccaccgccagctacccagagttctgcaactaccagcacgaccacaagcactggtagtgggtctggcaatagttccagcaatgctactgggaacaccgttgctgccgctaattatgtcgccagcatctttagtaccccaggcatgcagagcctgctgcaacagataactgaaaacccccagctgattcagaatatgctgtcggcgccctacatgagaagcatgatgcagtcgctgagccagaatccagatttggctgcacagatgatgctgaatagcccgctgtttactgcaaatcctcagctgcaggagcagatgcggccacagctcccagccttcctgcagcagatgcagaatccagacacactatcagccatgtcaaacccaagagcaatgcaggctttaatgcagatccagcaggggctacagacattagccactgaagcacctggcctgattccgagcttcactccaggtgtgggggtgggggtgctgggaaccgctataggccctgtaggcccagtcacccccataggccccataggccctatagtcccttttacccccataggccccattgggcccataggacccactggccctgcagccccccctggctccaccggctctggtggccccacggggcctactgtgtccagcgctgcacctagtgaaaccacgagtcctacatcagaatctggacccaaccagcagttcattcagcaaatggtgcaggccctggctggagcaaatgctccacagctgccgaatccagaagtcagatttcagcaacaactggaacagctcaacgcaatggggttcttaaaccgtgaagcaaacttgcaggccctaatagcaacaggaggcgacatcaatgcagccattgaaaggctgctgggctcccagccatcgtaatcacatttctgtacctggaaaaaaaatgtatcttatttttgataatggctcttaaatctttaaacacacacacaaaatcgttctttactttcattttgattcttttaaatctgtctagttgtaagtctaatatgatgcattttaagatggagtccctccctcctacttccctcactccctttctcctttgcttatttttcctaccttcccttcctcttgtctccccactccctccctctttgtttccttccttccttatttcctttagtttccttccttagccgttttgagtggtgggaatcaatgctgtttcactcaaaagtgttgcatgcaaacacttctctttattctgcatttattgtgatttttggaaacaggtatcaaccttcacagttgggtgaacaagtgttgtcctacagatgtccaatttatttgcatttttaaacattagcctatgatagtaatttaatgtagaatgaagatattaaaaacagaagcaaattatttgaagctctctaatttgtggtacgatattgcttattgtgactttggcatgtatttttgctagcaaaatgctgtaagatttataccattgatcttttttgctatatttgtatacagtacagtaagcacaattggcactgtacatctaaaaatattacagtagaatctgagtgtaatatgtgtaaccaaaatgagaaagaatacaagaaatgtttctggagctagttatgtctcacaattttgtagaatcttacagcatctttgataaacttctcagtgaaaatgttggctaggcaagttcagttaaaatatagtagaaatgtttatcctggtatctctaagtatacatttaattgtacagaaaatttacagtgtaacattgtgtcaacatttgcagattgactgtatatgaccttaatctttgtgcagcctgaaggatcagtgtagtaatgccaggaaagtgctttttacctaagacttccttctcagcttctcccataaagagaccctaatatgcattttgatttgtaattggaaatgtaactttcactgaaagtgtcatgtgatgtttgcattacttttaactgctatgtataaaggaaagtgtgtcttttgacttcatcagttatttctcttgtgcacagagaaaaatgcattaaaaatgactaaaaaaaataaaaaattaaaaaatggataaatcttttctttttgccttttggccctaggatcgtgtttaggaggattatcccaccccgaga

SEQ ID NO: 3646 - DNA, 3158 bp, Homo Sapiens
  NM_013446
accaatgagcggcgccgtgggcgggccgcgggcgcgcatgctctgggcccgcagttgaagtggcgagagcgctcagatacgcgacgcgtagcaggcggggaccgaacgggtgcctcagtgtccttcccctcccctcgcctggcctcgccgtcctctccccgcagccggaccggaactatgtgatcccggaagttccggggcctttgctgtgtgggataaacagtaatggcggaggctgcaactcccggaacaacagccacaacatcaggagcaggagcggcagcggcgacggcggcagcagcctcccccaccccgatccccacagtcaccgccccgtccctgggggcgggcggagggggcggcggcagcgacggcagcggcggcggctggactaaacaggtcacctgcaggtattttatgcatggggtttgtaaggaaggagacaactgtcgctactcgcatgacctctctgacagtccgtatagtgtagtgtgcaagtattttcagcgagggtactgtatttatggagaccgctgcagatatgaacatagcaaaccattgaaacaggaagaagcaactgctacagagctaactacaaagtcatcccttgctgcttcctcaagtctctcatcgatagttggaccacttgttgaaatgaatacaggcgaagctgagtcaagaaattcaaactttgcaactgtaggagcaggttcagaggactgggtgaatgctattgagtttgttcctgggcaaccctactgtggccgtactgcgccttcctgcactgaagcacccctgcagggctcagtgaccaaggaagaatcagagaaagagcaaaccgccgtggagacaaagaagcagctgtgcccctatgctgcagtgggagagtgccgatacggggagaactgtgtgtatctccacggagattcttgtgacatgtgtgggctgcaggtcctgcatccaatggatgctgcccagagatcgcagcatatcaaatcgtgcattgaggcccatgagaaggacatggagctctcatttgccgtgcagcgcagcaaggacatggtgtgtgggatctgcatggaggtggtctatgagaaagccaaccccagtgagcgccgcttcgggatcctctccaactgcaaccacacctactgtctcaagtgcattcgcaagtggaggagtgctaagcaatttgagagcaagatcataaagtcctgcccagaatgccggatcacatctaactttgtcattccaagtgagtactgggtggaggagaaagaagagaagcagaaactcattctgaaatacaaggaggcaatgagcaacaaggcgtgcaggtattttgatgaaggacgtgggagctgcccatttggagggaactgtttttacaagcatgcgtaccctgatggccgtagagaggagccacagagacagaaagtgggaacatcaagcagataccgggcccaacgaaggaaccacttctgggaactcattgaggaaagagagaacagcaacccctttgacaacgatgaagaagaggttgtcacctttgagctgggcgagatgttgcttatgcttttggctgcaggtggggacgacgaactaacagactctgaagatgagtgggacttgtttcatgatgagctggaagatttttatgacttggatctatagcaaccttgcgtggcgtgtgaactggtctgctgacctcagacagcagctgtcccctgtggtggtgtggcagtgcctgtgttctctcctaggcaggcctctcaactccaggtgctgtcctaagaatttttacccagggcctgtcttctcaacccctcacctttccctgaggagtgtgttgttttccctgttgaaaaaagttacaaaaataaatcttaaagttagttttttgtaacacgaatttaactgtcagacagttagtgtaggtgtgttgcgtcatctgttttcaaccagattgcatttatggacttttcacacactcattttgaggaccccaggttcaaaagtaaaagcagtggccctgctttggggtccaagaataggagtgatgggtgaagggacctaagctggccaatagccctctgccccagacatgggatgtggatccttgaggtttctggtgaaatctgcacatctgtgtttttatatctgttccctaccctgtaatccctaccacgtgcacttgttctgtggttttggtctcttgtttaattgcacacaagtaatactactgggtaaccagaatcaggtgtgaatgtgttgagattttttactgttttgcatgataggaaaattgagaaagaatacgtataaaagatagagaggcataacatcaatgcagagttggaagttggctcccaagggctgacatggtgtgagtgtgtgggtgtgtgataagcttctcatccctgcatagatgcagtattcttagccttagtagaaaaacctggtttagtggtttaagccttgtgtggcagatagatcttaaagggcaaagcagtatattggtagttgtcaatatagcagtgctagctctgtctatataaatagagaaatggggttagccatagaggttaaaactacctggttatcccatataataacacaaactgggtcttggatacacagttgtatttaatgttttacgatctagcctttccagtacaggcactttctgagaaacctttgtcctcacttgaggcattttgttgtcgggtttttgtgtttgtttttgtgggtatttgcctcattccacccctgagctttcaggtagacagacgtgattcaaaactctgttctaaggtgtttattgtagtggagtaatgggtttgcagtgataagtcatacttttccaccgaaagggagggcttgggaatccctgagattagctaaagttaagttgttggaagaattccttgattggaaattgtacctttgtgttttgttgctctgtttcctgaaaataactcggggatgctcctggtttgtccatctactgctttgattccttggatcccacccattctttcactttaagaaaaaacaaataattgttgcagaggtctctgtattttgcagctgcccttttgtaagaagcacttttcccaaataaaacaattaaaaaaaaagttggctgttcaaaaaaa

SEQ ID NO: 3647 - DNA, 6031 bp, Homo Sapiens
  NM_013448
cttttcccatcgtgtagtcaagagtctgtgccagacttgaaggctttactttgttagccatgtgtttatgaacccccagcgctttccctagatcttttggctgataatctcaaacatggaggatgcttctgaatcttcacgaggggttgctccattaattaataatgtagttctcccaggctctccgctgtctcttcctgtatcagtgacaggctgtaaaagtcatcgagtagccaataaaaaggtagaagcgaggagtgaaaagctcctcccaacagctcttcctccttcagagccgaaagtagatcagaaacttcccaggagctccgagaggcggggaagtggcggtgggacgcaattccccgcgcggagtcgggcagtggcagcgggagaagcggcagccaggggcgcggcggggccggagagaggcggtcccctgggaggacggggtctcccctcgttgcctttgtagtggagaaggtggacaagtggcagtcggcgtgatcgcagggaagcggggccggcgcgggcggccgagggtccaggcgagcccgcgggcggacgggagatgccgctgctacaccgaaagccgtttgtgagacagaagccgcccgcggacctgcggcccgacgaggaagttttctactgtaaagtcaccaacgagatcttccgccactacgatgacttttttgaacgaaccattctgtgcaacagccttgtgtggagttgtgctgtgacgggtagacctggactgacgtatcaggaagcacttgagtcagaaaaaaaagcaagacagaatcttcagagttttccagaaccactaattattccagttttatacttgaccagccttacccatcgttcgcgcttacatgaaatttgtgatgatatctttgcatatgtcaaggatcgatattttgtcgaagaaactgtggaagtcattaggaacaatggtgcaaggttgcagtgtaggattttggaagtcctccctccatcacatcaaaatggttttgctaatggacatgttaacagtgtggatggagaaactattatcatcagtgatagtgatgattcagaaacacaaagctgttcttttcaaaatgggaagaaaaaagatgcaattgatcccttactattcaagtataaagtgcaacccactaaaaaagaattacatgagtctgctattgttaaagcaacacaaatcagccggagaaaacacctattttctcgtgataaactaaagctttttctgaagcaacactgtgaaccacaagatggagtcattaaaataaaggcatcatctctttcaacgtataaaatagcagaacaagatttttcttatttcttccctgatgatccacccacatttatcttcagtcctgctaacagacgaagagggagacctcccaaacgaatacatattagtcaagaggacaatgttgctaataaacagactcttgcaagttataggagcaaagctactaaagaaagagataaacttttgaaacaagaagaaatgaagtcactggcttttgaaaaggctaaattaaaaagagaaaaagcagatgccctagaagcgaagaaaaaagaaaaagaagataaagagaaaaagagggaagaattgaaaaaaattgttgaagaagagagactaaagaaaaaagaagaaaaagagaggcttaaagtagaaagagaaaaggaaagagagaagttacgtgaagaaaagcgaaagtatgtggaatacttaaaacagtggagtaaacctagagaagatatggaatgtgatgaccttaaggaacttccagaaccaacaccagtgaaaactagactacctcctgaaatctttggtgatgctctgatggttttggagttccttaatgcatttggggaactttttgatcttcaagatgagtttcctgatggagtaaccctagaagtattagaggaagctcttgtaggaaatgacagtgaaggcccactgtgtgaattgctttttttcttcctgactgcaatcttccaggcaatagctgaagaagaagaggaagtagccaaagagcaactaactgatgctgacaccaaagatttaacagaggctttggatgaagatgcagaccccacaaaatctgcactgtctgcagttgcatctttggcagctgcatggccacagttacaccagggctgcagtttgaaaagtttggatcttgatagctgcactctttcagaaatcctcagactgcacatcttagcttcaggtgctgatgtaacatcagcaaatgcaaagtatagatatcaaaaacgaggaggatttgatgctacagatgatgcttgtatggagcttcgtttgagcaatcccagtctagtgaagaaactgtcaagcacctcagtgtatgatttgacaccaggagaaaaaatgaagatactccatgctctctgtggaaagctactgaccctagtttcaactagggattttattgaagattatgttgatatattacgacaggcaaagcaggagttccgggaattaaaagcagaacaacatcgaaaagagagggaagaagcagctgccagaattcgtaaaaggaaggaagaaaaacttaaggagcaagaacaaaaaatgaaagagaaacaagaaaaactgaaagaagatgagcaaagaaattcaacggcagatatatctattggggaggaagaaagggaagattttgatactagcattgagagcaaagacacagagcaaaaggaattagatcaagatatggtcactgaagatgaagatgacccaggatcacataaaagaggcagaagggggaaaagaggacaaaatggatttaaagaatttacaaggcaagaacagatcaactgtgtaacaagagagcctcttactgctgatgaggaagaagcattaaaacaggaacaccaacgaaaagagaaagagctcttagaaaaaatccaaagtgccatagcctgtaccaatatctttcccttgggtcgcgaccgcatgtatagacgatactggattttcccttctattcctggactctttattgaagaggattattctggtcttactgaagacatgctgttgcctagaccttcatcatttcagaataatgtacagtctcaagatcctcaggtatccactaaaactggagagcctttgatgtctgaatctacctccaacattgaccaaggtccacgtgaccattctgtgcagctgccaaaaccagtgcataagccaaatcggtggtgcttttacagttcttgtgaacagctagaccagcttattgaagctcttaattctagaggacatagagaaagtgccttaaaagaaactttgttacaagagaaaagcagaatatgtgcacagctagcccgtttttctgaagagaaatttcatttttcagacaaacctcagcctgatagcaaaccaacatatagtcggggaagatcttccaatgcatatgatccatctcagatgtgtgcagaaaagcaacttgaactaaggctgagagattttcttttagatattgaagatagaatctaccaaggaacattaggagccatcaaggttacagatcgacatatctggagatcagcattagaaagtggacggtatgagctgttaagtgaggaaaacaaggaaaatgggataattaaaactgtgaatgaagacgtagaagagatggaaattgatgaacaaacaaaggtcatagtaaaagacagacttttggggataaaaacagaaactccaagtactgtatcaacaaatgcaagtacaccacaatcagtgagcagtgtggttcattatctggcaatggcactctttcaaatagagcagggcattgagcggcgttttctgaaagctccacttgatgccagtgacagtgggcgttcttataaaacagttctggaccgttggagagagtctctcctttcttctgctagtctatcccaagtttttcttcacctatccaccttggatcgtagcgtgatatggtctaaatctatactgaatgcgcgttgcaagatatgtcgaaagaaaggcgatgctgaaaacatggttctttgtgatggctgtgataggggtcatcatacctactgtgttcgaccaaagctcaagactgtgcctgaaggagactggttttgtccagaatgtcgaccaaagcaacgttctagaagactctcctctagacagagaccatccttggaaagtgatgaagatgtggaagacagtatgggaggtgaggatgatgaagttgatggcgatgaagaagaaggtcaaagtgaggaggaagagtatgaggtagaacaagatgaagatgactctcaagaagaggaagaagtcagcctacccaaacgaggaagaccacaagttagattgccagttaaaacaagagggaaacttagctcttctttctcaagtcgtggccaacaacaagaacctggaagatacccttcaaggagtcagcagagcacacccaaaacaactgtttcttctaaaactggtagaagcctaagaaagataaactctgctcctcctacagaaacaaaatctttaagaattgccagtcgttctactcgccacagtcatggcccactgcaagcagatgtatttgtggaattgcttagtcctcgtagaaaacgcagaggcaggaaaagtgctaataatacaccagaaaatagtcccaacttccctaacttcagagtcattgccacaaagtcaagtgaacagtcaagatctgtaaatattgcttcaaaactttctctccaagagagtgaatccaaaagaagatgcagaaaaagacaatctccagagccatcgcctgtgacactgggtcgaaggagttctggccgacagggaggagttcatgaattgtctgcttttgaacaacttgttgtagaattggtacgacatgatgacagctggccttttttgaaacttgtttctaaaatccaggtcccagactactatgacatcatcaaaaagcccattgccttaaatataattcgtgaaaaagtgaataagtgtgaatataaattagcatctgagtttattgatgacattgagttaatgttttcgaactgctttgaatacaaccctcgtaacacaagtgaagcaaaagctggaactaggcttcaagcattttttcatattcaggctcaaaagcttggactccacgtcacacccagtaatgtggaccaagttagcacaccaccggctgcgaaaaagtcacgaatctgactttgtccttctaaaggatatatttgaagaaaaacaaattgttcatgaaaatggaacattaaatcatgctgtataaagcaataacaattgattgaccacatgaaagtgtggcctgcactatattctcaattttaatattaagcactcaggagaatgtaggaaagatatcctttgctacagttttgttcagtatctaataagtttgatagatgtattggatacagtactggtttacagaggtttttgtacatttttgagatcattcatgtgtccagagatcttggaaaatattttttcacccacgatttattttgttattgatgatttttttttaaagtggtggtattaagggagagttatctacatggatgagtcttccgctatagcacagtttagaaaaggtgtttatgtcttaattaattgtttgagtacattctttcaacactacacatgaatgaatccaatcttataaccttgaagtgctgtaccagtgctggctgcaggtattaagtccaagtttattaactagatatttatttagtattgagagtaatttgtgaatttgttttgtatttataaaatttatacctgaaaaatgttccttaatgttttaaaccttttactgtgtttttattcctctaacttccttaatgatcaatcaaaaaaagtaacaccctccctttttcctgacagttctttcagctttacagaactgtattataagtttctatgtataactttttaactgtacaaataaaataacattttttcaaataaaaaaaaaaaaaaaaa

SEQ ID NO: 3648 - DNA, 4452 bp, Homo Sapiens
  NM_013943
ttattttccccggagagtcccgaggcgccgcgccttggccctgcctacagcccgaggccccgcccccggcgcccctcccagccgtttgaagcggctcgggctgcggctggctcagagtggcgcggggggcgtggggcggtgctgaggagctgaagccgtggccagctcgacgccggacagtccagcgagcagcacggcgggaaccggcagccggagcagtcccggagcagaagcagcagcagcagcagcagccctcgccgttcgcggagcgcagccgagccggccatggcgttgtcgatgccgctgaatgggctgaaggaggaggacaaagagcccctcatcgagctcttcgtcaaggctggcagtgatggtgaaagcataggaaactgccccttttcccagaggctcttcatgattctttggctcaaaggagttgtatttagtgtgacgactgttgacctgaaaaggaagccagcagacctgcagaacttggctcccgggacccacccaccatttataactttcaacagtgaagtcaaaacggatgtaaataagattgaggaatttcttgaagaagtcttatgccctcccaagtacttaaagctttcaccaaaacacccagaatcaaatactgctggaatggacatctttgccaaattctctgcatatatcaagaattcaaggccagaggctaatgaagcactggagaggggtctcctgaaaaccctgcagaaactggatgaatatctgaattctcctctccctgatgaaattgatgaaaatagtatggaggacataaagttttctacacgtaaatttctggatggcaatgaaatgacattagctgattgcaacctgctgcccaaactgcatattgtcaaggtggtggccaaaaaatatcgcaactttgatattccaaaagaaatgactggcatctggagatacctaactaatgcatacagtagggacgagttcaccaatacctgtcccagtgataaggaggttgaaatagcatatagtgatgtagccaaaagactcaccaagtaaaatcgcgtttgtaaaagagatgtcttcatgtcttcccctaagaatacgcttttcctaacaggctactccttcctgtagagcagaaattgtattttgcacgaacatgcagttattgaagattaggatcaaggatagacaaggtatagtagttatcttaaaatatacactcctaagcagtattattttaaaatcctttaccctggctacctcccctacccgggttcccctctctttaatttggagacactccaccacaaacttttcactttagaggtagcttgccatctctcaggagccctcaccattgtgtccattcactgtgtatagatggcagaacttttgaggtgcaatgtttaattgttaaaaatagtagccacgactttatcaggcagccccaaactggtgcataatgcatggtacaagaaatatttatgtattttttggaattttgtaatatttagtaagagtatatgaaaggattgctactgtatcagaaatattgtttcaatttagtctatcctggatatgtactaacgaatattaccaccagagaagagagctttctacaaaagtcactacagattttgctatattgctttgtagatagatttttacttttgcctaaaagcatttatccttcataccaattgtaacatctgacaccatgtagaagctaaaagtttagagggagtgagggttttctcaagaccttcctcaagcattttatctttagaagagaaactgatgggcacctgatactctgtctaaatacgtttgttatatgtgttttgccctgtgccattcatttggaactttattgcattctttattttaaaaagcttgtttttacgtaatcatagagcttgctatttgtacatctgttgagcaacactacataactgatttttagttgacttagctatagcagtacaatgattagtaatgtaaaaattaacacagaaattaacctaaggaatgaagggtgggtttgtcaaaatatcaagtaaatttttgtttctaaagtacatttaatgtagatgacctaaagaatgcgttatccatcctatataaaagaaagataaaacacaggtcaccaattttctcatttcaccccatttaccttgtatagaggattgttcattcctttgggactaagttatagttatggtgagtgtgtatttactgtagttttgcctgatctcactcattgcacttcctggagttaaattttccaacagccatgttgaggaatagcactctgcatgtttttgttttgtttttcggggttttttttaattgaagccctaaaccaggaattatttgtgttctaacaggaggatgaacttgctgaaaataaaactttgctatgtatttactcttttttaaaagacaaaagcaaaaccagactttctacgtactactccaaagactgtgattgtgactataatacatttttggtaatttttttatacctaatttgtataggaagtgctatttctcataggctgtttcttgaaattttaagtttattgctttaaaatggcagtgtttctcccactttgatatgctaacatttagtaagcactggctttatgaaagcggctttttataagtatactgcattttttgagcctatcattaattagcttagtatgaaagataagaaaatctccatgttgtatccatttggctcaggaagattctttgccttacctttcttagaactctttattgcttatcaaaagtttgagtacccgcttggtttttttttggtaattaaatattgtatgatttatctggttcaaggaagatgcactattcagttatctattgagaaattattttgcagtggttttagtgggtgaaaatgtcccatctgcaccagtacacaggcaggcattatcattcttcacctactttttaaatagtggcaacttgggattcattctggtgattctgaaccttgcctcatagcttaaagtataaaaaagattcaagagcagtgaggtttgttctttccagtgaatggtggactgagtggtgcgaggtggagggctaacaagaggaaagaactacattcttcagaatacagtgatgaaaattcattttgaaactcaaatattttcattttggatattctcctgtttttattaaaccagtgattacacctggccatccctctaaatgttctaggaaggcatgtctattgtgattttgatgaagacagaattatttttctctgtagaaacacagataccactttatcagggaagttagtcaaatgaaatggaaattggtaaatggacaaaagctagctagtaaaaaggacgacccagcaacatgctttaaccccattgtatgtttgtggaaagagcatagtttaacatcttgagaaatttgggacataaagttttcatggtagacagttcatgcagtatatgaattgccataatggaaataatctgattttatttttacaactaacatccattccccttcatttaaacaccttttgtgttttacttcagtgaggagattggagtctgaatggatctgttttccaagagattctgagaaatttttgtattcagcagttggaaagctctctattctagttgataaaacttcccttttttgatgtagatgcagatattctatacagttctgttgtcttttactaggactgtaaacttttgtgataaaattcaaataagattttatttcttggtaattttggctttcacaatttatctttaaatccttgagcaatctgtatacaattaagagatttctgacatttattcttacactaaatggatcaactctaggatttaggcatgttaacttctgttgtgttttgaatctctccagagttgcatgtagatagcatttatttctgtgcccttaaacccatttagaaaataactacaaagtaaaaatgtagaggaaatagaaatgtattttttcatgaacattttgatacaaatttcatcatttaatgattcaccaatttcttgcattaatttgaatttaagcatttaattcaaagagaggggagcatccattattgatacatgtgggcttttaaaaactccatcctttataaatagtcaaggtttgggccacacaaagtatatttttatcatggaaaaatttcaactcctcaagccgtaatgttgaacagaattggagtattttctttataatttcttgaacaggcaaatgaaagcttattatagaatgcatgtattttcttttatctttggaacatcagcaccagtatattgctggcagctattgtattaaaaaataaagtatattttcactatcataaaggattcttttttcccccctcatgaaaataaacaacaacttggggtaaaagtgaaaaaaaaaaaaaaaaaa

SEQ ID NO: 3649 - DNA, 1987 bp, Homo Sapiens
  NM_013962
tttttttttttgcccttatacctcttcgcctttctgtggttccatccacttcttccccctcctcctcccataaacaactctcctacccctgcacccccaataaataaataaaaggaggagggcaaggggggaggaggaggagtggtgctgcgaggggaaggaaaagggaggcagcgcgagagagccgggcagagtccgaaccgacagccagaagcccgcacgcacctcgcaccatgagatggcgacgcgccccgcgccgctccgggcgtcccggcccccgggcccagcgccccggctccgccgcccgctcgtcgccgccgctgccgctgctgccactactgctgctgctggggaccgcggccctggcgccgggggcggcggccggcaacgaggcggctcccgcgggggcctcggtgtgctactcgtccccgcccagcgtgggatcggtgcaggagctagctcagcgcgccgcggtggtgatcgagggaaaggtgcacccgcagcggcggcagcagggggcactcgacaggaaggcggcggcggcggcgggcgaggcaggggcgtggggcggcgatcgcgagccgccagccgcgggcccacgggcgctggggccgcccgccgaggagccgctgctcgccgccaacgggaccgtgccctcttggcccaccgccccggtgcccagcgccggcgagcccggggaggaggcgccctatctggtgaaggtgcaccaggtgtgggcggtgaaagccgggggcttgaagaaggactcgctgctcaccgtgcgcctggggacctggggccaccccgccttcccctcctgcgggaggctcaaggaggacagcaggtacatcttcttcatggagcccgacgccaacagcaccagccgcgcgccggccgccttccgagcctctttcccccctctggagacgggccggaacctcaagaaggaggtcagccgggtgctgtgcaagcggtgcgccttgcctccccgattgaaagagatgaaaagccaggaatcggctgcaggttccaaactagtccttcggtgtgaaaccagttctgaatactcctctctcagattcaagtggttcaagaatgggaatgaattgaatcgaaaaaacaaaccacaaaatatcaagatacaaaaaaagccagggaagtcagaacttcgcattaacaaagcatcactggctgattctggagagtatatgtgcaaagtgatcagcaaattaggaaatgacagtgcctctgccaatatcaccatcgtggaatcaaacgctacatctacatccaccactgggacaagccatcttgtaaaatgtgcggagaaggagaaaactttctgtgtgaatggaggggagtgcttcatggtgaaagacctttcaaacccctcgagatacttgtgcaagtgcccaaatgagtttactggtgatcgctgccaaaactacgtaatggccagcttctacagtacgtccactccctttctgtctctgcctgaataggagcatgctcagttggtgctgctttcttgttgctgcatctcccctcagattccacctagagctagatgtgtcttaccagatctaatattgactgcctctgcctgtcgcatgagaacattaacaaaagcaattgtattacttcctctgttcgcgactagttggctctgagatactaataggtgtgtgaggctccggatgtttctggaattgatattgaatgatgtgatacaaattgatagtcaatatcaagcagtgaaatatgataataaaggcatttcaaagtctcacttttattgataaaataaaaatcattctactgaacagtccatcttctttatacaatgaccacatcctgaaaagggtgttgctaagctgtaaccgatatgcacttgaaatgatggtaagttaattttgattcagaatgtgttatttgtcacaaataaacataataaaaggagttcagatgtttttcttcattaaccaaa

SEQ ID NO: 3650 - DNA, 1351 bp, Homo Sapiens
  NM_013974
ccgcttagacaatgccccggagccgccagaccgtcgcgcccctgccccatcgtagtatatgagctcgcctacacaaggacccccgctaaaagccagagctcccagtccccgaggcttgaagacggggactcccttctccaccaactctgtcctcggggggtggggccccagccgagatcacagcgcgacaggagtgggggtggccgctggagacaggtgaagaaacaagaaaactaagaaatccgagcggttggagggggagtctgtgtggatgggatggggacgccgggggaggggctgggccgctgctcccatgccctgatccggggagtcccagagagcctggcgtcgggggaaggtgcgggggctggccttcccgctctggatctggccaaagctcaaagggagcacggggtgctgggaggtaaactgaggcaacgactggggctacagctgctagaactgccacctgaggagtcattgccgctgggaccgctgcttggcgacacggccgtgatccaaggggacacggccctaatcacgcggccctggagccccgctcgtaggccagaggtcgatggagtccgcaaagccctgcaagacctggggctccgaattgtggaaataggagacgagaacgcgacgctggatggcactgacgttctcttcaccggccgggagtttttcgtaggcctctccaaatggaccaatcaccgaggagctgagatcgtggcggacacgttccgggacttcgccgtctccactgtgccagtctcgggtccctcccacctgcgcggtctctgcggcatggggggacctcgcactgttgtggcaggcagcagcgacgctgcccaaaaggctgtccgggcaatggcagtgctgacagatcacccatatgcctccctgaccctcccagatgacgcagctgctgactgcctctttcttcgtcctgggttgcctggtgtgccccctttcctcctgcaccgtggaggtggggatctgcccaacagccaggaggcactgcagaagctctctgatgtcaccctggtacctgtgtcctgctcagaactggagaaggctggcgccgggctcagctccctctgcttggtgctcagcacacgcccccacagctgagggcctggccttggggtactgctggccaggggtaggatagtataggaagtagaaggggaaggagggttagatagagaatgctgaataggcagtagttgggagagagcctcaatattgggggaggggagagtgtagggaaaaggatccactgggtgaatcctccctctcagaaccaataaaatagaattgaccttttaaaaaaaaaaaaaaaaaaaaa

SEQ ID NO: 3651 - DNA, 3722 bp, Homo Sapiens
  NM_013975
gcgcgctgcctcccgctctaggacccggatttaaagagacaggcgctccaaccgtcgtgggctgcccgcggcctgtaatgagcaagttccgaggcctacggtgagcgccggagccggagaggcagctatatgtctttggctttcaagatcttctttccacaaaccctccgtgcactcagccgaaaagaactgtgcctattccgaaaacatcactggcgtgatgtaagacaattcagccagtggtcagaaacagatctgcttcatggacatcccctcttcctgagaagaaagcctgttctatcattccagggaagccatctaagatcacgtgccacctaccttgttttcttgccagggttgcatgtgggactctgcagtggcccctgtgagatggctgagcaacggttctgtgtggactatgccaagcgtggcacagctggctgcaaaaaatgcaaggaaaagattgtgaagggcgtatgccgaattggcaaagtggtgcccaatcccttctcagagtctgggggtgatatgaaagagtggtaccacattaaatgcatgtttgagaaactagagcgggcccgggccaccacaaaaaaaatcgaggacctcacagagctggaaggctgggaagagctggaagataatgagaaggaacagataacccagcacattgcagatctgtcttctaaggcagcaggtacaccaaagaagaaagctgttgtccaggctaagttgacaaccactggccaggtgacttctccagtgaaaggcgcctcatttgtcaccagtaccaatccccggaaattttctggcttttcagccaagcccaacaactctggggaagccccctcgagccccacccctaagagaagtctgtcttcaagcaaatgtgaccccaggcataaggactgtctgctacgggagtttcgaaagttatgcgccatggtggccgataatcctagctacaacacgaagacccagatcatccaggacttccttcggaaaggctcagcaggagatggtttccacggtgatgtgtacctaacagtgaagctgctgctgccaggagtcattaagactgtttacaacttgaacgataagcagattgtgaagcttttcagtcgcatttttaactgcaacccagatgatatggcacgggacctagagcagggtgacgtgtcagagacaatcagagtcttctttgagcagagcaagtctttccccccagctgccaagagcctccttaccatccaggaagtggatgagttccttctgcggctgtccaagctcaccaaggaggatgagcagcaacaggccctacaggacattgcctccaggtgtacagccaatgaccttaaatgcatcatcaggttgatcaaacatgatctgaagatgaactcaggtgcaaaacatgtgttagacgcccttgaccccaatgcctatgaagccttcaaagcctcgcgcaacctgcaggatgtggtggagcgggtccttcacaacgcgcaggaggtggagaaggagccgggccagagacgagctctgagcgtccaggcctcgctgatgacacctgtgcagcccatgttggcggaggcctgcaagtccgttgagtatgcaatgaagaaatgtcccaatggcatgttctctgagatcaagtacgatggagagcgagtccaggtgcataagaatggagaccacttcagctacttcagccgcagtctcaagcccgtccttcctcacaaggtggcccactttaaggactacattccccaggcttttcctgggggccacagcatgatcttggattctgaagtgcttctgattgacaacaagacaggcaaaccactgccctttgggactctgggagtacacaagaaagcagccttccaggatgctaatgtctgcctgtttgtttttgattgtatctactttaatgatgtcagcttgatggacagacctctgtgtgagcggcggaagtttcttcatgacaacatggttgaaattccaaaccggatcatgttctcagaaatgaagcgagtcacaaaagctttggacttggctgacatgataacccgggtgatccaggagggattggaggggctggtgctgaaggatgtgaagggtacatatgagcctgggaagcggcactggctgaaagtgaagaaagactatttgaacgagggggccatggccgacacagctgacctggtggtccttggagccttctatgggcaagggagcaaaggcggcatgatgtcaatcttcctcatgggctgctacgaccctggcagccagaagtggtgcacagtcaccaagtgtgcaggaggccatgatgatgccacgcttgcccgcctgcagaatgaactagacatggtgaagatcagcaaggaccccagcaaaatacccagctggttgaaggtcaacaagatctactatcctgacttcatcgtcccagacccaaagaaagctgccgtgtgggagatcacaggggctgaattctccaaatcggaggctcatacagctgacgggatctccatccgattccctcgctgcacccgaatccgagatgataaggactggaaatctgccactaaccttccccaactcaaggaactgtaccagttgtccaaggagaaggcagacttcactgtagtggctggagatgaggggagctccactacagggggtagcagtgaagagaataagggtccctcagggtctgctgtgtcccgcaaggcccccagcaagccctcagccagtaccaagaaagcagaagggaagctgagtaactccaacagcaaagatggcaacatgcagactgcaaagccttccgctatgaaggtgggggagaagctggccacaaagtcttctccagtgaaagtaggggagaagcggaaagctgctgatgagacgctgtgccaaacaaaggtattgctggacatcttcactggggtgcggctttacttgccaccctccacaccagacttcagccgtctcagacgctactttgtggcattcgacggggacctggtacaggaatttgatatgacttcagccacgcacgtgctgggtagcagggacaagaaccctgcggcccagcaggtctccccagagtggatttgggcatgtatccggaaacggagactggtagctccctgctaggtttgctgtcttccctctccctcaggccatactctcctttaccatactactggactggactcaggctggaggcagatagacacagtatagggggaatgggcttgcttctcccaaacccaccagttctccactgtctcttctggaccaggaattagttgctgtgggtgccacagctgaagtcagtttgtcttgctggtttaaatagatctttcagagctgggtgctgggtttgccatctttttgttttctttgaaaagcagcttagttaccctttttataaataaaatatcttgcagttatctttgtcctttccccacctacacccccaataatttccctagagattaaggagtaaaggctgggctatggcagctctgtccacaaagccttctctcccatccttgcctgttcctttgtacttccaggctcattttaaagttgtatttaaaggactgccctcggaaatgcttctgtttagcggaacttgtattcagcctgacacgctttgccaggaacaaacctcatgtgaaagaaaacaaaatgaatttttttactttcttctc

SEQ ID NO: 3652 - DNA, 1607 bp, Homo Sapiens
  NM_013976
agttgcactgtagcctcggcagtgaaccgggaggtactaccaggtcgccgtcgttgctccgctcgctctgagagagcatggccctgagaggcgtctccgtgcggctgctgagccgcggacccggcctgcacgtccttcgcacgtgggtctcgtcggcggcgcagaccgagaaaggcgggagaacacagagccaactggctaagtcctcgcgtcccgagtttgactggcaggacccgctggtgctggaggagcagctgaccacagatgagatcctcatcagggacaccttccgcacctactgccaggagagactcatgcctcgcatcctgttggccaatcgcaacgaagtttttcatcgggagatcatttcggagatgggggagttgggtgtgctgggccccaccatcaaaggatatggctgtgctggggtttcgtctgtggcctatgggctcctggcccgagagctggagcgggtggacagtggctacaggtcggcgatgagtgtccagtcctccctcgtcatgcaccctatctatgcctatggcagcgaggaacagcggcagaagtacctgccccagctggccaagggggagctcctgggctgcttcgggctcacagagcccaacagcggaagtgaccccagcagcatggagaccagagcccactacaactcatccaacaagagctacaccctcaatgggaccaagacctggatcacgaactcgcctatggccgatctgtttgtagtgtgggctcggtgtgaagatggctgcattcggggcttcctgctggagaaggggatgcggggtctctcggcccccaggatccagggcaagttctcgctgcgggcctcagccacaggcatgatcatcatggacggtgtggaggtgccagaggagaatgtgctccctggtgcatccagcctggggggtcccttcggctgcctgaacaacgcccggtacggcatcgcgtggggcgtgcttggagcttcggagttctgcttgcacacagcccggcagtacgccctcgacaggatgcagtttggtgtcccactggccaggaaccagctgattcagaagaagctggcagacatgctcactgagattaccctgggccttcacgcctgcctgcagctcggccgcttgaaggaccaggacaaggctgcccccgagatggtttctctgctgaagaggaataactgtgggaaagccctggacatcgcccgccaggcccgagacatgctgggggggaatgggatttctgacgagtatcacgtgatccggcacgccatgaacctggaggccgtgaacacctacgaagtcgttcagatgtgttccttaaaaagaagatggaattctctgtagagcgtctcaatccacttttaaccatggatgagagcagactccatttaccctgaaatagcagcttctcttgagaggagagtgacatggaagcaactccgtctgctgcagctgaccccctcacactgagttcacagtgcgccctccctccctcccatctgggggtagtgccttatgctgggtgttggagcagagtgagggagaggaaaataaagacctgcacatctgaaaaaaaaaaaaaaaaaa

SEQ ID NO: 3653 - DNA, 1388 bp, Homo Sapiens
  NM_013979
ctctagggggcgctgccccgagactgggtggggagggaaagaaggtggtgcgaaaacgcgtttgaacttgggtcctgccgctgcccgtagccggcgtccccaacatggcggctccccaagacgtccacgtccggatctgtaaccaagagattgtcaaatttgacctggaggtgaaggcgcttattcaggatatccgtgattgttcaggacccttaagtgctcttactgaactgaatactaaagtaaaagagaaatttcaacagttgcgtcacagaatacagccagttctctatcaaagggcatttatttggactgcttccacatttttttttaagctaacttattccctgacagacttttcttcaactcagcatgacttcaactctccaactacacctgttaccttcagtgacctggagcagttggctaaagagcaagacaaagaatcagagaaacaacttctactccaggaagtggagaatcacaaaaagcagatgctcagcaatcaggcctcatggaggaaagctaatctcacctgcaaaattgcaatcgacaatctagagaaagcagaacttcttcagggaggagatctcttaaggcaaaggaaaaccaccaaagagagcctggcccagacatccagtaccatcactgagagcctcatggggatcagcaggatgatggcccagcaggtccagcagagcgaggaggccatgcagtctctagtcacttcttcacgaacgatcctggatgcaaatgaagaatttaagtccatgtcgggcaccatccagctgggccggaagcttatcacaaaatacaatcgccgggagctgacggacaagcttctcatcttccttgcgctagccctgtttcttgctacggtcctctatattgtgaaaaagcggctctttccatttttgtgagatcccaaaggtgccagttctggccctttcagctcctgtttcaggatctgtcctggttcctgagctctaggctgctaagctgagccacacacccctccgtttgcaccagttgcctgcaggttggatggaacacagtgccccacttttctgcaagtagctggcttgtaaagggtgaacagagccatgggaggaaggtctggcattgggatgccgccctggggacatacgaaccgcctccttccaccattgtgcactatgggaggccgctgctgcgtggagcacttaaagtccagcctccaggaccggatgcccctcctgtctcccgctcccatcgtgcccttaaatgccagatctggtggagggaagagagaagaggtaggaagaaaggtgatgaaaactcctggtcattccttgaataaacttgattttatttaatagaataaaatgtatttgattttgtaagataaa

SEQ ID NO: 3654 - DNA, 1286 bp, Homo Sapiens
  NM_013980
ctctagggggcgctgccccgagactgggtggggagggaaagaaggtggtgcgaaaacgcgtttgaacttgggtcctgccgctgcccgtagccggcgtccccaacatggcggctccccaagacgtccacgtccggatctgtaaccaagagattgtcaaatttgacctggaggtgaaggcgcttattcaggatatccgtgattgttcaggacccttaagtgctcttactgaactgaatactaaagtaaaagagaaatttcaacagttgcgtcacagaatacagccagttctctatcaaagggcatttatttggactgcttccacatttttttttaagctaacttattccctgacagacttttcttcaactcagcatgacttcaactctccaactacacctgttaccttcagtgacctggagcagttggctaaagagcaagacaaagaatcagagaaacaacttctactccaggaagtggagaatcacaaaaagcagatgctcaggaaaaccaccaaagagagcctggcccagacatccagtaccatcactgagagcctcatggggatcagcaggatgatggcccagcaggtccagcagagcgaggaggccatgcagtctctagtcacttcttcacgaacgatcctggatgcaaatgaagaatttaagtccatgtcgggcaccatccagctgggccggaagcttatcacaaaatacaatcgccgggagctgacggacaagcttctcatcttccttgcgctagccctgtttcttgctacggtcctctatattgtgaaaaagcggctctttccatttttgtgagatcccaaaggtgccagttctggccctttcagctcctgtttcaggatctgtcctggttcctgagctctaggctgctaagctgagccacacacccctccgtttgcaccagttgcctgcaggttggatggaacacagtgccccacttttctgcaagtagctggcttgtaaagggtgaacagagccatgggaggaaggtctggcattgggatgccgccctggggacatacgaaccgcctccttccaccattgtgcactatgggaggccgctgctgcgtggagcacttaaagtccagcctccaggaccggatgcccctcctgtctcccgctcccatcgtgcccttaaatgccagatctggtggagggaagagagaagaggtaggaagaaaggtgatgaaaactcctggtcattccttgaataaacttgattttatttaatagaataaaatgtatttgattttgtaagataaa

SEQ ID NO: 3655 - DNA, 4076 bp, Homo Sapiens
  NM_013995
aagaaagagccccgcccctagtcttatgactcgcactgaagcgccgattcctggcttttgcaaggctgtggtcggtggtcatcagtgctcttgacccaggtccagcgagccttttccctggtgttgcagctgttgttgtaccgccgccgtcgccgccgtcgccgcctgctctgcggggtcatggtgtgcttccgcctcttcccggttccgggctcagggctcgttctggtctgcctagtcctgggagctgtgcggtcttatgcattggaacttaatttgacagattcagaaaatgccacttgcctttatgcaaaatggcagatgaatttcacagtacgctatgaaactacaaataaaacttataaaactgtaaccatttcagaccatggcactgtgacatataatggaagcatttgtggggatgatcagaatggtcccaaaatagcagtgcagttcggacctggcttttcctggattgcgaattttaccaaggcagcatctacttattcaattgacagcgtctcattttcctacaacactggtgataacacaacatttcctgatgctgaagataaaggaattcttactgttgatgaacttttggccatcagaattccattgaatgacctttttagatgcaatagtttatcaactttggaaaagaatgatgttgtccaacactactgggatgttcttgtacaagcttttgtccaaaatggcacagtgagcacaaatgagttcctgtgtgataaagacaaaacttcaacagtggcacccaccatacacaccactgtgccatctcctactacaacacctactccaaaggaaaaaccagaagctggaacctattcagttaataatggcaatgatacttgtctgctggctaccatggggctgcagctgaacatcactcaggataaggttgcttcagttattaacatcaaccccaatacaactcactccacaggcagctgccgttctcacactgctctacttagactcaatagcagcaccattaagtatctagactttgtctttgctgtgaaaaatgaaaaccgattttatctgaaggaagtgaacatcagcatgtatttggttaatggctccgttttcagcattgcaaataacaatctcagctactgggatgcccccctgggaagttcttatatgtgcaacaaagagcagactgtttcagtgtctggagcatttcagataaatacctttgatctaagggttcagcctttcaatgtgacacaaggaaagtattctacagcccaagagtgttcgctggatgatgacaccattctaatcccaattatagttggtgctggtctttcaggcttgattatcgttatagtgattgcttacgtaattggcagaagaaaaagttatgctggatatcagactctgtaacactaatcaatacgtgatctctgttacaaaagaaaaaagcaagtacaagttccaacatgcaatactggtcaacttaaggtatatttagttgcagtccagctctttagaatgggtggtatgggggatttcaaacttaaacaaaaaactatcaactacaaattagttgcctgactttggtttttccaaccaaggaatttaaaactgttatttttacagcaaaagatgtgcaaaatcactggattataagttctattttactgtcttgaattagtatttcagtgttttcattttagacattcagactaaaaatacaccgtttagaaaaaacaatttttgaaaaagagattttttttccctgcaggtagttgagttggaacaacatgttctaccgtggatttgtacttgctccttttgctctttttgtgtgtgtgtgtgtgtgtgtgtgtgtgtgtgtgtgtgtgatttttgtttgcaggttaacttagctactttggcattgctgcatatttgacctttgagagatataatagtagatttgaacaggggctggtattattatgttcttagcaataaatgcttttctaatgccttttgaatacatttgtatttatgtggctgtaatgacaaaagatacaaaagctttttaaaatttagagtaggtattaatcttattgtttaatcttttttttaaaaaaactggatatttcaatcttttaaattgcaatatataagactattccaactgggcatttcaatccattttttaggtgctttagagataattgcttgccagtgccaattgagggcattagtactttgtgctcataaattggcctctgtatgcagtactaaaattaatgcagatttctctttagccttccaacatttcttgttgatagtgatgtattttattattttctttttcttaagaaatgccagtgtgtcctagaacctagataacgaagtgcacttacacttataaaataacttgcatctaggctgggcgtggcggctcacgcctgtaatcccagcactttgggaggccgaagtgggtggatcacttgaggccaggagtttgagaccagcctggccaacatggtgaaaccccatctctatcagaaatacaaaaaattagctgggcgtggtggtgggcgcctgtaatcccagttactcgggaggctgaggcaggagaatcacttgaacccgggaggcagaggttgcggtgagccaagagcgcaccattgcactccagcctgggcgacaaaaacgaaactccatctcaaaacaaaacaaaacaaaacaaacaaacaaacaaaacttgcatctaaccaaaaagtcttggttttatcttaatccattaaaaagttgttctttgtttccagcttgcattgattgctacaacatcactaatttggctttcacatttaaatggttctgtgctaatcaaaactttcgttgttattattcattatggtagaatcatttttaattcacgtgctttgtgttcagttttgtggtctgagagatgtaccaattgtcaaattaccgtgtaccacctaatgtttataggagaaagcaaaatacatcagcttggtagttaacacatcaaatatttcttgctgcttctaggagaacttttttggtgtgtgttggaatggctgagcaaatattaaaattgttaatatgcagccatatatggaaggttcctgtggggttgttttttcgtgttttttttttttttgtggtgggattatgtgcctcccattcactagaaaatgagaaaattgtctgggttccaaaatattgacattgaatggatcaatacacacacacagacatatatatatatatgcacacatatataggcagttgcatgctagcatgggtatttttataacaatataactgagttatattggaattataaatattttccgtcacttaaatttgttctttgtttagcctgaaaacctttatggctcaagatcagattcctgactaacccctctcttagagctacagcgagctgcattaccagcttaaaacacttcttagggattaaatatagatgtaatttttcaaaatcgtttttaatttaaactgtgttttagtgtaaaattgttaaccttgtaagatggataatgtgtataagaatgtaggccttaactatttcacatgagtcaaaacaaagcagctttaaaaaaataattggaagcacaagtgcatggcactgactgaatgctgttaatatttctaaaagtttctacattcagattatatgcctgattcatagtaaaatacctctaataaacactgttttatagaaaacctgacttcagtgaatatttttgtattttacatgggccagtttatatactgctatttacactattatttcctatagctacatgttctttgtaccttttgtagttttatttgtattactagattcataccttgatggtaacgctctatctggttttgggtgtttttcatgttttagcatttgtataaagaaactggtccatgtaaatactttccatgttttttcttcaaatgtttaaaccactagttgatgtatggtatctttagatatttgcctgtctgtttgctcaaaattgcttctaaaacaataaagattcttttatttcttaaggcaaaaa

SEQ ID NO: 3656 - DNA, 5647 bp, Homo Sapiens
  NM_014000
gtagtcgctgcacagtctgtctcttcgccggttcccggccccgtggatcctacttctctgtcgcccgcggttcgccgccccgctcgccgccgcgatgccagtgtttcatacgcgcacgatcgagagcatcctggagccggtggcacagcagatctcccacctggtgataatgcacgaggagggcgaggtggacggcaaagccattcctgacctcaccgcgcccgtggccgccgtgcaggcggccgtcagcaacctcgtccgggttggaaaagagactgttcaaaccactgaggatcagattttgaagagagatatgccaccagcatttattaaggttgagaatgcttgcaccaagcttgtccaggcagctcagatgcttcagtcagacccttactcagtgcctgctcgagattatctaattgatgggtcaaggggcatcctctctggaacatcagacctgctccttaccttcgatgaggctgaggtccgtaaaattattagagtttgcaaaggaattttggaatatcttacagtggcagaggtggtggagactatggaagatttggtcacttacacaaagaatcttgggccaggaatgactaagatggccaagatgattgacgagagacagcaggagctcactcaccaggagcaccgagtgatgttggtgaactcgatgaacaccgtgaaagagttgctgccagttctcatttcagctatgaagatttttgtaacaactaaaaactcaaaaaaccaaggcatagaggaagctttaaaaaatcgcaattttactgtagaaaaaatgagtgctgaaattaatgagataattcgtgtgttacaactcacctcttgggatgaagatgcctgggccagcaaggacactgaagccatgaagagagcattggcctccatagactccaaactgaaccaggccaaaggttggctccgtgaccctagtgcctccccaggggatgctggtgagcaggccatcagacagatcttagatgaagctggaaaagttggtgaactctgtgcaggcaaagaacgcagggagattctgggaacttgcaaaatgctagggcagatgactgatcaagtggctgacctccgtgccagaggacaaggatcctcaccggtggccatgcagaaagctcagcaggtatctcagggtctggatgtgctcacagcaaaagtggaaaatgcagctcgcaagctggaagccatgaccaactcaaagcagagcattgcaaagaagatcgatgctgctcagaactggcttgcagatccaaatggtggaccggaaggagaagagcagattcgaggtgctttggctgaagctcggaaaatagcagaattatgtgatgatcctaaagaaagagatgacattctacgttcccttggggaaatatctgctctgacttctaaattagcagatctacgaagacaggggaaaggagattctccagaggctcgagccttggccaaacaggtggccacggccctgcagaacctgcagaccaaaaccaaccgggctgtggccaacagcagaccggccaaagcagctgtacaccttgagggcaagattgagcaagcacagcggtggattgataatcccacagtggatgaccgtggagtcggtcaggctgccatccgggggcttgtggccgaagggcatcgtctggctaatgttatgatggggccttatcggcaagatcttctcgccaagtgtgaccgagtggaccagctgacagcccagctggctgacctggctgccagaggggaaggggagagtcctcaggcacgagcacttgcatctcagctccaagactccttaaaggatctaaaagctcggatgcaggaggccatgactcaggaagtgtcagatgttttcagcgataccacaactcccatcaagctgttggcagtggcagccacggcgcctcctgatgcgcctaacagggaagaggtatttgatgagagggcagctaactttgaaaaccattcaggaaagcttggtgctacggccgagaaggcggctgcggttggtactgctaataaatcaacagtggaaggcattcaggcctcagtgaagacggcccgagaactcacaccccaggtggtctcggctgctcgtatcttacttaggaaccctggaaatcaagctgcttatgaacattttgagaccatgaagaaccagtggatcgataatgttgaaaaaatgacagggctggtggacgaagccattgataccaaatctctgttggatgcttcagaagaagcaattaaaaaagacctggacaagtgcaaggtagctatggccaacattcagcctcagatgctggttgctggggcaaccagtattgctcgtcgggccaaccggatcctgctggtggctaagagggaggtggagaattccgaggatcccaagttccgtgaggctgtgaaagctgcctctgatgaattgagcaaaaccatctccccgatggtgatggatgcaaaagctgtggctggaaacatttccgaccctggactgcaaaagagcttcctggactcaggatatcggatcctgggagctgtggccaaggtcagagaagccttccaacctcaggagcctgacttcccgccgcctccaccagaccttgaacaactccgactaacagatgagcttgctcctcccaaaccacctctgcctgaaggtgaggtccctccacctaggcctccaccaccagaggaaaaggatgaagagttccctgagcagaaggccggggaggtgattaaccagccaatgatgatggctgccagacagctccatgatgaagctcgcaaatggtccagcaagccgggcatcccagccgctgaggtgggtataggtgttgtagctgaggcagatgcggccgatgctgctggcttccctgtcccccctgacatggaagacgattacgaacctgagctgctgttaatgccatccaatcagccggtcaaccagcccattctggccgcggctcagtccttgcatcgggaagctaccaagtggtctagtaagggcaatgacatcattgcagcagccaagcgcatggctctgctgatggctgagatgtctcggctggtaagagggggcagtggtaccaagcgggcactcattcagtgtgccaaggacatcgccaaggcctcagatgaggtgactcggttggccaaggaggttgccaagcagtgcacagataaacggattagaaccaacctcttacaggtatgtgagcgaatcccaaccataagcacccagctcaaaatcctgtccacagtgaaggccaccatgctgggccggaccaacatcagtgatgaggagtctgagcaggccacagagatgctggttcacaatgcccagaacctcatgcagtctgtgaaggagactgtgcgggaagctgaagctgcttcaatcaaaattcgaacagatgctggatttacactgcgctgggttagaaagactccctggtaccagtaggcacctggctgagcctggctggcacagaaacctctactaaaaagaaggaaaatgatctgagtcccaggagctgcccagagttgctgggagctgaaaaatcacatcctggcctggcacatcagaaaggaatgggggcctcttcaaattagaagacatttatactcttttttcatggacactttgaaatgtgtttctgtataaagcctgtattctcaaacacagttacacttgtgcaccctctatcccaataggcagactgggtttctagcccatggacttcacataagctcagaatccaagtgaacactagccagacactctgctctgcccttgttccctaggggacacttccctctgtttctctttccttggctcccattcactcttccagaatcccaagacccagggcccaggcaaatcagttactaagaagaaaattgctgtgcctcccaaaattgttttgagctttccatgttgctgccaaccataccttccttccctgggctgtgctacctgggtccttttcagaagtgagctttgctgctacaggggaaggtggcctctgtggagccccagcatatgggggcctggattcatttcctgcccttcctcagtttaatccttctagtttcccacaatataaaactgtacttcactgtcaggaagaaatcacagaatcatatgattctgcttttaccatgcccctgagcaatgtctgtgctagggaaacttcccgtcccatatcctgcctcagcccgccaaggtagccatcccatgaacacactgtgtcctggtgctctctgccactggaagggcagagtagccagggtgtggccctgccatcttcccagcagggccactcccggcactccatgcttagtcactgcctgcagaggtctgtgctgaggccttatcattcattcttagctcttaattgttcattttgagctgaaatgctgcattttaattttaaccaaaacatgtctcctatcctggtttttgtagccttcctccacatcctttctaaacaagattttaaagacatgtaggtgtttgttcatctgtaactctaaaagatcctttttaaattcagtcctaagaaagaggagtgcttgtcccctaagagtgtttaatggcaaggcagccctgtctgaaggacacttcctgcctaagggagagtggtatttgcagactagaattctagtgctgctgaagatgaatcaatgggaaatactactcctgtaattcctacctccctgcaaccaactacaaccaagctctctgcatctactcccaagtatggggttcaagagagtaatgggtttcatatttcttatcaccacagtaagttcctactaggcaaaatgagagggcagtgtttcctttttggtacttattactgctaagtatttcccagcacatgaaaccttattttttcccaaagccagaaccagatgagtaaaggagtaagaaccttgcctgaacatccttccttcccacccatcgctgtgtgttagttcccaacatcgaatgtgtacaacttaagttggtcctttacactcaggctttcactatttcctttataatgaggatgattattttcaaggccctcagcatatttgtatagttgcttgcctgatataaatgcaatattaatgcctttaaagtatgaatctatgccaaagatcacttgttgttttactaaagaaagattacttagaggaaataagaaaaatcatgtttgctctcccggttcttccagtggtttgagacactggtttacactttatgccggatgtgcttttctccaatatcagtgctcgagacacagtgaagcaaattaaaaaaaaaaaaaaaaaaaatccctgaatgatgattagagacatcaccgctaaaaaactacatttataagctaggatttgttatatgcaaatattttctgcctcttcttttgttctgtttaaaacaataaaatgcatttgtataaaaaaaaaaaaaaaaaaaaaaaaaaaaaaaaaaaaaaaaaaaaaaaaaaaaaaaaaaaaaaaaaaaaaaaaaaaaaaaaaaaaaaaaaaaaaaaaaaaaaaaaaaaaaaaaaaaaaaaaaaaaaaaaaaaaaaaaaaaaaaaaaaaaaaaaaaaaaaaaaaa

SEQ ID NO: 3657 - DNA, 3823 bp, Homo Sapiens
  NM_014001
ctcgcgagttttgaagccgcggggccgggcggctgcaatatggcggaggcggaaggggaaagcctggagtcctggctcaataaagccaccaatccttccaaccgccaggaggactgggaatacataattggcttctgtgatcagatcaacaaggagctggaagggccacagatcgccgtccgactgctggcccacaagatccagtccccacaggaatgggaggcgctccaggccctgacgtacctgggggacagggtgtctgagaaagtgaagaccaaggttattgagctgctgtacagctggaccatggccctgccagaagaagcaaagatcaaagacgcctaccacatgctgaagagacagggcatagtgcagtctgacccaccaattcctgtggataggacgctgatcccctctccaccacctcgtcccaaaaaccctgtttttgatgatgaggagaagtccaagcttttagccaagctgctgaaaagcaaaaacccagatgacctgcaggaggccaacaagctcatcaagtccatggtgaaggaagacgaggcacggatccagaaggtgaccaagcgtctgcacacgttagaggaagttaacaacaacgtgagactgctcagtgagatgctgcttcattacagccaggaggactcttcggacggggacagagagctgatgaaggagctgtttgatcagtgtgagaacaagaggcggactttatttaaactcgccagtgagactgaggacaatgataacagtttgggggacatcctgcaagccagtgacaacctctcccgggtcatcaactcttacaaaacaattattgaagggcaggtcatcaatggcgaggtggctaccttaaccctgcctgactcggaaggaaacagtcagtgcagtaaccaaggcacgctcatcgaccttgcggagctggacacgaccaacagtttgtcctccgtgttggccccagcacctactccaccctcctcaggcatcccaatcctccctccaccaccccaggcctcaggacctccacggagccgctcctctagccaggccgaggccaccctggggcccagcagcacaagcaacgccctctcctggctggacgaggagctactctgcttgggcctcgccgacccagcccctaatgttcctcccaaagagtcagctgggaacagccagtggcacctgctccagagggaacagtccgacctggacttcttcagccccaggccggggaccgctgcctgtggcgcctccgatgctcctctgctccagccctcagccccctcctcaagcagctcccaagctccactgccgcctcccttcccagctcctgtggtcccagccagtgttcctgcccccagtgcgggctcctccttgttttctactggagtggccccagccttggccccaaaagttgagcccgcagtccctgggcaccatggcttggcgttgggcaacagcgcgctgcaccacctggatgccctcgatcagcttctagaagaggccaaagtgacctcgggcttggtgaaacccactacctcccctctcatccccaccaccaccccagccaggcccctcctgcccttctccacggggcccggcagcccgctcttccagccactgagtttccagtcccagggcagccccccgaaggggcctgagctctccctggccagcatccacgtgcccctggaatcgatcaagcctagcagtgcccttcctgtgacagcctacgataaaaacggcttccgcatcctcttccactttgccaaggagtgtcccccaggacgacctgacgtgctggtggtggtggtgtccatgctgaacacggctcccttacctgtcaagagcatcgtgctgcaggctgcagtgcccaagtcaatgaaagtgaagttgcagccaccttctgggacagaactctctccatttagccccatccagccacctgcagccatcacccaggtcatgttgctggccaatccactgaaggagaaggtgcggcttcggtataagctgaccttcgccctgggggagcagctgagcacagaggtgggcgaggtggaccagttccctcctgtggaacagtgggggaacctatgaccccagaggacgctgtgatctccaccttgaagccaggcaggctgccctgagacgaggagggctctggtcccgtcactctccatgccctgacaacagtgcttgtagctttgatgtggaacaggggccctgggcatttctgctgagaaccaaactgctgctgtgataacctctcctttggcccctaaaaggacctgtttttatctacctgtgtgacttgaagtggccatatgctgtcaggggtgcggagtggcccctgacttcactgctgtcccgggaacatggacccccaggcttggcgtaggtgtttgcttccttctactggcattcactgaagccactggggtggggggtggggggtgggagtctctaaagagagactgtcatgggtcattccccacaagagccacatcctcacacctgacagatgcacggcccaaggggctgcagccctgttgcaattccatgcttcccccgccaaccagctcctgctgccatccccagggaggtggcccaggaaggtgcctggcccagaataaggaactggcatactgcaaagtccccagccctgcctctggtggacagcatcgtcctggaatggccacggagtgatgagttgtgtgcttgtccctggcagtggcaggctgtgtcctatggacatcttggcaggacatggaatttggcctcatgacaggcccaactagggataggaaggaaaatgaagagagccagtatttccccttctccagaagcaggtactcagctttctgggaaaagcgtgcctccagccgtggggacaggccatcctactgactacctcttgcttggcatgaaataaactgctatcctccccttggaatctaccgccactctacatcctactgctttggcctccctctcctctcaccagatggcatgtggtgtggcacctgtggctggacacaggaggcctcaggatcacaaatgttacactagacatatgtcctaatgtgctgcccagaaacctcaactgttccccagctactgaggggcactgtcagcgagatgttgggtctggaggtgatgagatcgggccacacttgagctgagtcaccagaccctattgcttcaacagtgcttggcccccgccagcttgtcccagccactctagctgctggatgtgatcctgggacatgtactccaagcctccgtcacaaaaaaaaaatcaccagctgccatagacacgggggaagcttgcggagcccaggtgaacaagctcagcaatcggacatctctggggaaaggaaggtggcacagaccatgttccctggttcctccctgccccttgccaggcttccttattccttactatgggaagaggtcatatcccttccctgcccctcgctgtctttagcaagcaggtttcactgcttcattagaagaggacaagtcaaaagtgaatcatttttcactacttaaggaataaatccaagagctttccagagactggctgctgcagccctgggaatgtctgtggaattactatgtggaaatggaactttgtgttatgctctagacattacagttatttgagtgttactcgttactgttgaggtcagtgcttcgtggcaaatggctgtactggatatcccagctctgctgcccttgttttgctgcatgttaaataaaaccattttcactgtaaaaaaaaaaaaaaaaaaaaaaaaaaaaaaaa

SEQ ID NO: 3658 - DNA, 3492 bp, Homo Sapiens
  NM_014002
agatgccaaaacagcacccagctgcccatcaagattaccagaagggccccagttcctggcttctctgtggctcacactctggtcctattgcctacccttgggaactcagagcatcctctttctcttttctgctgagctggtggctgcaccgagttgcctctgtctctttaagagagaaagagagagcgagagacggaaatcaggaagtgcgagagagctgagagccaggactcagtgctgagcttggtgtcccaccgccacaaggaggcagggaagaaacccactagtcccagctcctggggtggcacagacattgcaactggccctgcctgtgggtcctaggggcccttggctaccaggaggctaagaacactgctcatgaatgacagtgagccctgaaagctctgggggtgtcacccagtcccacaagcctgcatcccctgcagtggagatgggctcagctcctggacgtgccacagacagaaagcataacatacactcgccaggaagagcctttgcctgactcagggcagctcagagtgtggggcagaaggtgaccagccagctcagggcaggagatgcagagcacagccaattacctgtggcacacagatgacctgctggggcagggggccactgccagtgtgtacaaggcccgcaacaagaaatccggagagctggttgctgtgaaggtcttcaacactaccagctacctgcggccccgcgaggtgcaggtgagggagtttgaggtcctgcggaagctgaaccaccagaacattgtcaagctctttgcggtggaggagacgggcggaagccggcagaaggtactggtgatggagtactgctccagtgggagcctgctgagtgtgctggagagccctgagaatgcctttgggctgcctgaggatgagttcctggtggtgctgcgctgtgtggtggccggcatgaaccacctgcgggagaacggcattgtgcatcgcgacatcaagccggggaacatcatgcgcctcgtaggggaggaggggcagagcatctacaagctgacagacttcggcgctgcccgggagctggatgatgatgagaagttcgtctcggtctatgggactgaggagtacctgcatcccgacatgtatgagcgggcggtgcttcgaaagccccagcaaaaagcgttcggggtgactgtggatctctggagcattggagtgaccttgtaccatgcagccactggcagcctgcccttcatcccctttggtgggccacggcggaacaaggagatcatgtaccggatcaccacggagaagccggctggggccattgcaggtgcccagaggcgggagaacgggcccctggagtggagctacaccctccccatcacctgccagctgtcactggggctgcagagccagctggtgcccatcctggccaacatcctggaggtggagcaggccaagtgctggggcttcgaccagttctttgcggagaccagtgacatcctgcagcgagttgtcgtccatgtcttctccctgtcccaggcagtcctgcaccacatctatatccatgcccacaacacgatagccattttccaggaggccgtgcacaagcagaccagtgtggccccccgacaccaggagtacctctttgagggtcacctctgtgtcctcgagcccagcgtctcagcacagcacatcgcccacacgacggcaagcagccccctgaccctcttcagcacagccatccctaaggggctggccttcagggaccctgctctggacgtccccaagttcgtccccaaagtggacctgcaggcggattacaacactgccaagggcgtgttgggcgccggctaccaggccctgcggctggcacgggccctgctggatgggcaggagctaatgtttcgggggctgcactgggtcatggaggtgctccaggccacatgcagacggactctggaagtggcaaggacatccctcctctacctcagcagcagcctgggaactgagaggttcagcagcgtggctggaacgcctgagatccaggaactgaaggcggctgcagaactgaggtccaggctgcggactctagcggaggtcctctccagatgctcccaaaatatcacggagacccaggagagcctgagcagcctgaaccgggagctggtgaagagccgggatcaggtacatgaggacagaagcatccagcagattcagtgctgtttggacaagatgaacttcatctacaaacagttcaagaagtctaggatgaggccagggcttggctacaacgaggagcagattcacaagctggataaggtgaatttcagtcatttagccaaaagactcctgcaggtgttccaggaggagtgcgtgcagaagtatcaagcgtccttagtcacacacggcaagaggatgagggtggtgcacgagaccaggaaccacctgcgcctggttggctgttctgtggctgcctgtaacacagaagcccagggggtccaggagagtctcagcaagctcctggaagagctatctcaccagctccttcaggaccgagcaaagggggctcaggcctcgccgcctcccatagctccttaccccagccctacacgaaaggacctgcttctccacatgcaagagctctgcgaggggatgaagctgctggcatctgacctcctggacaacaaccgcatcatcgaacggctaaatagagtcccagcacctcctgatgtctgagctccatggggcacatgaggcatcctgaagcattagaatgattccaacactgctcttctgcaccatgagaccaacccagggcaagatcccatcccatcacatcagcctacctccctcctggctgctggccaggatgtcgccagcattaccttccactgcctttctccctgggaagcagcacagctgagactgggcaccaggccacctctgttgggacccacaggaaagagtgtggcagcaactgcctggctgacctttctatcttctctaggctcaggtactgctcctccatgcccatggctgggccgtggggagaagaagctctcatacgccttcccactccctctggtttataggacttcactccctagccaacaggagaggaggcctcctggggtttccccagggcagtaggtcaaacgacctcatcacagtcttccttcctcttcaagcgtttcatgttgaacacagctctctccgctcccttgtgatttctgagggtcaccactgccagcctcaggcaacatagagagcctcctgttctttctatgcttggtctgactgagcctaaagttgagaaaatgggtggccaaggccagtgccagtgtcttggggcccctttggctctccctcactctctgaggctccagctggtcctgggacatgcagccaggactgtgagtctgggcaggtccaaggcctgcaccttcaagaagtggaataaatgtggcctttgcttctgtttaaaaaaaaaaaaaaaaaa

SEQ ID NO: 3659 - DNA, 4470 bp, Homo Sapiens
  NM_014003
cttttcctgcccccagactagaggcgggatgtagtctcttaggctaagagtgattggtcacaaggagactcggaagtgtctgatcagagccccagaggaggccttgagagcctgttggcgtaccgttccacacttggatccaggaatcgggcgtgttccaggctgctctctatggtagctttgggcggatagagggggcgcgcaaagtattaagggacaataatggccgctttcaaggtgtggattttggctccttgagcctgtctgagcgaggggtggcagcgccggcgccccagaatccgggacagaagggtcccaagagtcgcgcttggtgagagaaatcccagatcctgtgatgggggacaccagtgaggatgcctcgatccatcgattggaaggcactgatctggactgtcaggttggtggtcttatttgcaagtccaaaagtgcggccagcgagcagcatgtcttcaaggctcctgctccccgcccttcattactcggactggacttgctggcttccctgaaacggagagagcgagaggagaaggacgatggggaggacaagaagaagtccaaagtctcctcctacaaggactgggaagagagcaaggatgaccagaaggatgctgaggaagagggcggtgaccaggctggccaaaatatccggaaagacagacattatcggtctgctcgggtagagactccatcccatccgggtggtgtgagcgaagagttttgggaacgcagtcggcagagagagcgggagcggcgggaacatggtgtctatgcctcgtccaaagaagaaaaggattggaagaaggagaaatcgcgggatcgagactatgaccgcaagagggacagagatgagcgggatagaagtaggcacagcagcagatcagagcgagatggagggtcagagcgtagcagcagaagaaatgaacccgagagcccacgacatcgacctaaagatgcagccaccccttcaaggtctacctgggaggaagaggacagtggctatggctcctcaaggcgctcacagtgggaatcgccctccccgacgccttcctatcgggattctgagcggagccatcggctgtccactcgagatcgagacaggtctgtgaggggcaagtactcggatgacacgcctctgccaactccctcctacaaatataacgagtgggccgatgacagaagacacttggggtccaccccgcgtctgtccaggggccgaggaagacgtgaggagggcgaagaaggaatttcatttgacacggaggaggagcggcagcagtgggaagatgaccagaggcaagccgatcgggattggtacatgatggacgagggctatgacgagttccacaacccgctggcctactcctccgaggactacgtgaggaggcgggagcagcacctgcataaacagaagcagaagcgcatttcagctcagcggagacagatcaatgaggataacgagcgctgggagacaaaccgcatgctcaccagtggggtggtccatcggctggaggtggatgaggactttgaagaggacaacgcggccaaggtgcatctgatggtgcacaatctggtgcctccctttctggatgggcgcattgtcttcaccaagcagccggagccggtgattccagtgaaggatgctacttctgacctggccatcattgctcggaaaggcagccagacagtgcggaagcacagggagcagaaggagcgcaagaaggctcagcacaaacactgggaactggcggggaccaaactgggagatataatgggcgtcaagaaggaggaagagccagataaagctgtgacggaggatgggaaggtggactacaggacagagcagaagtttgcagatcacatgaagagaaagagcgaagccagcagtgaatttgcaaagaagaagtccatcctggagcagaggcagtacctgcccatctttgcagtgcagcaggagctgctcactattatcagagacaacagcatcgtgatcgtggttggggagacggggagtggtaagaccactcagctgacgcagtacctgcatgaagatggttacacggactatgggatgattgggtgtacccagccccggcgtgtagctgccatgtcagtggccaagagagtcagtgaagagatggggggaaaccttggcgaggaggtgggctatgccatccgctttgaagactgcacttcagagaacaccttgatcaaatacatgactgacgggatcctgctccgagagtccctccgggaagccgacctggatcactacagtgccatcatcatggacgaggcccacgagcgctccctcaacactgacgtgctctttgggctgctccgggaggtagtggctcggcgctcagacctgaagctcatcgtcacatcagccacgatggatgcggagaagtttgctgccttttttgggaatgtccccatcttccacatccctggccgtaccttccctgttgacatcctcttcagcaagaccccacaggaggattacgtggaggctgcagtgaagcagtccttgcaggtgcacctgtcgggggcccctggagacatccttatcttcatgcctggccaagaggacattgaggtgacctcagaccagattgtggagcatctggaggaactggagaacgcgcctgccctggctgtgctgcccatctactctcagctgccttctgacctccaggccaaaatcttccagaaggctccagatggcgttcggaagtgcatcgttgccaccaatattgccgagacgtctctcactgttgacggcatcatgtttgttatcgattctggttattgcaaattaaaggtcttcaaccccaggattggcatggatgctctgcagatctatcccattagccaggccaatgccaaccagcggtcagggcgagccggcaggacgggcccaggtcagtgtttcaggctctacacccagagcgcctacaagaatgagctcctgaccaccacagtgcccgagatccagaggactaacctggccaacgtggtgctgctgctcaagtccctcggggtgcaggacctgctgcagttccacttcatggacccgcccccggaggacaacatgctcaactctatgtatcagctctggatcctcggggccctggacaacacaggtggtctgacctctaccgggcggctgatggtggagttcccgctggaccctgccctgtccaagatgctcatcgtgtcctgtgacatgggctgcagctccgagatcctgctcatcgtttccatgctctcggtcccagccatcttctacaggcccaagggtcgagaggaggagagtgatcaaatccgggagaagttcgctgttcctgagagcgatcatttgacctacctgaatgtttacctgcagtggaagaacaataattactccaccatctggtgtaacgatcatttcatccatgctaaggccatgcggaaggtccgggaggtgcgagctcaactcaaggacatcatggtgcagcagcggatgagcctggcctcgtgtggcactgactgggacatcgtcaggaagtgcatctgtgctgcctatttccaccaagcagccaagctcaagggaatcggggagtacgtgaacatccgcacagggatgccctgccacttgcaccccaccagctccctttttggaatgggctacaccccagattacatagtgtatcacgagttggtcatgaccaccaaggagtatatgcagtgtgtgaccgctgtggacggggagtggctggcggagctgggccccatgttctatagcgtgaaacaggcgggcaagtcacggcaggagaaccgtcgtcgggccaaagaggaagcctctgccatggaggaggagatggcgctggccgaggagcagctgcgagcccggcggcaggagcaggagaagcgcagccccctgggcagtgtcaggtctacgaagatctacactccaggccggaaagagcaaggggagcccatgacccctcgccgcacgccagcccgctttggtctgtgagctgaggctgtccccagagaggatggcagcaggtattgggtcctcagccttctggcgggagccctgaggctgcggacaaagccctttcatctgaggactttcatctgtgcatatcacggccccccagggcagttcctgctggaccagactctctggcagaggaggtggagttcttccatgcaggagcacggcatggcgggagcggggctgcagagtatccgaggtgctgccggggcagcgggaggtggctggacccatcgcatctaaaactggcccaggacacttggtgtatgcgtgacttggctgtggctgtcttttttaatccttgtgtaaagcagcaaaaaagacctaaagggaattgtaatttggttataattcaggatttggaaataaatttattatttgtaaaacatgaaaaaaaaaaaaaaaaa

SEQ ID NO: 3660 - DNA, 7220 bp, Homo Sapiens
  NM_014014
cttttccttccccagtgcgtctttcctgcgtcgttccggcgcggcgggagcagagatctgcggccgtttgcagcttgcggtagggaggcgtggtggtctgaagcctccgagcagccgcggccatggcggatgtaaccgcccgtagtctgcaatacgagtacaaggcgaactcgaatcttgtgctccaagctgaccgttctctcattgaccggacccgccgggatgaacccacaggagaggtgctgtcccttgttgggaagctggagggcacccgtatgggagacaaggctcaacggaccaaaccgcagatgcaggaggaaagaagagccaagcgaagaaagcgtgatgaggaccggcatgacatcaacaagatgaagggttatactctgctgtcggagggcattgatgagatggtgggcatcatctacaagcccaaaactaaagagactcgggagacctatgaggtgctactcagcttcatccaggctgctcttggggaccagccacgtgatatcctttgtggggcagctgatgaagttctagctgttctaaagaatgaaaagctgcgggacaaggaaaggcgaaaggagattgacctgctgctgggtcaaacagatgataccagataccatgtgctagtgaacctgggcaaaaagatcacagactatggtggagataaggaaatccaaaatatggatgacaacattgatgagacatacggtgtgaatgtgcagtttgagtctgatgaggaggaaggtgatgaagacgtatacggggaggttcgagaagaggcatctgatgatgacatggaaggggacgaggctgtcgtgcgctgcaccctctcggctaatctcgtagcctcaggtgaactgatgagttccaagaagaaggatttgcaccctcgggatattgatgcattttggctgcagcggcagctcagtcgtttctatgatgatgccatcgtgtcgcagaagaaggcagatgaagtattggagattttgaagacggccagtgatgatcgggaatgtgaaaatcagctggttctgctgcttggtttcaacacctttgatttcattaaagtgttgcggcagcacaggatgatgattttatactgtaccttgctggccagtgcacaaagtgaagctgaaaaggaaaggattatgggaaagatggaagctgacccagagctatccaagttcctctaccagcttcatgaaaccgagaaggaggatctgatccgagaggaaaggtcccggagagagcgagtgcgtcagtctcgaatggacacagatctggaaaccatggatctcgaccagggtggagaggcactggctccacggcaggttctggacttggaggacctggtttttacccaagggagccactttatggccaataaacgctgtcagcttcctgatggatccttccgtcgccagcgtaagggctatgaagaggtgcatgtgcctgctctgaagcccaagccctttggctcagaagaacaactgcttccagtggaaaagctgccaaagtatgcccaggctgggtttgagggcttcaaaacactgaatcggatccagagtaagctctaccgtgctgcccttgagacggatgagaatctgctgctgtgtgctcctactggtgctgggaagaccaacgtggccctgatgtgcatgctccgagagattgggaaacacataaacatggacggcaccatcaatgtggatgacttcaagattatctacattgcccccatgcgctccttggtgcaggagatggtgggcagctttggaaagcgcctggccacttatggcatcactgttgctgaactgactggggaccaccagctgtgcaaagaagagatcagtgccactcagatcatcgtctgcacccccgagaagtgggacatcatcacccgcaagggtggtgagcgcacctacacccagctggtgcggctcatcattctggatgagattcatcttctccacgatgacagaggtcctgtcttagaagctttagtggccagggccatccgaaacattgagatgacccaagaggatgtccgactcattggtctcagtgccaccctacccaactatgaagatgtagccacctttctacgtgttgaccctgccaagggtctcttttactttgacaacagcttccgtccagtgcctctggaacagacatatgtgggtatcacagagaaaaaagctatcaagcgtttccagatcatgaatgaaatcgtctatgaaaaaatcatggaacatgctggaaaaaatcaggtgctggtgtttgtccactcccggaaggagactggaaagacagccagggccatccgggacatgtgcctagaaaaggacactctgggtctgtttctgagggagggctcagcctccacagaagtcctgcgaacagaagctgagcagtgcaagaacctagagctgaaggatcttctgccttatggctttgctattcatcacgcaggcatgaccagggttgaccgaacactcgtggaggatctttttgctgataaacatattcaggttttagtttccacagcaactctagcttggggtgtgaatctccctgcacatacagtcatcatcaaaggcacccaggtgtacagtccagagaaggggcgttggacagaactgggagcactggacattctgcagatgctgggacgtgccggaagaccccagtatgacaccaagggtgaaggcatactcatcacatctcatggggagctacagtactacctgtccctcctcaatcaacaacttcctattgaaagccagatggtttcaaagcttcctgacatgctcaatgcagaaatcgtgctaggaaatgtccagaatgccaaggatgcggtgaactggctgggctatgcctacctctatatccgaatgctgcgatccccaaccctctatggcatctctcatgatgacctcaagggagatcccctgctggaccagcgccgactagatctggttcatacagctgccctgatgctggacaagaacaatctggtcaagtacgacaagaagacgggcaacttccaggtgacagaactgggccgtatagccagccactactacatcaccaatgatacagtgcagacttacaaccagctgctgaagcccaccctgagtgagattgagcttttcagggtcttctcattgtcctctgagttcaagaacatcacagtgagagaggaggagaagctggagctgcagaagttgctggagagggtgcctatccctgtaaaggagagcattgaggaacccagtgctaagatcaacgttcttctgcaagccttcatctcacagctgaaattggagggctttgcactgatggctgacatggtgtatgtcacacagtcggctggccggttgatgcgagcgatatttgaaattgtcctgaaccgaggttgggcacagcttacagacaagaccctgaacctctgcaagatgatcgacaaacgcatgtggcagtccatgtgtcctctgcgccagttccggaaactccctgaggaagtagtgaagaagattgagaagaagaatttcccctttgagcgtctgtacgacctgaatcataatgagattggggagcttatccgcatgccaaagatggggaagaccatccacaaatatgtccatctgtttcccaagttggagttgtcagtgcacctgcagcctatcacacgctccaccctgaaggtggagctgaccatcacgccagacttccagtgggatgaaaaggtgcatggttcatccgaggctttttggattctggtggaggatgtggacagcgaggtgattctgcaccatgagtattttctcctcaaggccaagtacgcccaggacgagcacctcattacattcttcgtgcctgtctttgaaccgctgccccctcagtacttcatccgagtggtgtctgaccgctggctctcttgtgagacccagctgcctgtctccttccggcacctgatcttgccggagaagtacccccctccaaccgaacttttggacctgcagcccttgcccgtgtctgctctgagaaacagtgcctttgagagtctttaccaagataaatttcctttcttcaatcccatccagacccaggtgtttaacactgtatacaacagtgacgacaacgtgtttgtgggggcccccacgggcagcgggaagactatttgtgcagagtttgccatcctgcgaatgctgctgcagagctcggaggggcgctgtgtgtacatcacccccatggaggccctggcagagcaggtatacatggactggtacgagaagttccaggacaggctcaacaagaaggtggtactcctgacaggcgagaccagcacagacctgaagctgctgggcaaagggaacattatcatcagcacccctgagaagtgggacatactttcccggcgatggaagcagcgcaagaacgtgcagaacatcaacctcttcgtggtggatgaggtccaccttatcgggggcgagaatgggcctgtcttagaagtgatctgctcccgaatgcgctacatctcctcccagattgagcggcccattcgcattgtggcactcagctcttcgctctccaatgccaaggatgtggcccactggctgggctgcagtgccacctccaccttcaacttccatcccaatgtgcgtcccgtccccttggagctgcacatccagggcttcaacatcagccatacacaaacccgcctgctctccatggccaagcctgtgtaccatgctatcaccaagcactcgcccaagaagcctgtcattgtctttgtgccgtctcgcaagcagacccgcctcactgccattgacatcctcaccacctgtgcagcagacatccaacggcagaggttcttgcactgcaccgagaaggatctgattccgtacctggagaagctaagtgacagcacgctcaaggaaacgctgctaaatggggtgggctacctgcatgaggggctcagccccatggagcgacgcctggtggagcagctcttcagctcaggggctatccaggtggtggtggcttctcggagtctctgctggggcatgaacgtggctgcccacctggtaatcatcatggatacccagtactacaatggcaagatccacgcctatgtggattaccccatctatgacgtgcttcagatggtgggccacgccaaccgccctttgcaggacgatgaggggcgctgtgtcatcatgtgtcagggctccaagaaggatttcttcaagaagttcttatatgagccattgccagtagaatctcacctggaccactgtatgcatgaccacttcaatgctgagatcgtcaccaagaccattgagaacaagcaggatgctgtggactacctcacctggacctttctgtaccgccgcatgacacagaaccccaattactacaacctgcagggcatctcccatcgtcacttgtcggaccacttgtcagagctggtggagcagaccctgagtgacctggagcagtccaagtgcatcagcatcgaggacgagatggacgtggcgcctctgaacctaggcatgatcgccgcctactattacatcaactacaccaccattgagctcttcagcatgtccctcaatgccaagaccaaggtgcgagggcttatcgagatcatctccaatgcagcagagtatgagaacattcccatccggcaccatgaagacaatctcctgaggcagttggctcagaaggtcccccacaagctgaataaccctaagttcaatgatccgcacgtcaagaccaacctgctcctgcaggctcacttgtctcgcatgcagctgagtgctgagttgcagtcagatacggaggaaatccttagtaaggcaatccggctcatccaggcctgcgtggatgtcctttccagcaatgggtggctcagccctgctctggcagctatggaactggcccagatggtcacccaagccatgtggtccaaggactcatacctgaagcagctgccacacttcacctctgagcatatcaaacgttgcacagacaagggagtggagagtgttttcgacatcatggagatggaggatgaagaacggaacgcgttgcttcagctgactgacagccagattgcagatgtggctcgcttttgtaaccgctaccctaatatcgaactatcttatgaggtggtagataaggacagcatccgcagtggcgggccagttgtggtgctggtgcagctggagcgagaggaggaagtcacaggccctgtcattgcgcctctcttcccgcagaaacgtgaagagggctggtgggtggtgattggagatgccaagtccaatagcctcatctccatcaagaggctgaccttgcagcagaaggccaaggtgaagttggactttgtggccccagccactggtgcccacaactacactctgtacttcatgagtgacgcttacatgggatgtgaccaggagtacaaattcagcgtggatgtgaaagaagctgagacagacagtgattcagattgagtcctgaggcatttacttttgggtaaaggagagttgagcctgaattaggaatgtgtacattgtaggaatcctggttgtggggaccaggtctgtgggcctcaggtctggccagccagggctggtgctgtccccgcctacctccacttcctttcccttgctcactctggatccagtgacagcaggtgtcatgggtcaagcataaatcatatatagcattttcaggcatgttcctggtagttcttttgagtctgacattctaataaaataatttgtagaaaccatttgtctttgtagtgattccaaattaaaagttttctttctccaacctgagggcacggccaaaaagatctggttattttttagccaggaacgtgcttgttaatgagtatgtctggaggacagacctgctcattaggtgtgctgtcccctgtagcctcgtgagtcagcccagaggagggtacatgcgactgtggcctggcctcagtggtacccacacatcagcactaccacaagaaccaacactgagcctcggaagctagatcacaggttaggggtttctctagatgggggttctgaaatttgcagtgtctgctcctgggaggcagcaccagaaagggcactgaaatgtactagctggatgtgacccagtcttaataaacaggttttctaatccagaaaaaaaaaaaa

SEQ ID NO: 3661 - DNA, 1580 bp, Homo Sapiens
  NM_014015
gcgcgaggacctgcggggcggggcgggagagaaggctgccgggaccggccctagacactgagccgcggtgggatccccaccggctctgcgaggccctgcgagcgccagggaggcgccacgagggagccgggcagccgcgggccacttcaggggggcccgcctcgccgcccgggcggtcgagagatccttgggggcacatctcggggtgcggtgacccgcccggcgcatttcgggggtcggggcgcaattgccaggggacatctggagcccggccctgcttctgtcgggctccagggtacccctggatggctgcgctgtgccctcgccggccgcccgggcgccgcagcggctgagttcgccgggatcgccgggccgccgcccttgccacccgctgcatgctcggcgcccgggtcgcggcccacctggacgcactgggccccctggtcccctacgtgccgccgccgctgctgccctctatgttctacgtgggcctgttcttcgtcaatgtgctgatcctgtactacgccttcctcatggagtacatcgtcctcaacgtgggcctcgtcttcctgcccgaggacatggaccaggcgctcgtggacctcggcgtgctctccgaccccggctcgggcctttacgatgctgactcggagctcgacgtctttgatgcgtacttggagtagggtctcgactgctgttcccctcttccctacacgatccgcaacccatgccctggaccagccgcccagatcatgccgccgcagctggttgggggcaccatctggacggggatggttccccaggaggagaccctcccctgcctccgaggcctacctgctcccctcaaaagcttcgtgccaacagagaggttcctgtttgaacccaggagagtggaagagagattgggactgagtgctgaggttgggaaggcacctgctcccacagaagggggaacgcaagaggcatcccaagacctcatctgcctgcagtgtcaaatcgatggcctggccttggcttctgattatttgcagctgcgatggatgtttacaggaacccagccagagtttgcctccctgcacttcatcccggagcgcacctgcttcccccacttcaccttcggagaggacacttcaaactgcggacacacgcaaaagcgactcccagctccgtttgatgtgagttgagccttcaggccagctgggtttagcccgaggctggtcttagatgcagcgactgtttcaggggtgactcagaagaaaaagaagctgaggaagctgttggggggctgagggtgggattctcgctccttcatttcaggttactcgttcttcagcaagttggcaaaacagacatcatgctggtgagtgccacgttactcccctggctggaaatgcttttctgaaagtatgagtgttgtgcctacttaattctgataaacctgtctaagcaatacttaggaggcttacttctttggattaaaaaaaaatgtatgcaactccaaaaaaaaaaaaaaaaaaaaaaaaaaaaaaaaaaaaaaaaaaaaaaaaaaaaaaaaaaaaaaaaaaaaaaaaaaaaaaaaa

SEQ ID NO: 3662 - DNA, 3751 bp, Homo Sapiens
  NM_014030
gcggcgcggggcggagggcgcccgagggcgagcgggcaggcgggcacggcgggttccgggccagccccggggcggacggttggccgggcgcgcggagcctcgccggggcctcgccggagccgggccgggcagcaggggccgccgccgccgcccgggcccgccgcccgcgccccccacgctggcccagagggctgcggccgcgtcgccgctgaggatgtcccgaaaggggccgcgagcggaggtgtgtgcggactgcagcgccccggaccctggctgggcatccatcagcaggggtgtgctggtgtgtgacgagtgctgcagcgtgcaccggagcctgggacgccacatctccattgtcaagcaccttcgccacagcgcctggcctcccacgctgctgcagatggtgcacacgcttgccagcaacggggccaactccatctgggagcactccctgctggaccccgcacaagtgcagagcggccggcgtaaagccaacccccaagacaaagtccaccccatcaagtcagagttcatcagggccaagtaccagatgctggcatttgtgcacaagcttccctgccgggacgatgatggagtcaccgccaaagacctcagcaagcaactacactcgagcgtgcggacaggcaacctggagacatgtctgcgcctgctctccctgggtgcccaggccaacttcttccacccagagaagggcaccacacctctgcacgtggctgccaaggcaggacagacactgcaggccgagctgcttgtagtgtatggggctgaccctggctcccctgatgttaatggccgcacacccattgactatgccaggcaggcggggcaccatgagctggcggaaaggctggttgagtgccaatatgagctcactgaccggctggccttctacctctgtggacgcaagccggatcacaagaatgggcattacatcatcccacagatggctgacagccttgacttatccgaattggccaaagctgctaagaagaagctgcaggcgctcagcaaccggctttttgaggaactcgccatggacgtgtatgacgaggtggatcgaagagaaaatgatgcagtgtggctggctacccaaaaccacagcactctggtgacagagcgcagtgccgtgcccttcctgcctgttaacccggaatactcagccacgcggaatcaggggcgacaaaagctggcccgctttaatgcccgagagtttgccaccttgatcatcgacattctcagtgaggccaagcggagacagcagggcaagagcctgagcagccccacagacaacctcgagctgtctctgcggagccagagtgacctcgacgaccaacacgactacgacagcgtggcctctgacgaggacacagaccaggagcccctgcgcagcaccggcgccactcggagcaaccgggcccggagcatggactcctcggacttgtctgacggggctgtgacgctgcaggagtacctggagctgaagaaggccctggctacatcggaggcaaaggtgcagcagctcatgaaggtcaacagtagcctgagcgacgagctccggaggctgcagcgagagatccacaagctgcaggcggagaacctgcagctccggcagcctccagggccggtgcccacacctccactccccagtgaacgggcggaacacacacccatggcgccaggcgggagcacacaccgcagggatcgccaggccttttccatgtatgaacctggctctgccctgaagccctttgggggcccccctggggacgagctcactacgcggctgcagcctttccacagcactgagctagaggacgacgccatctattcagtgcacgtccctgctggcctttaccggatccggaaaggggtgtctgcctcagctgtgcccttcactccctcctccccgctgctgtcctgctcccaggagggaagccgccacacgagcaagctttcccgccacggcagtggagccgacagtgactatgagaacacgcaaagtggggacccactgctggggctggaagggaagaggtttctagagctgggcaaagaggaagacttccacccagagctggaaagcctggatggagacctagatcctgggcttcccagcacagaggatgtcatcttgaagacagagcaggtcaccaagaacattcaggaactgttgcgggcagcccaggagttcaagcatgacagcttcgtgccctgctcagagaagatccatttggctgtgaccgagatggcctccctcttcccaaagaggccagccctggagccagtgcggagctcactgcggctgctcaacgccagcgcctaccggctgcagagtgagtgccggaagacagtgcccccagagcccggcgccccagtggacttccagctgctgactcagcaggtgatccagtgcgcctatgacatcgccaaggctgccaagcagctggtcaccatcaccacccgagagaagaagcagtgacctctctccccacaccctcacctgcaccctaggacctcactggccataggagctgggccactccagacattaatccccaccccaacagagccactggcacaagtgcccttagtgctgccacactccctggcagccaggtgccctggtgcccacccctgtcgagcccctaaggatggggaggtgggggggcaggagcttctgtcccccacattccatgcacctcccctctgtatatagcatctcccccctcctagtgagcaggggcctgcaaggcatcactcccagcccctcgccttctagggcaccctcagcaaaggggcaggtggggacactccaagtggggcagctctccgtacatgcgccccacccccatgagccagttcagccctactgggggctgagcgggggcatcccctcctttgtacatagtctccatggatgtccctgccctgtagccaccagccccttgctgctctccctttaatgccatatggcccctgcctagggcacaggccccaacctgtgtgctggggtccccagcagcaaacactggaaagtctgttttttttttttctttcttcttccccaccccttaattttaactttgtggtaactgagtgcccccgcgtgcctgcgtgttgagtgtgtgggcggcagtgccgttccggaggcctggtccatctggagttttgaggggtgaggggaccagagcagtgggaccagcatggggatcagcttcccttccccacctggagccagggactgtccgggtagccagttttggtcctgccagctgcctccctgatccctccccactctcgccccttctctatgaacttaaatcaaaaaccacttccctccatctcctcctgctcctgcgtggagggggaatgtgtgctggctagggtggaggactgagcacctgagcctggggctggctccccggggtccccgactcagctggtggctgtggagctgagtcccctccccgtaacctctgcaaggccagcacccaccatcactacctgcacctgctgtggtcccaccctctggaggcctgggaacctggctgcagcctgggaaggctggagaggcagacggtgggacccaccagctctctccccatcccgcttcttccctgggggccaggccctacctgtgtggtggtgggtgggctgtcaagacgtgtcatgtacatttgtatcaaaaataaagaagtgaccatgagctgttaaaaaaaaaaaaaaaaaa

SEQ ID NO: 3663 - DNA, 2525 bp, Homo Sapiens
  NM_014034
aaagtttccgagtccattccgggagcgggagcccatcttgctggctgccgaggccctcgctggaggaggagggtcagaactcgggtgcagccaatcgagggcaacgctgctacttatcagagcagaatgggctgtagtttagtgaaataggaaagctgcaaaacactgtggagtgctcccgtgtaaataaaaagaggaaaaaagtttctcaagtcgccgctgcacgacgtctggccggcgctggagcgggggtctgcgctctcccgagcggccgcgcgctggactttattgtgccgcaaccagccccagttcccattgtttgtgtttttttcaaaatatggcaaaggttcaggtgaacaatgtagtggtgctggataacccttctcctttctacaacccgttccagttcgagatcaccttcgagtgcatcgaggacctgtctgaagacttggaatggaaaattatctatgtgggctctgcagaaagtgaagaatacgatcaagttttagactctgttttagtgggtcctgttcccgcaggaaggcatatgtttgtatttcaggctgatgcacctaatccaggactcattccagatgcagatgcagtaggcgtaactgttgtgctaattacttgtacctatcgaggacaagaatttattagagttggctattatgtaaataatgaatatactgagacagaattaagggaaaatccaccagtaaaaccagacttttctaagcttcaaaggaatattttggcatctaatcccagggtcacaagattccacattaattgggaagataacacagaaaaactggaagatgcagagagcagtaatccaaatctacagtcacttctttcaacagatgcattaccttcagcatcaaagggatggtccacatcagaaaactcactaaatgtcatgttagaatcccacatggactgcatgtgaccacctaccatccctttagtacaaattaagctattaaaaatacacagaactatttccctgaaattccgtaagtacatagtcaaaacacaatgtgaagaatttgtttaaaaacatcctgtagaaagtttataagaaaaccagtatttgaacaaattgtggaatataaatacaactatttttaagtaatttttttctctaatgtgttattttatttgttctgaaactaatctgattaaagcatatatattattttcttctcctttatatgtaatgaaagcacttataaagaaacaggaatcattagaccaggttgtaaagatgtcttggcctcccagacagtctttggaccactattttactggcctttgaaagaacaaagtttacttcaactaaaatgtttcttcctgtgaagacatatggtatcattttaatttaaggggcagatttccattcttttttggcatgtccttaaaaagaggatttgaaatcaactatatgctaccaagaactttaggatccaattttccaagccaccgtgaagcctcttatggctactattatagttcatgagatgttggacagcatttggtttgtttggtaagagaagaacaaatatggctaattgttaataaggtcccctggctatggtttttgttcttataacagagtttagaatatcagagcatttcttgaatcatacatcattattgtccagtgaattcaagaccaaatacaatatcgggagaaaatacaaactccctgtgtttaagaataggggattacaatggctcaaattggttcatttgatttctaaaaataccatgacctttaaaaattcttttaatagatcatgttattggcagtatttatataaaaaccatggatttagaaaggtatatttagctttattataatagatacgttactattttggaaatatatatattttcacacctgtagtactcttccccatttcctctgacactcatgcagaatgagatcaggcatatttgtggttgacatactctagatagcttttccaacaaatctttgaaaagcaatcttggaaaggaattcattaactaaatggggtaaaaggtttctttttctttgagagttaagtccttcctcaaaaaattttcttatgctccataaaattgaggtagaatattttcattattcttgcagctaagcaagacagccatatgatgcaggttatgcagtgccttcatatctaaaacttttatactgcactttttaaagcttttatgttgaggaaaggaaaagggcatttgtctaaacatggattctgagttgtatatatttcctatcattctaaaaaagtgaatttgtgaagcaaagttttgccagatgttaaactttgaatttaatataccagattattaaaatattgtccattaactagttcatagattttaaaagtaaaatacttctgactgttaaaactatataaagaaaatctcatttgtctaattgcaattaaaagaaaaatgttaaaatattaaaatgaaaataaaagcattactttccaacaaaaaaaaaaaaaaaaaaa

SEQ ID NO: 3664 - DNA, 2945 bp, Homo Sapiens
  NM_014037
tcggcgggaaaggccgcgcgccaggcagatcgaggggtgtcgcccaaaccgatctgtcgacgcctgaaggggcctgaggagattgctaggcttctcagctggggcttcttcaccctcatttttgtccgactggctggactgaagaacctggcagaagccttggggctagggtctcctcaggaagatgaaccctcccttgcagaagcgggagctgccccagagagtctgtgtgagatgaagacagaggcccagccttcgacatccttgctggcaaacacctcatggactggcacagtgatttctgacagtgtcccaggaagtcaaacgtgggaagacaagggttcattgacccggtctgcaacatcttggacctcagaggcccaagtttcagcagcccgggttgcagaggctcaggccaggaccagtcagcccaagcaaatttctgtattggaggcgttaactgcctcagccctgaaccagaaacccacgcatgagaaggtgcagatgacagagaagaaagagagtgaggtcctccttgcccgtccgttctggtccagcaaaactgagtatattctggctcaggtgggcttctctatgaagccatcttgtctctggcgctttgcctacctgtggcttaacagtggaggctgcagtttcgctgccatctacatcttcatgctgttcctggtcggggttcctcttctcttcctggagatggcagctggtcagagcatgcgtcagggtggcatgggtgtatggaagatcattgccccctggattggtggtgtggggtattctagcttcatggtgtgcttcatcctcggcctgtacttcaatgtggtcaattcctggatcatcttctacatgagccagtccttccagtttcccgttccatgggagaaatgtcccttaacgatgaactctagtggctttgatcctgaatgtgaacggacaacaccctccatatacttctggtaccagcaggccttgaaggcctcagacagaatcgaggatggcgggtcaccagtctacagtctggtcctgcccttctttctttgctggtgtcttgttggtgctttcatgatcaatgggctcaagtccactgggaaggtaatctatgtcttggtactgctcccctgtttcatcattgtcggtttcttcatccggactctactcctggaaggggcaaaatttggccttcaacagttggtggttgccaagatatcggatgtgtacaatatgagtgtgtggtctctagcagggggtcaagttttgtctaacacaggcataggccttggctccgttgcctccttagcctcctacatgccccagtccaacaactgtctcagtgatgcctttctcgtgtctgtgataaacctgctcactttgttggttttcacatctttcaacttctgtgtcctgggcttctgggcgacagtcatcacacatcgctgctgtgagaggaatgctgaaatacttttaaagctgataaacctagggaaactgcctcctgatgccaagccccctgtcaacctgctttacaacccaacctccatctacaatgcctggctcagtggccttccccagcacatcaaaagcatggttctccgcgaggtgactgagtgcaacatagagactcagtttcttaaggctagcgagggcccaaagtttgcattcctgtcctttgttgaagccatgtccttccttcctccgtctgtcttctggtcttttatcttcttcctgatgttgctggccatggggctgagcagcgcaatagggattatgcagggcatcattactccactccaggacaccttctctttcttcaggaaacatacaaagctgctcatagtgggagtctttttgctcatgttcgtgtgcggcctcttcttcactcgaccttcaggcagctacttcatcagactgctgagtgactactggatagtcttccccatcatcgtcgttgtcgtatttgaaaccatggctgtatcctgggcctatggggccaggaggttccttgcagacctgacgatcctgttgggccaccccatctctcccatctttggttggctgtggccccatctgtgtccagttgtgctgctaatcatctttgtgaccatgatggttcatctttgtatgaagccgatcacctacatgtcctgggactcaagcacctcaaaagaggtgcttcgaccatacccaccgtgggcactgctcttgatgatcaccctttttgccattgtcatcctccccatccctgcatactttgtatactgccgcatacataggattcccttcaggcccaagagcggagacgggcctatgacagcctccacatccctacccctaagtcaccagctaacacccagtaaagaggttcaaaaggaagaaattctacaagttgatgaaacaaagtacccatcaacttgtaatgtgacttcctaacttcattaatttggcttcacataacatatcccttagaacagatccaatagacaactcttaatatcagcttgcaactgttgatctccctggatccagaaccacttttatttccaagaggaggggcattctttgggggtgttcatggggcctggacttgcaatcccttcctgggtcccatcttacctggtgaccaccatcattgttttccccatcctcttcctcaacacacatacatgcacaacacatatacaatactagtgatgtctaccagtcctgctacttctggggtgcctgtctcctggaatggagctggaggagcaatgctgttggtgaataaatcagtctactggaactccaaggactggatgtaagcagatctttttttcctatagatgtctcagatgttcagttttcctgtcacaaggcttccagtctgtattagttcattttcacactgctaataaagacatacctgaaactgggaacaaaaaaaaaaaaaa

SEQ ID NO: 3665 - DNA, 1867 bp, Homo Sapiens
  NM_014038
ggggctgcgccgggttccgtgtgtctatgtcaatgtgtctgtccttcactcctccattgtctgccgccactgctgctgctgctgctgctgccgctgctgctgcacgaatcgccgcagcccccagccttgcgcgtcgtcgctacctcctcggacagaaattttatgaataagcatcagaagccagtgctaacaggccagcggttcaaaactcggaaaagggatgaaaaagagaaattcgaacccacagtcttcagggatacacttgtccaggggcttaatgaggctggtgatgaccttgaagctgtagccaaatttctggactctacaggctcaagattagattatcgtcgctatgcagacacactcttcgatatcctggtggctggcagtatgcttgcccctggaggaacgcgcatagatgatggtgacaagaccaagatgaccaaccactgtgtgttttcagcaaatgaagatcatgaaaccatccgaaactatgctcaggtcttcaataaactcatcaggagatataagtatttggagaaggcatttgaagatgaaatgaaaaagcttctcctcttccttaaagccttttccgaaacagagcagacaaagttggcgatgctgtcggggattctgctgggcaatggcaccctgcccgccaccatcctcaccagtctcttcaccgacagcttagtcaaagaaggcattgcggcctcatttgctgtcaagcttttcaaagcatggatggcagaaaaagatgccaactctgttacctcgtctttgagaaaagccaacttagacaagaggctgcttgaactctttccagttaacagacagagtgtggatcattttgctaaatacttcactgacgcaggtcttaaggagctttccgacttcctccgagtccagcagtccctgggcaccaggaaggaactgcagaaggagctccaggagcgtctttctcaggaatgcccgatcaaggaggtggtgctttatgtcaaagaagaaatgaagaggaatgatcttccagaaacagcagtgattggtcttctgtggacatgtataatgaacgctgttgagtggaacaagaaggaagaacttgttgcagagcaggctctgaagcacctgaagcaatatgctcccctgctggccgtgttcagctcccaaggccagtcagagctgatcctcctccagaaggttcaggaatactgctacgacaacatccatttcatgaaagcctttcagaagattgtggttctcttttataaagctgatgttctgagcgaagaagcaatactgaaatggtataaggaagcacatgttgctaaaggcaaaagtgtttttcttgaccagatgaagaaatttgttgagtggttacaaaatgcagaagaagaatccgaatcggaaggtgaggaaaattaaatggctcaacaagcacaatacctaggttaccacacaccactttttgattgggaatgctgaaccatttgagaagagaaacttggcttctgttttcgcaaaggaaaaaaaaaataggataggcttcccttgtgcagagggagaaatggttttgtttttgttttgtttttaaatggagccctgaggcatcagctattatacttgggactctacctctcactcactatatgctaacttaaagccattcaacaaggagtcaagtagatctgaaattaaatactcaacagactcctccttttttagctgtatttttcaggtactgtgtggtgaccgccccactggtgtctattacaggccactttggtagttgtgtatctgctcatgtatgtgatttgacaaaccagttttttaaaataaatggctttttaaaaatctgggaaaaaaaaaa

SEQ ID NO: 3666 - DNA, 882 bp, Homo Sapiens
  NM_014042
gggagcggggaaaacaaaaggagacgaaggacgcatgcgtttggtgagtcccggattctggtgggttcttccgctcaggctgggtgaagcgcttccgggtcgccgccggcagcagcctcccggcgcgatgaagacactgaggctcagagaggttaagtgactcagccaaggtcaaacagctagtaagtggtggagccaggactcaaagccagtctaggagccatgtccactttgttcccctcactcttccctcgtgtgactgagactctgtggtttaatctggatcgaccctgtgtggaagagacagagctgcagcagcaggaacagcagcatcaggcctggctccaaagcatcgcggagaaagacaacaacctggttcctattggcaagccagcctcagagcactatgatgacgaggaagaagaggatgatgaagatgatgaggatagtgaagaggactcagaggatgatgaggatatgcaggacatggacgagatgaatgactacaatgagtcaccggatgatggagaggtcaatgaggtggacatggaaggcaacgaacaggatcaggaccagtggatgatctaggtagacaaggcagggtggcctcagggagattccaggccagcccaaactaccctgcatcccaacccccaacccctgcccacagaaccagctgatggccccagtgcctgaaagtgcccttgggcacctcctcagctgctgccaggatctggtctctttggcccctcccaggccatcagtctgcacttgaaatccccagggcctgaaacctactccaccttcctggccagtacctcaccccttgattgccaggtctggtctaagtttctttaataaagacaaaggagtgattttcca

SEQ ID NO: 3667 - DNA, 3252 bp, Homo Sapiens
  NM_014045
ctactccaacccctgggcgggcgggggtaccgcctgggcaagggccggggcgccgggccgagccacctcttcccctcccccgcttccctgtcgcgctccgctggctggacgcgctggaggagtggagcagcacccggccggccctgggggctgacagtcggcaaagtttggcccgaagaggaagtggtctcaaaccccggcaggtggcgaccaggccagaccaggggcgctcgctgcctgcgggcgggctgtaggcgagggcgcgccccagtgccgagacccggggcttcaggagccggccccgggagagaagagtgcggcggcggacggagaaaacaactccaaagttggcgaaaggcaccgcccctactcccgggctgccgccgcctccccgcccccagccctggcatccagagtacgggtcgagcccgggccatggagcccccctggggaggcggcaccagggagcctgggcgcccggggctccgccgcgaccccatcgggtagaccacagaagctccgggacccttccggcacctctggacagcccaggatgctgttggccaccctcctcctcctcctccttggaggcgctctggcccatccagaccggattatttttccaaatcatgcttgtgaggaccccccagcagtgctcttagaagtgcagggcaccttacagaggcccctggtccgggacagccgcacctcccctgccaactgcacctggctcatcctgggcagcaaggaacagactgtcaccatcaggttccagaagctacacctggcctgtggctcagagcgcttaaccctacgctcccctctccagccactgatctccctgtgtgaggcacctcccagccctctgcagctgcccgggggcaacgtcaccatcacttacagctatgctggggccagagcacccatgggccagggcttcctgctctcctacagccaagattggctgatgtgcctgcaggaagagtttcagtgcctgaaccaccgctgtgtatctgctgtccagcgctgtgatggggttgatgcctgtggcgatggctctgatgaagcaggttgcagctcagaccccttccctggcctgaccccaagacccgtcccctccctgccttgcaatgtcaccttggaggacttctatggggtcttctcctctcctggatatacacacctagcctcagtctcccacccccagtcctgccattggctgctggacccccatgatggccggcggctggccgtgcgcttcacagccctggacttgggctttggagatgcagtgcatgtgtatgacggccctgggccccctgagagctcccgactactgcgtagtctcacccacttcagcaatggcaaggctgtcactgtggagacactgtctggccaggctgttgtgtcctaccacacagttgcttggagcaatggtcgtggcttcaatgccacctaccatgtgcggggctattgcttgccttgggacagaccctgtggcttaggctctggcctgggagctggcgaaggcctaggtgagcgctgctacagtgaggcacagcgctgtgacggctcatgggactgtgctgacggcacagatgaggaggactgcccaggctgcccacctggacacttcccctgtggggctgctggcacctctggtgccacagcctgctacctgcctgctgaccgctgcaactaccagactttctgtgctgatggagcagatgagagacgctgtcggcattgccagcctggcaatttccgatgccgggacgagaagtgcgtgtatgagacgtgggtgtgcgatgggcagccagactgtgcggacggcagtgatgagtgggactgctcctatgttctgccccgcaaggtcattacagctgcagtcattggcagcctagtgtgcggcctgctcctggtcatcgccctgggctgcacctgcaagctctatgccattcgcacccaggagtacagcatctttgcccccctctcccggatggaggctgagattgtgcagcagcaggcacccccttcctacgggcagctcattgcccagggtgccatcccacctgtagaagactttcctacagagaatcctaatgataactcagtgctgggcaacctgcgttctctgctacagatcttacgccaggatatgactccaggaggtggcccaggtgcccgccgtcgtcagcggggccgcttgatgcgacgcctggtacgccgtctccgccgctggggcttgctccctcgaaccaacaccccggctcgggcctctgaggccagatcccaggtcacaccttctgctgctccccttgaggccctagatggtggcacaggtccagcccgtgagggcggggcagtgggtgggcaagatggggagcaggcacccccactgcccatcaaggctcccctcccatctgctagcacgtctccagcccccactactgtccctgaagccccagggccactgccctcactgcccctagagccatcactattgtctggagtggtgcaggccctgcgaggccgcctgttgcccagcctggggcccccaggaccaacccggagcccccctggaccccacacagcagtcctggccctggaagatgaggacgatgtgctactggtgccactggctgagccgggggtgtgggtagctgaggcagaggatgagccactgcttacctgaggggacctgggggctctactgaggcctctcccctgggggctctactcatagtggcacaaccttttagaggtgggtcagcctcccctccaccacttccttccctgtccctggatttcagggacttggtgggcctcccgttgaccctatgtagctgctataaagttaagtgtccctcaggcagggagagggctcacagagtctcctctgtacgtggccatggccagacaccccagtcccttcaccaccacctgctccccacgccaccaccatttgggtggctgtttttaaaaagtaaagttcttagaggatcataggtctggacactccatccttgccaaacctctacccaaaagtggccttaagcaccggaatgccaattaactagagaccctccagcccccaaggggaggatttgggcagaacctgaggttttgccatccacaatccctcctacagggcctggctcacaaaaagagtgcaacaaatgcttctattccatagctacggcattgctcagtaagttgaggtcaaaaataaaggaatcatacatctcaaaa

SEQ ID NO: 3668 - DNA, 1536 bp, Homo Sapiens
  NM_014046
agcttctcccccatgccttccctttcacgcttccgtcctgacgcaaacgtggggccgccttccgcactgcgggcttgtccttggccctgccctactcagtttcctgaagcatgcgcagttgcctttccgtcaattcctgtcctgggcgtacgtcaagatggcggcgtctgtattaaacaccgtgctgaggcggcttcctatgctatctctcttccgaggttctcacagagttcaggttcccctccagactctttgcaccaaagctccctctgaggaagattctttgtcctcagttcccatttctccttataaggatgagccctggaaatatctggaatcagaagaataccaggagcgatatggttctcgccccgtctgggctgactaccgccgcaaccacaagggtggtgtacccccacagcggactcggaagacatgtattcgtcggaataaagttgttgggaatccctgccccatctgtcgagatcacaagttgcatgttgactttaggaacgtgaagctcttggagcaatttgtctgcgcccacacgggtatcatcttctatgctccatacacaggagtctgtgtgaagcagcacaagcggttgacccaggccatccagaaagccagggatcatggtctcctcatttaccacatcccccaggttgaaccacgggaccttgacttcagtacctctcatggggctgtgagtgctactccgccagcccccaccctggtctcaggtgacccctggtacccatggtacaactggaaacagccaccggagagagaactgtctcgccttcgccggctttaccagggtcatctccaagaagagagtggccccccacctgagtcaatgcccaagatgccccctagaacaccagcggaagcctcctccactgggcagacaggccctcagagtgctctgtaggagctgtagactgggaagagaggccaggcgtggtggctcactcctgtaatcccagcactttgggaagccaaggtgggctgatcacttgatcccaggagtttgagaccagcctgggcaccatggtgaaacctcgtctttaccaaaaaatacaaaaattagctgggtgtggtggtgcacacctgtagtctcaactattggggaggctaaggtaggatcacttgatcccaggaggcggaggttgcagtgagttgcagtcacacccctgcactccagcctgggtgacagctagaccctgtctcaaaaaaaaaaaaaaagactgggaagagagctagagggactaggagataatgtgtatgtaggtttatgtgatgggatatcaccctgaagagttgtgtcttttgtggccagtgacaaatccaggaaatgaatgttgctgatagggataaatcttgaggctgagggcgggtggtacagatgtgtatgggaaaccccaacccctatatattgtaaatagatgggctgggctaaacattgttgccgtttcatacttctaccaactcagcttttacacaataaagctctactgtctctggtttgcttaa

SEQ ID NO: 3669 - DNA, 1015 bp, Homo Sapiens
  NM_014051
gtttccaggagggagcggcctttgctcagcgcgagacggctgggcgccgagtgggacagcgctggtgcggagactgcttccggactccaggtaccgcgcttggcggcagctggccccagacttctgtcttttcagctgcagtgaaggctcggggctgcagaattgcaaccttgccaatggacctgatcggttttggttatgcagccctcgtgacatttggaagcatttttggatataagcggagaggtggtgttccgtctttgattgctggtctttttgttggatgtttggccggctatggagcttaccgtgtctccaatgacaaacgagatgtaaaagtgtcactgtttacagctttcttcctggctaccataatgggtgtgagatttaagaggtccaagaaaataatgcctgctggtttggttgcaggtttaagcctcatgatgatcctgagacttgtcttgttgctgctctgagcatctggaggaacagaaaactaagttcatgtcatcctgctgtaatgggcagagcatattttttttgtatttaaaagataaacttcaatatggaatgctagaaacacaaatagcactgtcacctctaatatgaacattagtttgaggtagtttttttctaaagcaaaaattttaactgttttctaattgtcaagcactattttcattaaaagtgtctaatgaatcatgatatactcttccatttgttgtgtctattttttatatatttggtattttttgaaaattccaaatactcatgtctcaagtaagcttaaactacaacttgtcacataaaggaagtcttaagtggagttcacagaatgataatgtatctatttgtcatttgtgttatatttgaaattattagaaattatgctttttccattttaattgtattgctgccagtgctatttttttctttaaaaaattttattcttagcacactgttatgtcctaactgaatgtattcagtattcaaataaaagacattttggttcaaa

SEQ ID NO: 3670 - DNA, 3160 bp, Homo Sapiens
  NM_014055
gtaactctacggcctagcaaccgttgccaaggagctcgactctgggagcggtctagagcccgggcgcctcctggggggtggggaaacggtttcgtgaggagaatttgaggtaacctcgccaactcgcggtcggaagctcctctgaaccccgaaataggagagagctcccgtcctctctcggtcctgatgcagcacctcgcaagtggaaggggtcgtcgcggttaagcccccggataggggaatcgggccccttctgggattcgagcggatccaggccgctccctggagggatgaactgtcgaggggcccagggcagcccccgctagaggcccggtcgggtgtggggtcccctgtcccctgtcccgagcccggggagggggacactatttctggtactcccaggaggctgcgggtcgatgctcgtgccagcctgggacccaggcagcacggtttctctcccaaattgtgccagagaacacgcacgtcctggttttcattgttccccgcctcctgcgactcgtttgtggttaaaattataagacctaattatgagtgatcaaattaaattcattatggacagtctcaataaggagccctttaggaagaactataatttaatcacgtttgattccttggagccaatgcaactattacaagttctcagtgatgttctggctgagattgacccaaagcaacttgtggatatcagagaggagatgccagagcagacagccaaacgaatgttgagccttcttggtattcttaagtacaaaccttcaggaaatgccacagatatgagtacttttcgtcagggtttggtgattggaagtaaacctgtaatttacccagtgctccactggcttcttcagaggactaatgaactgaagaaaagagcatatttagctcgttttttaataaaacttgaggtaccaagtgagtttcttcaggatgaaactgtggctgacaccaataaacagtatgaagagttaatggaagcctttaaaactttgcataaagaatatgagcagctcaagatatctggattttctacagcagaaataagaaaggatatcagtgcaatggaagaagaaaaggatcagctcattaagagagttgaacatttgaagaaaagggttgagacagctcagaatcatcaatggatgcttaaaatagcaaggcaacttcgagttgaaaaagagagagaagaatatcttgcacaacagaaacaggaacaaaagaatcagctatttcatgcagtgcaaagattgcaaagagtacaaaaccagctgaaaagcatgcgccaagctgcagcagatgcaaagcctgaaagtttaatgaagaggctagaggaggagataaaatttaatttatatatggtaactgaaaaatttcctaaagaattagaaaataagaaaaaggaattacattttttacaaaaagtagtttcagagccagctatgggccattctgatcttcttgaacttgaatctaaaataaatgaaataaacacagaaattaaccagttgattgaaaagaaaatgatgagaaatgagcccattgaaggcaaactctcactgtataggcaacaggcatctatcatttcccgtaaaaaagaagccaaagctgaggaacttcaggaggccaaggagaagttagccagcctagagagagaagcatcagtaaagagaaatcagacccgtgaatttgatggtactgaagttttaaagggagatgagttcaaacgatatgtcaataaacttcgaagcaagagtacagttttcaaaaagaagcatcagataatagctgaacttaaagctgaattcggtcttttgcagaggactgaagaacttcttaagcaacgtcatgaaaatattcaacaacaactgcaaactatggaggagaaaaagggtatatctggatatagttacacccaagaagagctagaaagagtatctgcactgaagagtgaagttgatgaaatgaaaggacgaacattggatgatatgtctgaaatggtgaaaaaactgtattcattggtatctgaaaagaagtcagctcttgcctcagttataaaagagctacgacagttgcgtcaaaaatatcaagaactgacccaggagtgtgatgaaaagaaatcccagtatgatagctgtgcagcaggcctcgaaagcaatcggtccaaattagaacaggaagttagaagactccgtgaagaatgtcttcaagaagaaagtagataccattatacaaattgtatgattaagaacctagaagttcaacttcgtcgtgctactgatgagatgaaggcatatatctcttctgatcaacaagaaaaaagaaaggcaattagggaacagtataccaaaaatactgctgaacaagaaaaccttggaaagaaacttcgggaaaaacaaaaagttatacgagaaagtcatggtccaaatatgaaacaagcaaaaatgtggcgtgatttggaacaattaatggaatgtaagaaacagtgctttctgaaacaacaaagccaaacttccattggtcaggtaattcaggagggtggggaggaccggctaatactgtgaattcttgtgtcatcgtttggggttttacttgataccactagctataagcctaatctcataatgtatttcttttttgaaactgatttgtatagcattttgttttcagaagagccattctttattaagttttcatagaaaataatgttaaggtagatttagtttgaatgttttttcatatgaaaaagaggcttttattcttttccatagtttagacatcactggcgtcttctgagttttatgagacaggaaactaagtttactatctgtaaatgtaaacatatgtccattaagaaacatgtagtttttttttagaatgtaataacccagtggcttactgtttttcttaatctcttttaaaaaaactttagaagaatcttttaggaactaatatctcttgttctgaagaaacatttatctgacgttcagcagttcctacagttttacttcagtttatttttcttctgtaaaatgcaagaaaatttaatattttgactaacatgtcttttctgtttgtatcatttaaaggcaaataaacttggtacgtatttcatatctatttaaaaaatgtaaaaaaaaaaaaa

SEQ ID NO: 3671 - DNA, 2781 bp, Homo Sapiens
  NM_014056
gattggctgggacggctgtgggtggggagaagccgggaggactgggtgcgcctgcagggatcggaagccggttggggtgtgagaggttttctcgctctagggagattcttcaagcaatcactatgtcaacagacacaggtgtttcccttccttcatatgaggaagatcagggatcaaaactcattcgaaaagctaaagaggcaccattcgtacccgttggaatagcgggttttgcagcaattgttgcatatggattatataaactgaagagcaggggaaatactaaaatgtccattcatctgatccacatgcgtgtggcagcccaaggctttgttgtaggagcaatgactgttggtatgggctattccatgtatcgggaattctgggcaaaacctaagccttagaagaagagatgctgtcttggtcttgttggaggagcttgctttagttagatgtcttattattaaagttacctattattgttggaaataaactaatttgtatgggtttagatggtaacatggcattttgaatattggcttcctttcttgcaggcttgatttgcttggtgaccgaattactagtgactagtttactaactaggtcattcaaggaagtcaagttaacttaaacatgtcacctaaatgcacttgatggtgttgaaatgtccaccttcttaaatttttaagatgaacttagttctaaagaagataacaggccaatcctgaaggtactccctgtttgctgcagaatgtcagatattttggatgttgcataagagtcctatttgccccagttaattcaacttttgtctgcctgttttgtggactggctggctctgttagaactctgtccaaaaagtgcatggaatataacttgtaaagcttcccacaattgacaatatatatgcatgtgtttaaaccaaatccagaaagcttaaacaatagagctgcataatagtatttattaaagaatcacaactgtaaacatgagaataatttaaggattctagtttagttttttgtaattgcaaattatatttttgctgctgatatattagaataatttttaaatgtcatcttgaaatagaaatatgtattttaagcactcacgcaaaggtaaatgaacacgttttaaatgtgtgtgttgctaattttttccataagaattgtaaacattgaactgaacaaattacctataatggatttggttaatgacttatgagcaagctggtttggccagacagtatacccaaacttttatataatatacagaaggctatcacacttgtgaaattctcttgtctaatctgaatttgcattccatggtgttaacatggtatatgtattgttattaaagtaagtgacccatgtcaaatgtcttttatttatttcatgaggaaaagctttctgtagaggaacaaatttgagaacaagtttcaggaaattgtcttttttgttgttgttctctaatcatgttctcctttctgtttcaacgattttaaaaatattttactttatggtatgttttattttttttccttttgtgggtaatttttgttctattgattatccatataaattttttttttttttttttgagacggagttattctctgtcatcttggctggcgtgcagtggcacgatcttggctcactgcaacttccatcccccaggttcaagtgattctcttgcctcagcctcctgagtagctgtgattacaggcatgcaccaacatgcctggctaatttttgtatatttagtagagacgaggtttcaccatgttggccaggctgatcttgaattcctgacctcaggttatccacctgcctcggcctcccaaagtgctaggattacaggcgtgagccaccacgcccagctgattatccatataattataacactcttctatttattttcagtcaccaataattccttttgagcaatatttaagcctagcatatttcttccttccctcctcctctactaaccagttctggtcgatatattattggattttactcttatactgtttgtttgtttgtttgtttgtttattttgagacagagtcttgctctgttgctgaggctggagtacagtggtgtgatctgagctcacggcaccctccacctcctagcttcgtgcgattctgatgcttcaaccttccgagtagctgggattacaggcatgcgccaccatgtcgggctaatttttgtgtttttagtaaaggcgaggtttcaccatgttggatgatcttgaactcctggcttcaagagatctatctgcctcagcctcccaaagtgctgggattacaagcataatccaccacacctgacctacttttgtatgttaaatgtgattatacttctctttgacttgtcagcttagctttagctgatacactctggtgcccaactattattgtatcagtgaacttccactttcttttccttttctctcaatttttgttgtatcattcctaccttgtgaggacatataatatttacattctgttgtcatcctcacatttcttagttccacagtttaaatgtatttgaaactcaaaacattcccattaatctcttggtcagctgaaattaatgatttaatagtttccttaaaaaagactcatggaacaatttccctaaatttttgccatgtcaaatatgtttatctgtagcctttacacagtaaaaacaatttggctagataatacaattctcagttcatatttttctttggaatattaaagtattgctatagagaaaaaaaaaaaaaaaa

SEQ ID NO: 3672 - DNA, 1475 bp, Homo Sapiens
  NM_014061
gcgtggcaggagaggcggggccaattttgctgagctttctcgcgggcttgcagctgcggcaagtgctggcggcggctgctcgcgcaagtcagctggcgtgggaactaccctttgtagctgagaacggcttgtttattgctacaaagactctattgacattggtagcttcagcggcagcagcttcttacggtataaagctgttgcttcctgaagaggctacaagcatccttccctaggactgctgtaagctttgagcctctagcaggagacatgcctcggggacgaaagagtcggcgccgccgtaatgcgagagccgcagaagagaaccgcaacaatcgcaaaatccaggcctcagaggcctccgagacccctatggccgcctctgtggtagcgagcacccccgaagacgacctgagcggccccgaggaagacccgagcactccagaggaggcctctaccacccctgaagaagcctcgagcactgcccaagcacaaaagccttcagtgccccggagcaattttcagggcaccaagaaaagtctcctgatgtctatattagcgctcatcttcatcatgggcaacagcgccaaggaagctctggtctggaaagtgctggggaagttaggaatgcagcctggacgtcagcacagcatctttggagatccgaagaagatcgtcacagaagagtttgtgcgcagagggtacctgatttataaaccggtgccccgtagcagtccggtggagtatgagttcttctgggggccccgagcacacgtggaatcgagcaaactgaaagtcatgcattttgtggcaagggttcgtaaccgatgctctaaagactggccttgtaattatgactgggattcggacgatgatgcagaggttgaggctatcctcaattcaggtgctaggggttattccgccccttaagtagatctgaggcagacccttgggggtgtaaaagagagtcacaggtaccccaaggagtagatgccagggtcctaagttgaaaatgatgtcgattgggggcgggggacactgtatttgatatttgtgatcagtgatcattgttcaactgcgaaatagagtgtttgcttttgataatggaaaattgtattcgttttaaaattccgtttgttgagaataacaatatgtttaaaaatataattgaacaaatttttttctttgtttcctgtcattgacatttagtataacagttttgctaacgttctaaaatgaagtcgttccatcataatctatgatcttgtacagcacttatagaaataagctgttcttttgaagttgaaatacccagtaaaatgttgaagaaggatggaggatttcttcatatctgacgtttctgaaaccctttgtgtctgctgttgtgtgaagattgacatttaccatgattttccttagttactgcagaacatagagaaaaataaaagcctaacgaatagtaaaaaaaaaaaaaa

SEQ ID NO: 3673 - DNA, 1733 bp, Homo Sapiens
  NM_014062
ctctcacgcagccaacatggctccagtggagcacgttgtggcggatgctggggctttcctgcggcatgcggctctgcaggacatcgggaagaacatttacaccatccgggaggtggtcactgagattcgggacaaggccacacgcaggcggctcgctgtcctgccctacgagctgcggttcaaggagcccttaccggaatacgtgcggctggtgactgagttttcaaagaaaacaggagactaccccagcctctctgccacggacatccaagtgcttgcactcacataccagttggaagcagagtttgttggggtgtctcacctaaaacaagaaccacagaaggttaaggtgagctcatcgattcagcacccagaaacacctctgcacatttctggtttccatctgccctacaagcctaaacccccacaagaaacagaaaaaggacactcagcttgtgagcctgagaacctggaatttagttccttcatgttctggagaaaccctttgcccaacatcgatcatgaactgcaggagctgctgattgacagaggtgaggacgttccaagtgaggaggaggaggaggaagaaaacgggtttgaagacagaaaagatgacagcgatgacgacgggggtggctggataacccccagtaacatcaagcagatccagcaggagctggagcagtgtgacgtccccgaggacgtgcgggttggctgcctgaccacagacttcgccatgcagaatgttctgctgcagatggggctgcacgtgctggcggtgaacggcatgctgattcgtgaggcccggagctacatcttgcgctgccatggctgtttcaagacaacgtctgacatgagccgagtgttctgctcacactgtgggaacaagaccctgaagaaagtgtccgtgaccgtcagcgacgacggcaccctgcacatgcacttctcccgcaaccccaaggtgctgaacccccgcggcctccggtactcgcttcccactcccaaagggggcaaatacgccatcaacccccatctcaccgaggatcagcgcttccctcagctgcgactctcccaaaaggccaggcagaaaaccaacgtgttcgcccctgactacatcgccggggtgtcaccctttgtcgagaatgacatctccagccgctcagctaccctgcaggtccgggacagcaccttgggagctgggcggagacgcttaaatcccaacgcttccagaaagaagtttgtgaagaaaaggtgaagagcgagttcccgcaggcaaattggatgggcgtctggccgccgtggagttccggtgacccatttccccagccgtgtcgtctccaggaccacccgatggaaataacaggcgggcttcacggtgcggctctgtccgcccatgccccgctgggtctgcagggaactggactgtcccatggcctgtgagcaccggagcgcctggctgcctgccaaggaagtgcaattgcataaaaacagaaagaacaacgccctggagccaatcttcaagaaaggaatttccaaaggataatatttttctaataaatgcggctgcaacctcctgtgcatttaattaaataggccaaatttttgctgcttaggtcatctcaaggctgatacttgagctgtgtgcccagagatcatgcatttagatttatatttttgccagaaaatacaaggttataataaaactaagaactaccaaaaaaaaaaaaaaaaaa

SEQ ID NO: 3674 - DNA, 2213 bp, Homo Sapiens
  NM_014063
gtttccggttgtcggaggcgaggcttgtcggctgtcaaaggggcggcccggcccggcccggaagctacagcagcggcgcggagactgcggggcgggccatggcggcgaacctgagccggaacgggccagcgctgcaagaggcctacgtgcgggtggtcaccgagaagtccccgaccgactgggctctctttacctatgaaggcaacagcaatgacatccgcgtggctggcacaggggagggtggcctggaggagatggtggaggagctcaacagcgggaaggtgatgtacgccttctgcagagtgaaggaccccaactctggactgcccaaatttgtcctcatcaactggacaggcgagggcgtgaacgatgtgcggaagggagcctgtgccagccacgtcagcaccatggccagcttcctgaagggggcccatgtgaccatcaacgcacgggccgaggaggatgtggagcctgagtgcatcatggagaaggtggccaaggcttcaggtgccaactacagctttcacaaggagagtggccgcttccaggacgtgggaccccaggccccagtgggctctgtgtaccagaagaccaatgccgtgtctgagattaaaagggttggtaaagacagcttctgggccaaagcagagaaggaggaggagaaccgtcggctggaggaaaagcggcgggccgaggaggcacagcggcagctggagcaggagcgccgggagcgtgagctgcgtgaggctgcacgccgggagcagcgctatcaggagcagggtggcgaggccagcccccagagcaggacgtgggagcagcagcaagaagtggtttcaaggaaccgaaatgagcaggagtctgccgtgcacccgagggagattttcaagcagaaggagagggccatgtccaccacctccatctccagtcctcagcctggcaagctgaggagccccttcctgcagaagcagctcacccaaccagagacccactttggcagagagccagctgctgccatctcaaggcccagggcagatctccctgctgaggagccggcgcccagcactcctccatgtctggtgcaggcagaagaggaggctgtgtatgaggaacctccagagcaggagaccttctacgagcagcccccactggtgcagcagcaaggtgctggctctgagcacattgaccaccacattcagggccaggggctcagtgggcaagggctctgtgcccgtgccctgtacgactaccaggcagccgacgacacagagatctcctttgaccccgagaacctcatcacgggcatcgaggtgatcgacgaaggctggtggcgtggctatgggccggatggccattttggcatgttccctgccaactacgtggagctcattgagtgaggctgagggcacatcttgcccttcccctctcagacatggcttccttattgctggaagaggaggcctgggagttgacattcagcactcttccaggaataggacccccagtgaggatgaggcctcagggctccctccggcttggcagactcagcctgtcaccccaaatgcagcaatggcctggtgattcccacacatccttcctgcatcccccgaccctcccagacagcttggctcttgcccctgacaggatactgagccaagccctgcctgtggccaagccctgagtggccactgccaagctgcggggaagggtcctgagcaggggcatctgggaggctctggctgccttctgcatttatttgccttttttctttttctcttgcttctaaggggtggtggccaccactgtttagaatgacccttgggaacagtgaacgtagagaattgtttttagcagagtttgtgaccaaagtcagagtggatcatggtggtttggcagcagggaatttgtcttgttggagcctgctctgtgctccccactccatttctctgtccctctgcctgggctatgggaagtggggatgcagatggccaagctcccaccctgggtattcaaaaacggcagacacaacatgttcctccacgcggctcactcgatgcctgcaggccccagtgtgtgcctcaactgattctgacttcaggaaaagtaacacagagtggccttggcctgttgtcttcccctattttctgtcccagctcatccgtgtctctgaagaacaaatatgcttttggaccacgaaaaaaaaaaaaaaaaaaaaa

SEQ ID NO: 3675 - DNA, 1007 bp, Homo Sapiens
  NM_014064
caaaggcagcgcgcgccgcgagctgtcgcgtctggtcgtggtctggcggagctgcggttggcttgtggcgtctccgccgccgccgccctcccttcctcttccccatcttcttctctcggtcccgggagcccccgcccggagagagtcgcggttgctgatcgtggtgcttgagtagagccgtggttggtgacagcatgacgagcgaggtgatagaagacgagaagcaattctattccaaggccaagacctactggaaacaaatcccacccacggtggacggcatgcttggggggtatggccacatctccagcatcgacatcaacagctcccggaagtttctgcagaggtttttgagggaaggcccgaacaagacaggaacgtcctgtgccctggactgtggagctggcattgggaggatcaccaagcggctgctcctgccgctgttcagagaggtggatatggtcgacataacggaggacttcctggttcaagccaagacctacctgggggaggagggcaagagggtgaggaactacttctgttgtgggctccaggacttcaccccggagccggactcttacgacgtgatctggatccagtgggtgataggccacctcaccgatcagcacctggccgagttcctgcggcgctgcaagggcagcctccgccccaacggcatcatcgtcatcaaagacaacatggcccaggagggcgtgattctggacgacgtggacagcagcgtgtgccgggaccttgacgtggtccgcaggatcatctgcagtgcaggcctcagcctcctggccgaggagaggcaggagaacctccccgatgagatctaccatgtctatagctttgccctgagatgagccggggctggcaggagaaactgaggaaccacagtcctggtggggggagctggcagctgggcaagatccaggcgccacgctggcggttcgtgagtgtcgaggcaccactaaatatagctgtctgccgtccactcataaaaa

SEQ ID NO: 3676 - DNA, 2662 bp, Homo Sapiens
  NM_014065
aagtaggcggagaaagcagaggaggaccggcgggccaagctttcctagcctgacagcagccatttcggaacgtacgtcccagccctctttagctacttagcgcctctgggcccgagaacacctgctccttggctcagtctggcgccaccggcatcacggaactgtacttcccagagacgtcacaccgggagacttccgattcccgctcttgagattggactctcacgtgcaggagccagtcctcgctgggctctagcgggcttctgatggaggagctactcctctgggaggacagaaattagcagcagcctctgtcaccatccaaagattacaacccatgaaaccattgaatttgtgccttgtatcagaaagcaaaggagaatgaaaaagcacagctaacattgcttgaggatctaggcgattaattctttagactgtcatcatgggtatccgaggactaatgagttttgtggaagatcatagtaatgaattcttcactgatttgaagttgcgggacacaaaaattgtcattgatggttatgctcttttccaccgtctttgcttcagttcaaacttggatctccggtatggaggggactatgattcttttgcagatgttgtacaaaaattctttgaatcactgtttgcttgtaatatatgcccatatgttgtattagatggaggatgtgacatttcagataaaaagcttacaactttaaaggatagagctagagagaagatccagatggcccattccctttctgttggtgggagtgggtacgtatgtcccttactcatccgggaagtattcatacaggttttgatcaagctgcgggtgtgttttgtccagtgcttttcagaagcagatcgggacattatgacacttgctaaccattggaattgccctgtgttatcatcagatagtgacttttgcatttttgacctgaaaactgggttttgcccattgaatagctttcagtggagaaatatgaacactattaagggcacacaaaactatatccctgccaaatgcttttcccttgatgcattctgccatcacttcagcaatatgaataaagctctactacctctctttgcggtgctatgtggaaatgaccatgttaatctacccatcatggagacattcttaagtaaagcgcgtcttcctcttggagctaccagttctaaagggaggagacaccaccgaatcctgggacttctgaattggttgtctcattttgccaaccctaccgaagcactagataatgttctgaaatacctcccaaaaaaggatcgagaaaatgttaaggaacttctctgctgttccatggaagaataccaacagtcccaggtgaagctacaggacttcttccagtgtggtacttatgtctgtccagatgccttgaatcttggtttaccagaatgggtattagtggctttagctaaaggccagctatctcctttcatcagtgatgctttggtcctaagacggaccattcttcccacacaggtggaaaacatgcagcaaccaaatgcccacagaatatctcagcccatcaggcaaatcatctatgggcttcttttaaatgcctcaccacatctggacaagacatcctggaatgcattgcctcctcagcctctagctttcagtgaagtggaaaggattaataaaaatatcagaacctcaatcattgatgcagtagaactggccaaggatcattctgacttaagcagattgactgagctctccttgaggaggcggcagatgcttctgttagaaaccctgaaggtgaaacagaccattctggagccaatccctacttcactgaagttgcccattgctgtcagttgctactggttgcagcacaccgagaccaaagcaaagctacatcatctacaatccttactgctcacaatgctagtggggcccttgattgccataatcaacagccctggtaaggaagagctgcaggaagatggtgctaagatgttgtatgcagagttccaaagagtgaaggcgcagacacggctgggcacaagactggacttagacacagctcacatcttctgtcagtggcagtcctgtctccagatggggatgtatctcaaccagctgctgtccactcctctcccagagccagacctaactcgactgtacagtggaagcctggtgcacggactatgccagcaactgctagcatcgacctctgtagaaagtctcctgagcatatgtcctgaggctaagcaactttatgaatatctattcaatgccacaaggtcatatgcccccgctgaaatattcctaccaaaaggtagatcaaattcaaaaaaaaaaaggcagaagaaacagaataccagctgttctaagaacagagggagaaccactgcacacaccaagtgttggtatgagggaaacaaccggtttgggttgttaatggttgaaaacttagaggaacatagtgaggcctccaacattgaataaaactcagtttgcatcaaactagatgtatttaatataatccttacttaaaattcttccgttaccacccttgaaacaattagctttttctttaggactgacctgttaggggataaacatcacaataatctgaattccaagttattttgtattttgtttttaataaatacaacctgatttaag

SEQ ID NO: 3677 - DNA, 913 bp, Homo Sapiens
  NM_014068
ggtgtcccagaaacccaggaaatcgagactcatgactcccagagaggatggcatctagaagtagacgatcaagggtggaatctacagtccgtgggccctgacttcttgccttcgtctcaaatagactctgcagccagccatctatgcagcgccccagtggctttgaaatgcaacagaaaccatcacccccggaccgtgggctccatgccagtgggcaaagcacagcctgggaagaattggtttgcagccaggcagtcctccatccagtcttgactttggcacttgtgatatgacttgcacagaccaaaaaagtcactctcaaagagctctcggcacacagaccccagctttacaaggaccccagctccttaacacagatcccagctccgaggaaactcgtcccccccacgttaatcctgaccgactttgccacatggagccagcaaaccatttctggcatgcaggggacctccaagcaatgatatccaaggaattccatctggcagccacccaggatgactgcagaaaaggaaggacacaggaggatatcctggttccctcttcccacccagagctgtttgcatcagtcctgccaatggctccggaagaagctgccaggctccagcaacctcagccccttcctcctccctcaggaatccacctatccgcctctaggaccttggctccaactctattgtactcgtctcctccctcccattctccttttggtctcagctccttgatctaagcctcccagagagacccctagaacgtttccctcaaggacctttctgcctggaagtctgttagcctttcagaagtaacatgtccaaaataaaatttgattcctcccaggttgttccctgcctggtccgctaccccacagtaaggaacaccttattatgcaaaaaaa

SEQ ID NO: 3678 - DNA, 4335 bp, Homo Sapiens
  NM_014089
acgtaccagggctcattgcgtgacggttacacttccggcgggctacgtgcgcgcggcgagcgccgggcgtacttttgcgtggttgctccaccccctcagccttgccttcgccgccgttggggctggaagttcccgccaggtccgtgccgggcgagagagatgctgcccggcccgcctcggctttgaggcgagagaagtgtcccagacccatttcgccttgctgacggcgtcgagccctggccagacatgtccacagggttctccttcgggtccgggactctgggctccaccaccgtggccgccggcgggaccagcacaggcggcgttttctccttcggaacgggagcgtctagcaacccttctgtggggctcaattttggaaatcttggaagtacttcaactccagcaactacatctgctccttcaagtggttttggaaccgggctctttggatctaaacctgccactgggttcactctaggaggaacaaatacaggaatagcaacaactataactacaggattaactctgggaacgccagccactacatctgcagctacaacaggcttcagtttaggattcaataaacctgcagcatctgccacaccatttgctctacctattacctctacctcagctagcggtctgactctttcgtctgctctgacatcaactccagcagcatccacaggatttactctaaataatttgggtgggacaacagccacaactacaactgcatcaacaggcctctctttagggggagccttagctggtttgggaggttcacttttccagagtacaaacacaggaacatcaggacttggacagaatgctttagggttgactttgggaactacagcagctacttcaactgcaggcaatgaaggccttggtggtatagatttcagtagctcctcagataaaaagagtgataaaacgggaacaagaccagaggatagtaaagctctgaaggatgaaaatctacctcctgtcatctgccaggatgttgaaaatctccagaaatttgtgaaggagcagaaacaagttcaagaagaaattagtagaatgtcttcaaaagcaatgcttaaggtacaagaagatattaaagctctgaagcagctcctgtcgttggctgccaatggaatacagagaaacactctcaacattgacaaattgaaaatagaaactgctcaggagttgaagaatgctgaaatagctttaagaacccagaagacaccacctggacttcaacatgaatatgcagctcctgctgactacttcagaatcttggttcagcaatttgaggtacagcttcagcagtacaggcagcagattgaagaactagaaaaccatcttgccactcaagcaaataattcacatataacccctcaagatttgtcaatggctatgcagaaaatttatcaaacatttgtagctttagcggcacaacttcagtctattcatgaaaatgtaaaggttctgaaagaacagtaccttggctacaggaaaatgttcttgggagatgctgttgatgtgtttgaaacaaggcgagcagaagccaagaagtggcagaacacacccagagttactactggacccactcctttcagcaccatgccaaacgcagcagccgttgccatggctgcaacacttacacagcagcaacagcctgctacagggccacagccatctctgggagttagttttggaacgccattcggctcaggtattggcactggcttgcaatcaagtggcttaggttcttcaaaccttggaggatttggaactagctctggttttggatgcagcaccacaggggcctccacatttggatttggaacaacaaataaaccctcaggaagtcttagtgcaggctttggcagctcaagtacatctgggtttaacttcagcaatcctggcatcacggcatcagctggtttgacttttggggtgtccaatcctgcctctgcaggttttggaacaggaggacaactccttcagttgaagaaacctccagctggaaacaaaagaggaaaaagataaacatgggttgatgtgttgagagaatccatagcagcaccgttcattctatgagtctatttttctaatgatgcagtaattaaattgcatcccaggagatttataaagttttgatatttttccctactctggaatttgaactttcttcatgtttgccatactgaacatcttttttcttgtggaatttaaagtccagctgtgttttctttttaatttgattctcagtgtaagaaatgttctgattacatcactgattggtaatggttagaaaccattaacctaaaacttactatttaacctagtgtttttgttgatgaggtttacattatgtgaatacatgcacatttgtttcttatacaggtggtgtgaactctagggcctatactagaatcaatttgttccttgttaaaggccttttgaattatactgcagggcatcttgtgaatatgtatgtaaatatatacagaataatacacacagttgtgtgtgcatataaaatacatatttacgccaggcgtggtggctcacgcctgtaatcccagcactttgggaggccgaggcaggcggatcacctgaggtcaggagtttgagaccagcctgacatggtgaaaccccatctctacgaaaaatacaaaaattagctgggcatagtggcgggtacctataatcccagctactcgggaggctgaggcacgagaatcacttgaagccgggaggtgggggttgcagtgagccgagatcacaccactgcactccagcctgggcaacaagagcaaaactccgtctcaaaaaagatgaaaataaaataaaatatatatttacaggcctacaacttttgcctcagactgttccccttttctaagggtattcaagttttcaccttttaagcttcatatcctcagtgcttgtagaatgatgagcttagaggtaccaggtcattgcagttgtttgcttaaagacttattgaaatggttactggcgtaaatacttggccaactcaactttattgcccctgatcttttccatttttgtttccaccttaacctatagcagctcctccaaatgaggaatgctgtaagtaagactcatcaaacagattttaaccattttattatcctgtgtgtccttacattgcttctgtgagatgtttttttcttatctgagatgaactttcaggagcctatttgaactccagactggtgttctggggcaaagagctattagccaaactgattctatgcaggtgaaggatgcactaaagttctcactttagtgagaacttttctagctattccaatacagagttctttcttatagggctattgatattgacaccaaatggagtggcttctcagcctcttaatgtcttaagtaagtgcttaatttggaatagagaaaccagtatattttaaaaaagaaaaatattctttgtagcaactgtaaattctcccattataacagtgaacagagctccaggtaataacgcataggcatgtcaggttgcatctgtatatttgactacattagtattagtgacatcaggtggatataaaagaaaacccttggaaagagaactgccttagccatgatttcgttagtagacctatttatgattcaattgcaattttcagataggatgtgaacatggaatttcattgaaaatagtttaattttttatataaaaggttttgtatataatgtgtgtcagtgactattttcaaaatcattttcatcaagacaccttttttctaaaataggcattgcatacacatatgcacacgtatgtgcatgtgccacacattttttgtataatgttgggtttgattataaaagtgttgtcaaatgttttatttatctgcatatagcagtggttggcttttttgaattgaaatttttgcgcattgatgcattgaaataaggaaaattatttatctctgagcactaaacttatttttgcatatttctgtaatattgcagtccccagatccagaacatgggaagttagggaaaatgtgtgattttgtgttttgaattactgtcagaattacatacacaattacaacaaactttttttaaaagacatttcattgtactgcaaaaatctgaatatttatatttcttgtttttttctttatatgttttgcattttaatatgttgagccactggaaatttgtaacagattaatttgttataggagtttaaatgtgttgtcattgtctccattgtctttgtccagagcctattattatggaaacaataaaatttattgtgtcagttgctttgattcttta

SEQ ID NO: 3679 - DNA, 5580 bp, Homo Sapiens
  NM_014109
cgcggagcttgtggcgccagaattcggagcgcggaagagccagagctgcgagcgcctggagctggatctctctccggtcgcgcacgccgaggccagtagggagagaagatggtggttctccgcagcagcttggagctgcacaaccactccgcggcctcggccacgggctccttggacctgtccagtgacttcctcagtctggagcacatcggccggaggcggctccgctcggccggcgcggcgcagaagaaacccgcggcgaccacagccaaagcgggcgatgggtcatcagttaaggaagttgaaacctaccaccggacacgtgctttaagatctttgagaaaagatgcacagaattcttcagattctagttttgagaagaatgtggaaataacggagcaacttgctaatggcaggcattttacaaggcagttggccagacagcaggctgataaaaaaaaagaagagcacagagaagacaaagtgattccagttactcggtcattgagggctagaaacatcgttcaaagtacagaacacttacatgaagataatggtgatgttgaagtgcgtcgaagttgtaggattagaagtcgttatagtggtgtaaaccagtccatgctgtttgacaaacttataactaacactgctgaagctgtacttcaaaaaatggatgacatgaagaagatgcgtagacagcgaatgagagaacttgaagacttgggagtgtttaatgaaacagaagaaagcaatcttaatatgtacacaagaggaaaacagaaagatattcaaagaactgatgaagaaacaactgataatcaagaaggcagtgtggagtcatctgaagagggtgaagaccaagaacatgaagatgatggtgaagatgaagatgatgaagatgatgatgatgatgacgatgatgatgatgatgatgatgatgaagatgatgaagatgaagaagatggagaagaagagaatcagaagcgatattatcttagacagagaaaagctactgtttactatcaggctccattggaaaaacctcgtcaccagagaaagcccaacatattttatagtggcccagcttctcctgcaagaccaagataccgattatcttccgcaggaccaagaagtccttactgtaaacgaatgaacaggcgaaggcatgcaatccacagtagtgactcgacttcatcttcctcctctgaagatgaacagcactttgagaggcggaggaaaaggagtcgtaatagggctatcaataggtgcctcccactaaattttcggaaagatgaattaaaaggcatttataaagatcgaatgaaaattggagcaagccttgccgatgttgatccaatgcaactagattcttcagtacgatttgatagtgttggtggcctgtctaatcatatagcagctctaaaagagatggtggtgtttccattactttatccagaagtctttgaaaaatttaaaattcaacccccaagaggttgtttgttttatgggccacctggaactggaaagactctggttgccagagcacttgccaatgagtgcagtcaaggggataaaagagtagcatttttcatgaggaaaggtgctgattgtctaagtaaatgggtaggagaatctgaaagacagctacgattgctgtttgatcaggcctatcagatgcgcccatcaattattttttttgacgaaattgatggtctggctccagtacggtcaagcaggcaagatcagattcacagttctattgtttccaccctgctagctcttatggatggattggacagcagaggggaaattgtggtcattggtgctacgaacaggctagattctatagatcctgctttacgaaggcctggtcgctttgatagagaattcctctttagcctgcctgataaagaggctcgaaaagagattctaaagattcacaccagggattggaatcccaaaccactggacacatttttagaagagctagcagaaaactgtgttggatactgtggagcagatattaaatcaatatgtgctgaagctgctttatgtgctttacgacgacgctacccacagatctataccactagtgagaaactgcagttggatctctcttcaattaatatctcagctaaggatttcgaggtagctatgcaaaagatgataccagcctcccaaagagctgtgacatcacctgggcaggcactgtccaccgttgtgaaaccactcctgcaaaacactgttgacaagattttagaagccctgcagagagtatttccacatgcagaattcagaacaaataaaacattagactcagatatttcttgtcctctgctagaaagtgacttggcttacagtgatgatgatgttccatcagtttatgaaaatggactttctcagaaatcttctcataaggcaaaagacaattttaattttcttcatttgaatagaaatgcttgttaccaacctatgtcttttcgaccaagaatattgatagtaggagaaccaggatttgggcaaggttctcacttggcaccagctgtcattcatgctttggaaaagtttactgtatatacattagacattcctgttctttttggagttagtactacatcccctgaagaaacatgtgcccaggtgattcgtgaagctaagagaacagcaccaagtatagtgtatgttcctcatatccacgtgtggtgggaaatagttggaccgacacttaaagccacatttaccacattattacagaatattccttcatttgctccagttttactacttgcaacttctgacaaaccccattccgctttgccagaagaggtgcaagaattgtttatccgtgattatggagagatttttaatgtccagttaccggataaagaagaacggacaaaattttttgaagatttaattctaaaacaagctgctaagcctcctatatcaaaaaagaaagcagttttgcaggctttggaggtactcccagtagcaccaccacctgagccaagatcactgacagcagaagaagtgaaacgactagaagaacaagaagaagatacatttagagaactgaggattttcttaagaaatgttacacataggcttgctattgacaagcgattccgagtgtttactaagcctgttgaccctgatgaggttcctgattatgtcactgtaataaagcaaccaatggacctttcatctgtaatcagtaaaattgatctacacaagtatctgactgtgaaagactatttgagagatattgatctaatctgtagtaatgccttagaatacaatccagatagagatcctggagatcgtcttattaggcatagagcctgtgctttaagagatactgcctatgccataattaaagaagaacttgatgaagactttgagcagctctgtgaagaaattcaggaatctagaaagaaaagaggttgtagctcctccaaatatgccccgtcttactaccatgtgatgccaaagcaaaattccactcttgttggtgataaaagatcagacccagagcagaatgaaaagctaaagacaccgagtactcctgtggcttgcagcactcctgctcagttgaagaggaaaattcgcaaaaagtcaaactggtacttaggcaccataaaaaagcgaaggaagatttcacaggcaaaggatgatagccagaatgccatagatcacaaaattgagagtgatacagaggaaactcaagacacaagtgtagatcataatgagaccggaaacacaggagagtcttcggtggaagaaaatgaaaaacagcaaaatgcctctgaaagcaaactggaattgagaaataattcaaatacttgtaatatagagaatgagcttgaagactctaggaagactacagcatgtacagaattgagagacaagattgcttgtaatggagatgcttctagctctcagataatacatatttctgatgaaaatgaaggaaaagaaatgtgtgttctgcgaatgactcgagctagacgttcccaggtagaacagcagcagctcatcactgttgaaaaggctttggcaattctttctcagcctacaccctcacttgttgtggatcatgagcgattaaaaaatcttttgaagactgttgttaaaaaaagtcaaaactacaacatatttcagttggaaaatttgtatgcagtaatcagccaatgtatttatcggcatcgcaaggaccatgataaaacatcacttattcagaaaatggagcaagaggtagaaaacttcagttgttccagatgatgatgtcatggtatcgagtattctttatattcagttcctatttaagtcatttttgtcatgtccgcctaattgatgtagtatgaaaccctgcatctttaaggaaaagattaaaatagtaaaataaaagtatttaaactttcctgatatttatgtacatattaagataaatgtcatgtgtaagataactgataaatattggaactttgctagaacaagaccctgtagtaatagtaataatagttgaagtttggccaactcttaataaagttattttggtaactaatgttttatggcacttaagaataattagcagcgttaaattttgtttgtattaagcacttttaattttatccttcctaaaaatagtttattgtatctgacaagaaacttacttaaccattgtgtccttcccatcttttttgtcatctttgttttcttcaaatgccctcctcccatctgccttgagattccctcgtcttcacttaaaagccagagtgcaagtcatgatttgcgggagggctcttgaaccacttctggctgcaccacaattctgtacttgagtatcacagtcattgtttttgagacaaacatttttataattctaatttgggttaataaagattttaaatatttcttggtttacttttgtaattatatacacaacaaatgtattaataactaccttgttaaacaccttttaatagcacaaggtttttatatttgcaagctgttgatatctttctaaaactgtttaggttatagtctattgatactttttatatacaattttataaatataaatattataattttatattaatggtaccaaaaatacatttcttaaggttaaaagcatgcacttccatgcatacttgcttttggggagagtggggagaagacattctaataatcagtttgtgaaatagcttctgttggaaaccttttgaggggaataaggaatggtcatctaaaatgagagattctggattttaatgcagttcaaagttgagctgtatttttgttgttgatttatctggattttttttaaagccttctaaaacccagtgaattcaataccttaattagtacatactatcttatgtaatgcataaagcaatgccagtcactgagaacatttaaatatatttatattcctggagatacacattctcatttttgttggtttattataaattattcttctagatgcatcttttataactaggatttcattttgtgtgtatagcttatgtaataaattttaaaggtgaaaactctcttaaaaaaaaaaaaaaaaaa

SEQ ID NO: 3680 - DNA, 2377 bp, Homo Sapiens
  NM_014110
gtacgcacaggctgctgggatgccgcttttcccttctcggtcttccagtttcccggcgtgcttagggcgcgccaaatgggagggggagacgcaagatggcggcagccgcgaactccggctctagcctcccgctgttcgactgcccaacctgggcaggtaagccccctcccggtttacatctggatgtagtcaaaggagacaaactaattgagaaactgattattgatgagaagaagtattacttatttgggagaaaccctgatttgtgtgactttaccattgaccaccagtcttgctctcgggtccatgctgcacttgtctaccacaagcatctgaagagagttttcctgatagatctcaacagtacacacggcactttcttgggtcacattcggttggaacctcacaagcctcagcaaattcccatcgattccacggtctcatttggcgcatccacaagggcatacactctgcgcgagaagcctcagacattgccatcggctgtgaaaggagatgagaagatgggtggagaggatgatgaactcaagggcttactggggcttccagaggaggaaactgagcttgataacctgacagagttcaacactgcccacaacaagcggatttctacccttaccattgaggagggaaatctggacattcaaagaccaaagaggaagaggaagaactcacgggtgacattcagtgaggatgatgagatcatcaacccagaggatgtggatccctcagttggtcgattcaggaacatggtgcaaactgcagtggtcccagtcaagaagaagcgtgtggagggccctggctccctgggcctggaggaatcagggagcaggcgcatgcagaactttgccttcagcggaggactctacgggggcctgccccccacacacagtgaagcaggctcccagccacatggcatccatgggacagcactcatcggtggcttgcccatgccatacccaaaccttgcccctgatgtggacttgactcctgttgtgccgtcagcagtgaacatgaaccctgcaccaaaccctgcagtctataaccctgaagctgtaaatgaacccaagaagaagaaatatgcaaaagaggcttggccaggcaagaagcccacaccttccttgctgatttgatatttttggtcatggagaagggtgggattgggtgggaatggggtggaagggtgatggggagctaatgaactagggagaaaaactttccatgtgtgcggtatcgtctttcagaatgtctcctggcatcctaaccatgtaatatgacaattgggggtggggttgaaatagcccataaagacctgtcttcacaacacttgcattgtagagaaaggcttcttatatccttttcaatagactgccctggctctttcctaggccttccactacctcctttctttctcccactttctaggatcatttttatgtaaagtcacatatcccaggccctcaggttgaatccagagctgtagaggttacagtagcatcaccagccttgggggtccagagcctaatttatattcactatccttccaagtcccgggtagcagaagggttgccatagatctcagtttgatcaaaaagaaggcttagaattctgcagttaagctgaggtttaaactaaaaaatgtttccttgggtcagtggttttgaggtccagtagctaggcttttctcttttgtccttcctgttggaatgaaaacatttcgattttccttcatctgtgactggtgccatagacacaggtttatagttttaacttacagtattgtttgaaatttacctgtttttcttgtcaaacctgagcactcctcctgctgaagtttcttatttaattccagagtactgtcctctactctaaggcattacttttaagtgtattatgaaggcagttttcaaaggatatgaccagttggggtaattcaaattaaaaaggaaaagatttgtttggaagtaactggtgtctctaagaggaatttttagatgtcagtttggaggctctttcccccctcaattgagagctcttgttattcagagctccaagactagacctggctaacaaacataggagacaaagttaggaaacattgatacaagctttgtacagagatttgtacatttgtgtaataggccttttcatgctttatgtgtagctttttacctgtaacctttattacattgtaaattaaacgtaacttttgtcatttgggtgcaggctgtgaatttgtctctcagtcactgattgccactgccatctggaaatgtttgctaaaggcacagtcactgggcttgggaggcaatgctccatccccattatattacaaataaagatgccctaaatgagtgtg

SEQ ID NO: 3681 - DNA, 9990 bp, Homo Sapiens
  NM_014112
aatagtgttggtgtcttgaaactgacgtaatgcgcggagactgaggtcctgacaagcgataacatttctgataaagacccgatcttactgcaatctctagcgtcctcttttttggtgctgctggtttctccagacctcgcgtcctctcgattgctctctcgccttcctatttcttttttttttttttaaacaaaaaacaacaccccctcccctctcccacccggcaccgggcacatccttgctctatttcctttctctttctctctctctctctctctctctcttttttaataagggtgggggagggaaaggggggggaggcaggaaagacctttttctctcccccccgcaataatccaagatcaactctgcaaacaacagaagacggttcatggctttggccgccgcgccaccatctttcgggctgccgagggtgttcttgacgattaatcaacagatgtacagatcagctctcaaaatgtcttctgtgtcttctgagcgtcttctaagacaattgcattagcctcctgctagttgactaatagaattaataattgtaaaaagcactctaaagccacatgccttatgaagtcaatgctgggtatgattttacaaatatggtccggaaaaagaacccccctctgagaaacgttgcaagtgaaggcgagggccagatcctggagcctataggtacagaaagcaaggtatctggaaagaacaaagaattttctgcagatcagatgtcagaaaatacggatcagagtgatgctgcagaactaaatcataaggaggaacatagcttgcatgttcaagatccatcttctagcagtaagaaggacttgaaaagcgcagttctgagtgagaaggctggcttcaattatgaaagccccagtaagggaggaaactttccctcctttccgcatgatgaggtgacagacagaaatatgttggctttctcatctccagctgctgggggagtctgtgagcccttgaagtctccgcaaagagcagaggcagatgaccctcaagatatggcctgcaccccctcaggggactcactggagacaaaggaagatcagaagatgtcaccaaaggctacagaggaaacagggcaagcacagagtggtcaagccaattgtcaaggtttgagcccagtttcagtggcctcaaaaaacccacaagtgccttcagatgggggtgtaagactgaataaatccaaaactgacttactggtgaatgacaacccagacccggcacctctgtctccagagcttcaggactttaaatgcaatatctgtggatatggttactacggcaacgaccccacagatctgattaagcacttccgaaagtatcacttaggactgcataaccgcaccaggcaagatgctgagctggacagcaaaatcttggcccttcataacatggtgcagttcagccattccaaagacttccagaaggtcaaccgttctgtgttttctggtgtgctgcaggacatcaattcttcaaggcctgttttactaaatgggacctatgatgtgcaggtgacttcaggtggaacattcattggcattggacggaaaacaccagattgccaagggaacaccaagtatttccgctgtaaattctgcaatttcacttatatgggcaactcatccaccgaattagaacaacattttcttcagactcacccaaacaaaataaaagcttctctcccctcctctgaggttgcaaaaccttcagagaaaaactctaacaagtccatccctgcacttcaatccagtgattctggagacttgggaaaatggcaggacaagataacagtcaaagcaggagatgacactcctgttgggtactcagtgcccataaagcccctcgattcctctagacaaaatggtacagaggccaccagttactactggtgtaaattttgtagtttcagctgtgagtcatctagctcacttaaactgctagaacattatggcaagcagcacggagcagtgcagtcaggcggccttaatccagagttaaatgataagctttccaggggctctgtcattaatcagaatgatctagccaaaagttcagaaggagagacaatgaccaagacagacaagagctcgagtggggctaaaaagaaggacttctccagcaagggagccgaggataatatggtaacgagctataattgtcagttctgtgacttccgatattccaaaagccatggccctgatgtaattgtagtggggccacttctccgtcattatcaacagctccataacattcacaagtgtaccattaaacactgtccattctgtcccagaggactttgcagcccagaaaagcaccttggagaaattacttatccgtttgcttgtagaaaaagtaattgttcccactgtgcactcttgcttctgcacttgtctcctggggcggctggaagctcgcgagtcaaacatcagtgccatcagtgttcattcaccacccctgacgtagatgtactcctctttcactatgaaagtgtgcatgagtcccaagcatcggatgtcaaacaagaagcaaatcacctgcaaggatcggatgggcagcagtctgtcaaggaaagcaaagaacactcatgtaccaaatgtgattttattacccaagtggaagaagagatttcccgacactacaggagagcacacagctgctacaaatgccgtcagtgcagttttacagctgccgatactcagtcactactggagcacttcaacactgttcactgccaggaacaggacatcactacagccaacggcgaagaggacggtcatgccatatccaccatcaaagaggagcccaaaattgacttcagggtctacaatctgctaactccagactctaaaatgggagagccagtttctgagagtgtggtgaagagagagaagctggaagagaaggacgggctcaaagagaaagtttggaccgagagttccagtgatgaccttcgcaatgtgacttggagaggggcagacatcctgcgggggagtccgtcatacacccaagcaagcctggggctgctgacgcctgtgtctggcacccaagagcagacaaagactctaagggatagtcccaatgtggaggccgcccatctggcgcgacctatttatggcttggctgtggaaaccaagggattcctgcagggggcgccagctggcggagagaagtctggggccctcccccagcagtatcctgcatcgggagaaaacaagtccaaggatgaatcccagtccctgttacggaggcgtagaggctccggtgttttttgtgccaattgcctgaccacaaagacctctctctggcgaaagaatgcaaatggcggatatgtatgcaacgcgtgtggcctctaccagaagcttcactcgactcccaggcctttaaacatcattaaacaaaacaacggtgagcagattattaggaggagaacaagaaagcgccttaacccagaggcacttcaggctgagcagctcaacaaacagcagaggggcagcaatgaggagcaagtcaatggaagcccgttagagaggaggtcagaagatcatctaactgaaagtcaccagagagaaattccactccccagcctaagtaaatacgaagcccagggttcattgactaaaagccattctgctcagcagccagtcctggtcagccaaactctggatattcacaaaaggatgcaacctttgcacattcagataaaaagtcctcaggaaagtactggagatccaggaaatagttcatccgtatctgaagggaaaggaagttctgagagaggcagtcctatagaaaagtacatgagacctgcgaaacacccaaattattcaccaccaggcagccctattgaaaagtaccagtacccactttttggacttccctttgtacataatgacttccagagtgaagctgattggctgcggttctggagtaaatataagctctccgttcctgggaatccgcactacttgagtcacgtgcctggcctaccaaatccttgccaaaactatgtgccttatcccaccttcaatctgcctcctcatttttcagctgttggatcagacaatgacattcctctagatttggcgatcaagcattccagacctgggccaactgcaaacggtgcctccaaggagaaaacgaaggcaccaccaaatgtaaaaaatgaaggtcccttgaatgtagtaaaaacagagaaagttgatagaagtactcaagatgaactttcaacaaaatgtgtgcactgtggcattgtctttctggatgaagtgatgtatgctttgcatatgagttgccatggtgacagtggacctttccagtgcagcatatgccagcatctttgcacggacaaatatgacttcacaacacatatccagaggggcctgcataggaacaatgcacaagtggaaaaaaatggaaaacctaaagagtaaaaccttagcacttagcacaattaaatagaaataggttttcttgatgggaattcaatagcttgtaatgtcttatgaagacctattaaaaaaatacttcatagagcctgccttatccaacatgaaattcccttcttttgttattctttcttttgatgagtaggttaccaagattaaaaagtgagataaatggtcaatgagaaagaatggaagatggtaaacaatcactttttaaaacctgttaagtcaaaaccatcttggctaatatgtactggggaaataatccataagagatatcaccagactagaattaatatatttataaagaaagagaccaaaactgtctagaatttgaaagggtttacatattattatactaaagcagtactggactggccattggaccatttgttccaaaacccataaattgttgcctaaatttataatgatcatgaaaccctaggcagaggaggagaaattgaaggtccagggcaatgaaagaaaaatggcgccctctcaatttagtcttctctcattggccatgtttcagattttgacctagaaatgcgagctgtggttaggcttggttagagtgcagcaagcaacatgacagatggtggcacgctgtttttacccagccctgcctgtacatacacatgcacaccctctctgatatttttgtcctttagatgttcaaatactcagtagtccttttgtttgcggtttagattcattttgtccacacatgtacccattttaaaaaacaatgtcctcgatgcttctgtagtgatttcattttagccaggtatttctttcttgtgtgtgatgaaccagtatggatttgcttttctaagcctcctgttggttactaatctcacttggcacattataactaaaggaatcccctcaattcaaaagcatagatggatacaaatgtcagaccgtgggtttaatttgtttagaacacatggcatttcttcacaaggtaacctgctgtatttatttattttcttttggttaaatataatttccaaactttgtggtcaggcagcgtctaaggttacgttaccacagactgacagttggtatatgtaccagccaatcccttcattaaatgtatacagatttagttaagtagcattaaataggattcttagaagtatgtcctcatagaacttttaatacttaaggctttgtaaaaactatccatgaagggaaagctcctcagcataactgctcagggaaatagggctaaataactgaacattaaataattggttaaaggtgctgttagtcgagcctcaatgcttgctacaaggatgtatgtacaaggactgactttaataatttgcattatattgtcccaaccagtagtttattttttgccacggagatgtagaagatattacaagctactggatgcactgtcagattaacttatttcattaaagaagttgggagaacaaataggaaaaaaaaaacttatttttctagtaaatattaatgtattacatttcaaataatggtgcctgacatattgaataattattttctacagtgtacgtatgcaacaaagatattccatcatgcattagagtcagttctggctctgcctagctgtttacatttgcaaatgtagcaaacaaggtaatgaagcaactatttctattgcagtagatatccttttgtgtgtgtgtgtgtgcattaaagttgtaaacggtaacatgaaacaaatgaaagttcttgctataatggtatggaaaacaagaaggaaatgaaaatatttttatgcctacttaggaaaaaaagggtagcacttattcattccaagtacttttttttttttaatttttaagctcttaactcacattgttatgcttaagatgataaacatatatcctctttttattgctttgtctatgtttcatatgaaacatttcagaaattattttgataagtgttgctggaatctgcaacgctgatttttttttgcattctgtagtcgcatttgcactccatttttacattaattcgcagttgctttgtatcattgttttgtttgggttttgtttctttttcacagtgccgggtcttcgtttcttaaagttggatggcaggtagagttcaaccagttcgtgactgttgtagcgaatgaagttaaaaaaatgtctttctgatgttgtgttgtcattttcatttttgcatttttttgtttgcatattaaaaaaagagaaaagagaaagcaagagacagaaatcaggactaagtcctctgcttcagtttcattgttaacgggccttattctgatctcacctgtcgcgtagctctaatattcacataaactgaaataaagaagtggaatgaggagctttgacattcaaattatgtgatgtaatttatcttccttaggaattttgatggatgcatctcaaaatgtatagccagacttgagaggtgacaattaaagatctaaaaaagagaggagattcccccaaacaacaatatttaattttcttagtaaaaagaataacagaatgcatcgtggcaatccttaagcaacattatctatgtggactgcttaaatcagcaaaacaccagaagtttggttaacttgggcaatatgacaagtattactttttgggcaaaactactcattaagcaatttctctagtgtgtcggacacaaataggttctttatttttggcatgtatgcctttttattttcattcaattttttttttttctcagacagacatagtagtatcaactagcattggaaaatacatatcactattcttggaatatttatggtcagtctactttttagtaaaatatttttggatagcgttgacacgatagatcttattccatacttctttattattgataattttattttcattttttgctttcattattatacatattttggtggagaagaggttgggcttttttgaaagagacaaaaatttattataacactaaacactccttttttgacatattaaagcctttattccatctctcaagatatattataaaatttatttttttaatttaagatttctgaattattttatcttaaattgtgattttaaacgagctattatggtacggaactttttttaatgaggaatttcatgatgatttaggaattttctctcttggaaaaggcttcccctgtgatgaaaatgatgtgccagctaaaattgtgtgccatttaaaaactgaaaatattttaaaattatttgtctatattctaaattgagctttggatcaaactttaggccaggaccagctcatgcgttctcattcttccttttctcactctttctctcatcactcacctctgtattcattctgttgtttgggatagaaaaatcataaagagccaacccatctcagaacgttgtggattgagagagacactacatgactccaagtatatgagaaaaggacagagctctaattgataactctgtagttcaaaaggaaaagagtatgcccaattctctctacatgacatattgagattttttttaatcaacttttaagatagtgatgttctgttctaaactgttctgttttagtgaaggtagatttttataaaacaagcatggggattcttttctaaggtaatattaatgagaagggaaaaaagtatctttaacagctctttgttgaagcctgtggtagcacattatgtttataattgcacatgtgcacataatctattatgatccaatgcaaatacagctccaaaaatattaaatgtatatatattttaaaatgcctgaggaaatacatttttcttaataaactgaagagtctcagtatggctattaaaataattattagcctcctgttgtgtggctgcaaaacatcacaaagtgaccggtcttgagacctgtgaactgctgccctgtttagtaaataaaattaatgcatttctagagggggaatatctgccatccagtggtggaaatgtggagtaaagaagctggtggtctgcttctgtgctgtatgccagccttttgccttaagttgagaggaggtcaactttagctactgtctttggtttgagagccatggcaaaaaaaaaaaaagaaaaaaagatcaagtcgtctttggtgagccagtaaggtgaaagcttgctgactgtccaaggcacaagagaaaattgaggaattgaaatgcaacctgagtatcaaactaaatattctaatcaaaggtaggtactgttaggtggaattctatcagcaggcaactgcaaatgagaagaagatagaaggacgcccgtcgggactttggagggcattgttattttcccaaagaaagacggccaagggcagaggcatggattctttgcagagcacttccttttggtttttcagtactgtttcatagacagtgggctcacatgttcctgatagtgctgcagttgcttagaaagcatcccagttaattgcagtaattagaacttctggaatatgctagggcagaagtatgtcaagtatgtcacatgaagaaaatgtgaaattcaagagtaatccacacgtgagaaactagacaatgtacattcatgtgttctcttgaaaggaaagggagagctgtaagcttcactctgtcctacaccggagaaaagcaggaataactttaccgtggaaataatgtttagcttttatcagagaaaattgtccttctagagcatagagtcccaaaactcaattctggttttcccctgttttttttttttttttttttcccaacatatgaactgcagcatatcactttttctttttgtgcctcaggttcctcacctgtaaaattgaaaaatatatgtattaataatattattaataataataatggtaatgtagtacttgtttgtaaagcactttgagatccttggttgaaaggcaccataggagtgccaagtattattatgtggccaagggggttatttaaactgtcagttcccaaaggccaggaaaggttggggtcatttttcttaaagacgagctgtaaatatcaactaggcagccaatagtgttgactatgaagatgcaaaactattactaggctgataaaatcatagtttcttaatggctaccaataaggcaaatatcacaataataaacgccaaattccttagggcggactatttgacaaccacatggaaaactttgggggaggcatgaggggggaacatctcaaaatgccaatgtaaaatttaacttacagcaatattcaccagcagaaaatgtctttcatatggaatgatttcatgttgctaagaaaaagaattcaatttgtagtcctgatttgaatactagaatgttggctataatagttctgttcttacaacacatgaaattttttcgttttattttattttgttttcatagtgcatgttcatttctactcacaaacatgttcttggtgtatttcttatgcaaacaatcttcaggcagcaaagatgtctgttacatctaaacttgaataataaagttttaccaccagttacaca

SEQ ID NO: 3682 - DNA, 3996 bp, Homo Sapiens
  NM_014117
gctgcgcggagggctcggcgatcagcggcggcggcggcagtggggaggccgcagcgccatgggggggcgttagacaggctgcggcggccgaggcgaggggcggcagcggttatctggtccgcggcgaccttcggccgggcccgggggtgggaaggcctggggcgggggtcgtccctggttgcacggggccgcggggcggggctcgccggccgtcggggtgcaggaggcctgggccgctgaaaggagaaggcgccgtcggtcgccaggccctgccgccgggccgcttgacgacgacgctcccgcgggggccccgcctgaggaggacgcggcggcggtggcggcgaggccgcgggaggccgcggaggatggaggagcggaaggaggagggcgaggccgagatccaggagcacgggcccgagcactggttctccaagtgggagcggcagtgcctggccgaggccgaacaggacgagcagctgccccccgagctgcaggaggaggcggcggccgccgcgcagcccgagcacaagcagcagaagctgtggcacctcttccagaactcggccaccgccgtggcccagctctacaaagaccgagtgtgtcagcagccaggactttctctctgggtccccttccaaaacgcagccaccgccgtcaccaatctctacaaagaaagcgtggatacccatcaacgaagttttgatattggaattcagattggctatcagcgacgcaataaggatgtgttggcttgggttaaaaaacgcagaagaactattcgtcgagaagatttgatcagcttcctgtgtggaaaagttcctccaccacgaaactctagagctcccccaagactgactgtagtgtcccctaaccgagctacttcaacggaaactagctcatctgtagagactgatttgcaacccttccgggaagccatagctctgcatggtcttagtggtgcaatggctagtataagcgtgcgttcgagtaccccaggctctcctacacatgtaagcagtggatcgaatgctagtcgaaggagaaatggactccatgatgtcgatttgaacactttcatatcagaagaaatggcactccacttggacaatggtggaactagaaagcgtacctcagcccagtgtggcgatgtcattacagactcaccaacccataaacgcaacagaatgatctaaactgcaaacattttcacacccaccatgctgcttgaaagccacttgatcctcaacatatactataattgcaaaggaaacatgaggccatcttcccttgttcactgtttaagacaagtgaattctatagtggttgccataaaaggaagttctaggtatttatagtagatgcctcttgtaattatggctttcttaaaactataatcctagcagaggacatcagatattgtgtagtcgttagcaagatcatcataggcaaacatatatccgttccaaggctaaaagtgaccttaactgtatttattctcaaagggaaaggaaatatcagatgtttatttggttatagaatgctttttttttttttgggtccatttcctgctgtgttgagtattttgcttcaacagtattgccaggttcctaaaattgtctaaaaacatgatttggcttccatttttgcagctgcactgtaccatgcacctggtttctatatagtaacagtgtgcaattctaattattggactgtgccctgtttttagttttcaaatcaatttctaattctggtgattgtgtgatgtaaagaggtgctatgatggtcatgcaattaatactaaatattgaatcaatgcccagagctttattggattcactttgtgtgtgttagtgctctaaagtagcagtattattattaaactgtccccagagtaaccctgtaggcctaaagtactcagttttaagacaaacactacttcccatgcggggtactttccttatggtaaatgtaaacatgtagactgcattcgaggtgacctaaagtagagaggtcatgaactttgagaatgggcttcctttttggttcagtattagtgagagggagagggagatggatggtggggtaggttttctagtctatcattttacatttttcatggagtccctgcttagtgcagtttccattggaatgggtggaagatgataaagctctcttttttatctactaataatgtgattgcaacttaaaatagcaaaacccaactctccctgtccctccaatccctctcctaaaaagttcagtttggaatctcattctggaaaagatggaatcgcatggagattctctagctgttaggtagacctaaataaaaagttctcaatagattcctcttttgagtaaatataagacctcttgtagctacaatgttttagagcatgtttcatcttcatttttaatatcctgaactgaatgatagtgtttttttagatgaagaactgatgtcagcctgccaggtactgtaatttattctatcatattattatattatatatcaagtaggacagtgaaaaatgtttccttgcaaacttgtagtccagtatcagttacttcctatttttatccttaaaagaccattgcaaatcagtgtaagggtttttccagtaattactcacagcactttgttaaagtttgcaatttcttcagccatttaataatatctttctgtgaagaaactttgctgagttaaccataaatgttcattcattgactgggtgggatgtgaatggaatgttagaaatgttgtgtgaattgaagttctgtattcattatagatgtagcccttatttaaaaaagtgaattccatactaaaactaggaatgaaagtgagagatttctaaacttttgcgaaagtgggtcattttttgtttgactataatagcaggaagaattatagcaatctgtcattttacctgaaacagacaagcctatgtattatgaatactttcaagcttccctttggaatatacaagacatgcgtttggagttacctttgtttttctatcgtaaatttagattctggaattggggtttggtggtgcaatgtgttgctcacaagtggccagaactcctattcctaaaaggattttgagatggaggaacacatatttaattcccctttatgccttggttcttgctcctctttccacgttggataacaattttttggttgttttgtttaagttggtgctctgaagcttaatctcagtaccctttactctgaattgtcaaattttgataaaacgtgccattttctttggtaagagaaagcaggtcttaatgtctgccagaacacaatttatatgccttattggcttcattaaacttttagaaaactttagcatttgttacttttttccattgcatttactttcaaatgcacctaatgaatttgtcacccagtcgcaacttttcccttctctgtcccattgctttctcctttccccgacgcacagaataaacatgaagctcagcagtagaagcgtaatgatttccctcaggaaaaacttctgacagctaggtttttcaagggtttccctgtgctagctgagatgcaaaacaaatcatggaagattgcatacctgtgtggtattttaaaaacaagttgactttttcagtttcttgaacggttaagggtggatttaaaaactagacagtttagttttggggaacagaagctctcttcgtcttaagccagattctctgattcttttagacgtcatagctccttagttctgctcctgtcgccctaacttggcatgggcaagttgaagttcatccttagactgcagcgttctgagcatggctgaagtattaaaatgtttaatattttttagagcaaaattgatggaaagcatttggctgaatctaaagacctgcagtcagattcttcaatgtggtttacccaactggagtagtgataaacaccttaatcataaaatgaataaaaacaaaaaaaccaaaaaaaaaaaaaaaaaa

SEQ ID NO: 3683 - DNA, 3281 bp, Homo Sapiens
  NM_014140
atcattcttacttttggaagcgaaactgcggccgcgttgcctgctgggaaatgtagttcagcggtggcctagcccttcaggcctggccgctacaataaggctggcgaactcgcagcgcttgaatacccgtggcctaaccgtccactcggaagaccggtcccgctcgggaggctctgcagtcgcgcctggggtcagggccgggggcgaatgtggctcgcgttctaggcctccctgggttggaaaaagactatgttagcaagtgtcacgccatgcttttgccaactttccaattaaaggttgacattcctgcataagcatttctctgtgaaaatgtccttgcctcttacagaggagcagaggaaaaagattgaagagaatcgacaaaaggctctggcccgcagagctgagaagttattggcagaacagcatcagaggactagctcgggcacctccattgctggcaacccattccaggccaagcaaggcccatcccaaaatttcccaagggagtcttgtaagccagtgagccatggtgtcattttcaagcaacagaatctcagtagctcatctaatgctgaccaaagacctcatgattcccacagttttcaggcaaagggaatatggaaaaagccagaagaaatgcccacagcctgcccaggccacagtccacgtagtcaaatggctctcactggaatctctcctcccttggcacaaagtcctccagaggtccctaaacaacagctcttgagttatgagttaggtcaaggtcatgctcaggcttcacctgagatcaggttcacaccctttgctaacccaactcataagcctctggccaaaccaaagagttcccaagagacaccagctcattcctctggacagcctcccagggatgctaagttagaggccaagacagcaaaagcctccccttcggggcagaacatttcttacatccattctagctcagagagtgtaacgcccaggacagaaggaagactccagcagaagtcagggtcctcagtccaaaaaggagtgaactctcagaagggaaagtgcgtaaggaacggcgatcgtttccaggtgttgattgggtacaatgcggaactcattgcagtgtttaagaccctgcccagcaagaattatgatcctgacaccaagacgtggaacttcagcatgaatgactatagtgccctgatgaaagcagcccagagcctccccacggtcaacctgcagcctctggaatgggcctatggcagcagcgagtcaccctccaccagcagtgagggacaggccggccttccatcagctccatccctttcatttgtcaaagggcgatgcatgctcatctccagggcctacttcgaggcagacatcagttattcacaggaccttattgcgctttttaaacagatggattccagaagatatgatgtcaagaccaggaagtggagctttctcttggaagagcacagtaaactaattgcaaaggtgcgctgcctcccacaagttcagctggaccctctgcccacgactctcaccctggcgtttgcttctcagctcaagaagacatctctcagtctcacgccagatgtcccagaggcagacctttctgaagtggaccccaagctcgtgtctaatctgatgccctttcagagagctggagtcaattttgccatagccaaaggaggccgcctgctgctcgctgacgacatgggcctggggaagaccatccaagccatctgcatcgcagccttttaccggaaggagtggccgctcctggtggtggtgccatcctccgtgcgcttcacctgggagcaggccttccttcggtggctgccatctctgagcccagattgcatcaacgtcgtggtgactgggaaggaccgcctgacagctggcctgatcaacattgtcagctttgaccttcttagcaagttggaaaaacagctaaaaaccccttttaaagttgtcatcattgatgaatctcacttcctcaaaaacagtaggactgcccgctgtcgagcagctatgccggtcctaaaggttgccaagagggtgatcctgttgtcgggcacaccagccatgtcccggcccgcagagctctacacgcagatcatcgcagtcaagccaactttcttcccccagtttcatgcctttggacttcgctactgtgatgccaaacggatgccttgggggtgggactactcaggttcctccaacctgggagagctgaagctcctgctggaggaagcagtcatgctgcggcgcctcaagtccgacgtcctttcccagctgcctgccaagcagcgcaagatagtggtgattgccccaggacggatcaatgccaggaccagagctgccctggatgctgcagccaaggaaatgaccaccaaggacaaaactaaacagcagcagaaagatgccctcattctcttcttcaacagaacagctgaagctaaaatcccatctgtcattgaatatatcttggacctactggaaagtggaagagagaagtttttagtatttgcacaccataaggtggtcctggacgcaattacgcaagagcttgagagaaagcacgtgcagcacatccgcatcgatggctccacctcatcagctgagcgggaggacctgtgccagcagttccaactgtcggagaggcatgctgtggccgtgctgtccatcaccgctgccaatatgggcctcaccttctcctcggctgacctggtggtgtttgctgagctgttttggaacccaggggtgctgatccaggctgaggaccgcgtgcaccgcattggacagaccagctccgtgggcattcactacctcgtggcaaagggcacagctgatgactacctttggcccctgattcaagagaagattaaagttctggcagaagccgggctttctgagaccaatttttcagaaatgacagaatccactgattacctctacaaggacccaaagcagcagaagatctacgacctattccagaagtcctttgagaaagaaggaagtgatatggagctcctggaagcagcagagtcctttgacccaggaagtgcttcaggaacatctggaagtagttcccagaacatgggagacaccctggatgaaagctcattgacagccagtccacagaagaaaaggagatttgaattttttgataactgggacagctttacgtctcccctgtaaaaggggcaaaaagaaaaaaataaaaagcattttaaaatcatggaattgaaataaaataatgtattttgttttaaaaaaaaaaaaaa

SEQ ID NO: 3684 - DNA, 9894 bp, Homo Sapiens
  NM_014141
acaagctctccatgtgagctgacaggcgagtggaaacccctcgagtcacgctgcccggcggcggagggagcgctcgcccgcagtggcaacagctgcaccaccgtccccgtcgctctgccttcctcttctgcagcctctgctcttctgattacctccctcccccgtcctttggtgatttttttttttcaagaaggagagggcggggtaggtgtccgttccctcccctcttccccctcctttgccttcttggtttgaatttcctcccccggcgttgcactggcacacagtgcaagaggcaatacccgcacggagggagaacgaaggctgagactcccctgccgctccaagcccggaagaactggagcctggaggggggtgaggggagaagaggaagcgggaggggcttggcttcctcgcgtatttgaggacagcccatctcccttcaagaaccctacggagagtcggactgcatctccgcagcgagctcttggagcgccgccggccgggaggcgaaggatgcaggcggctccgcgcgccggctgcggggcagcgctcctgctgtggattgtcagcagctgcctctgcagagcctggacggctccctccacgtcccaaaaatgtgatgagccacttgtctctggactcccccatgtggctttcagcagctcctcctccatctctggtagctattctcccggctatgccaagataaacaagagaggaggtgctgggggatggtctccatcagacagcgaccattatcaatggcttcaggttgactttggcaatcggaagcagatcagtgccattgcaacccaaggaaggtatagcagctcagattgggtgacccaataccggatgctctacagcgacacagggagaaactggaaaccctatcatcaagatgggaatatctgggcatttcccggaaacattaactctgacggtgtggtccggcacgaattacagcatccgattattgcccgctatgtgcgcatagtgcctctggattggaatggagaaggtcgcattggactcagaattgaagtttatggctgttcttactgggctgatgttatcaactttgatggccatgttgtattaccatatagattcagaaacaagaagatgaaaacactgaaagatgtcattgccttgaactttaagacgtctgaaagtgaaggagtaatcctgcacggagaaggacagcaaggagattacattaccttggaactgaaaaaagccaagctggtcctcagtttaaacttaggaagcaaccagcttggccccatatatggccacacatcagtgatgacaggaagtttgctggatgaccaccactggcactctgtggtcattgagcgccaggggcggagcattaacctcactctggacaggagcatgcagcacttccgtaccaatggagagtttgactacctggacttggactatgagataacctttggaggcatccctttctctggcaagcccagctccagcagtagaaagaatttcaaaggctgcatggaaagcatcaactacaatggcgtcaacattactgatcttgccagaaggaagaaattagagccctcaaatgtgggaaatttgagcttttcttgtgtggaaccctatacggtgcctgtctttttcaacgctacaagttacctggaggtgcccggacggcttaaccaggacctgttctcagtcagtttccagtttaggacatggaaccccaatggtctcctggtcttcagtcactttgcggataatttgggcaatgtggagattgacctcactgaaagcaaagtgggtgttcacatcaacatcacacagaccaagatgagccaaatcgatatttcctcaggttctgggttgaatgatggacagtggcacgaggttcgcttcctagccaaggaaaattttgctattctcaccatcgatggagatgaagcatcagcagttcgaactaatagtccccttcaagttaaaactggcgagaagtacttttttggaggttttctgaaccagatgaataactcaagtcactctgtccttcagccttcattccaaggatgcatgcagctcattcaagtggacgatcaacttgtaaatttatacgaagtggcacaaaggaagccgggaagtttcgcgaatgtcagcattgacatgtgtgcgatcatagacagatgtgtgcccaatcactgtgagcatggtggaaagtgctcgcaaacatgggacagcttcaaatgcacttgtgatgagacaggatacagtggggccacctgccacaactctatctacgagccttcctgtgaagcctacaaacacctaggacagacatcaaattattactggatagatcctgatggcagcggacctctggggcctctgaaagtttactgcaacatgacagaggacaaagtgtggaccatagtgtctcatgacttgcagatgcagacgcctgtggtcggctacaacccagaaaaatactcagtgacacagctcgtttacagcgcctccatggaccagataagtgccatcactgacagtgccgagtactgcgagcagtatgtctcctatttctgcaagatgtcaagattgttgaacaccccagatggaagcccttacacttggtgggttggcaaagccaacgagaagcactactactggggaggctctgggcctggaatccagaaatgtgcctgcggcatcgaacgcaactgcacagatcccaagtactactgtaactgcgacgcggactacaagcaatggaggaaggatgctggtttcttatcatacaaagatcacctgccagtgagccaagtggtggttggagatactgaccgtcaaggctcagaagccaaattgagcgtaggtcctctgcgctgccaaggagacaggaattattggaatgccgcctctttcccaaacccatcctcctacctgcacttctctactttccaaggggaaactagcgctgacatttctttctacttcaaaacattaaccccctggggagtgtttcttgaaaatatgggaaaggaagatttcatcaagctggagctgaagtctgccacagaagtgtccttttcatttgatgtgggaaatgggccagtagagattgtagtgaggtcaccaacccctctcaacgatgaccagtggcaccgggtcactgcagagaggaatgtcaagcaggccagcctacaggtggaccggctaccgcagcagatccgcaaggccccaacagaaggccacacccgcctggagctctacagccagttatttgtgggtggtgctgggggccagcagggcttcctgggctgcatccgctccttgaggatgaatggggtgacacttgacctggaggaaagagcaaaggtcacatctgggttcatatccggatgctcgggccattgcaccagctatggaacaaactgtgaaaatggaggcaaatgcctagagagataccacggttactcctgcgattgctctaatactgcatatgatggaacattttgcaacaaagatgttggtgcattttttgaagaagggatgtggctacgatataactttcaggcaccagcaacaaatgccagagactccagcagcagagtagacaacgctcccgaccagcagaactcccacccggacctggcacaggaggagatccgcttcagcttcagcaccaccaaggcgccctgcattctcctctacatcagctccttcaccacagacttcttggcagtcctcgtcaaacccactggaagcttacagattcgatacaacctgggtggcacccgagagccatacaatattgacgtagaccacaggaacatggccaatggacagccccacagtgtcaacatcacccgccacgagaagaccatctttctcaagctcgatcattatccttctgtgagttaccatctgccaagttcatccgacaccctcttcaattctcccaagtcgctctttctgggaaaagttatagaaacagggaaaattgaccaagagattcacaaatacaacaccccaggattcactggttgcctctccagagtccagttcaaccagatcgcccctctcaaggccgccttgaggcagacaaacgcctcggctcacgtccacatccagggcgagctggtggagtccaactgcggggcctcgccgctgaccctctcccccatgtcgtccgccaccgacccctggcacctggatcacctggattcagccagtgcggattttccatataatccaggacaaggccaagctataagaaatggagtcaacagaaactcggctatcattggaggcgtcattgctgtggtgattttcaccatcctgtgcaccctggtcttcctgatccggtacatgttccgccacaagggcacctaccataccaacgaagcaaagggggcggagtcggcagagagcgcggacgccgccatcatgaacaacgaccccaacttcacagagaccattgatgaaagcaaaaaggaatggctcatttgaggggtggctacttggctatgggatagggaggagggaattactagggaggagagaaagggacaaaagcaccctgcttcatactcttgagcacatccttaaaatatcagcacaagttgggggaggcaggcaatggaatataatggaatattcttgagactgatcacaaaaaaaaaaacctttttaatatttctttatagctgagttttcccttctgtatcaaaacaaaataatacaaaaaatgcttttagagtttaagcaatggttgaaatttgtaggtactatctgtcttattttgtgtgtgtttagaggtgttctaaagacccgtggtaacagggcaagttttctacgtttttaagagcccttagaacgtgggtattttttttcttgagaaaagctaatgcacctacagatggcccccaacattctcttccttttgcttctagtcaaccttaatgggctgttacagaaactagttcgtgtttatatactatttcctttgatgtcctataagtcggaaaagaaaggggcaaagagaacctattatttgccagtttttaagcagagctcaatctatgccagctctctggcatctggggttcctgactgataccagcagttgaaggaagagagtgcatggcacctggtgtgtaacgacacaatcagcacaactggagagaggcattaaagaaccagggaaggtagtttgatttttcattgaattctacaagctaatattgttccacgtatgtagtcttagaccaatagctgtaactatcagctgcaataccatggtgaccagctgttacaaaagattttttcctgttttatctgaaacatactggatttatatatgtataagcgcctcaatggggaattagagccagatgttatgatttgtttgctctttttcttttatagtttagttatagcaaaaatatggataatttctagtgaatgcataaattaggttgcgtttcttattttgctttaaatctctggtagtttttccacccctgtgacacaatcctaatagacagtgtcctgtaaatggacacaacacaataaagtcaagttattattgctgttactctggatgatatggaaaacactgccatattttaaatcaactactccacgtgtttttccatccaatcacactgctgtgattcagggatctttcttctaagacggacacatttgaacctcaggttcatcacaaacctggtacctgttgcttcccagaggatggagaagtgtagttaatcacacctcttagtttaatctgaaatcttgacccagttatttaacaaataaatacctcattgattatatttaaaagtaatacacttcctgtaaacaaatggggacaatgcatccaaaaaatctttttaaacagattacacaaaaattatttccagaaaggctaccatttatcatcattatatttcaagcctcttatacttaataagcactttctaaaaagtcttgagatcccaccattctgaggaattcaatatgatcactttttccttctttgcctgggagaggttaagaggaggtttcgaaggtatagatgctattgttctgatggcccggctgaataaaatggaaattctagtttgttagaattatgcattctttttcaagattctcagtgtgcctaacttattggagcacatcagtttcttgggtaatggaaaacattacctagagttgccagtggcacattacaccagtacagagcacattccaaaggagacattggaccagttaattcccatacaagtcaaggtaacagaacaaaagggaatcctgatgcccttttaccattgctggttgagctcaggcactgtcatggacacccttaattttaaaaggttttaatcattcttctataaaatacatttaaaatggaaaaatacttaatatcactaaatatcagaacaatgtaacatttacaaatgacatattgaaagcaaaggctgttttatttagccaagatgattaccattaggagttactttatgtattgttgaaagcaaattttaaacatgatgttttagaagtgtttctgatttttaaacctggtttacaggtattacttctgcacttaccaaataatgccagatggaaatttattatttcttgcaattcccatgatagctctgttctttatgcattgtctcaacactttcccttttttcccaaaatgagtagagaattaaagccacccaaaacagcttctgctactaaaatgttctcatcctttctcctccctctccttttcctgccacaaaaggtgaaaaatgagatccaatcctctcaccaaaatttcaaacctaggacactggaatgactgcagggatcagtggttctcccatatcaccatcaattaagacatataggacactgtcttccttcaagagggttacaatgtggccatcagacaggaaaccaaacggtggataaagtattaagtaactaagtgccaaataaatgctggaaatcttgacctctccttgggattatgggtgtaacaaaaatccctacatctgtttatgaaggccatattcagtacattttaaatggtaaataatctgtttatgtgaagaaaaagaattaagtctttcttccaactctctccttggatagcctagcacagtgcagcctccataaccatgacattcccgcccaagctctcagtgcctaatcctgctttgtcattcacatctcacaaaatcttgacatcttacattccaatacattatcaagcaagcacaagtatgctggtagtagcctctttaaataatatgtatagacaacaacaacgacaaaaaatagactgttttaaagtttcagggaaagttggtggctgatttaaagttgtgcaggaaacatcttctgtgtatgaagcaaatgtcgatgttttgaaaaaagctaggagatgactttgaatgaatgcaaggttagtgagatcctaagctctcaaaatagcatattccctagagctcaagaaagctggtccaggaggttgaaaaagctattttgttgttaaattattttctggcccttcttaatatttaaaaatgtatttccccttgtggctttcaaccacctgctcaaaaaaagagacttgttacatgaaagttttcattaaagagctgaaaacaagaatttagagagccattcctagaaaatgtcctactgccctgcatttgacaaacaagcatcctttactaacaagagcaggaattcagaggcacaagaaaaagcattggcatgagccaaagagtctgtcttaatgttacttttgaaaatctgctgagcggccaccatatgcaggctgagagctgggcacaggcgaagccattggaagcacttcaggaacaagcacacagctgtgggacttgaacatgcaagtgttcaggttgtgtcaagaagcttttctttccttctatgatggaatctgttcttttctatcctacttttttctctcttcctctcctcaccacattataccctgctcttacgcagtaaacgttttaatggcccgtttatgtctcatgcctccaaacaacactgaatttgaaaccccccattttttcttttcaccaccctgttgagcaattttcccaaaaaaagggcagcaattattaaattgaattcaagtaagccagccaaagataggtcctaaattgctagtcccagtagaaccacctgatcctaaaccagtgcgaaacaaacagtaacaatgtccccagctgacttcagctaagaaccaatggctcctacccccgccccgcttttttttgttgttttttgttttgttttgagacggagtcttgctctgtcccccaggctggagtgcactggcgcaatctcgggctcactgcaacctcctcctcctcccacattgaggcgattctcctgcctcagcctcccaagtagctgggattacaggcacccgccatcacacccagctaatttttttttttttttgtattattagtagaagccaggtttcaccatgttggccagggtggtctcgaactcctgacctcaagtgatccgtccacctcggccttgcaaattgctgggattacaggtgtgagccaccgtgccgagccagccccattttttaaatgatgttttggttaagagtggaccatgagaattagctgacagcatcccctttctctctccctgccttggtgggaccctccctgtgtgaccttggtcaagtcctcgaacttttgtcccgtatttaagatggagctgttttacctacttcataagacagttgcgaggtgccattgattcttgactgcaaaataccttgaaacccttatataaagactgaagtcaacggagcctagtgaaagacttactttgtggcttgtggttgaaagtcacatcaaaagacaaatgtggccacgttcaggaattggagacttactggcatggctctacagctgctcagttattaatcatgcagactaacctgtcaacactgggagatgcaacatagcaaaaggacagagaaattagaattttttgtgcagaaagccctaaattcccacctgaatgtaacttacagctcccttacctactctcacacatgccctcaaacatgctagattggcttatacataggccaacacaaaatacaaacgtgacgtgttcatgtagcctagtggctatatgcctattctccatgtaccctgcatggtagtgctgcaaactttaaagtacatttctttcacagcagtattttttttcataagtggcatataaatgtcattcaatgaaatggggaaatcacgttgagaagttggtctgtcatctcccattgagcaaagactggcaggagataataaaaataaatatgggcacacatgtattaatatacagcacgcatttacaagtttattttccagataaaattgtgctataagaacagctctaccaagacagtctgcaccatttccaagtctcagttaatttacagcaactgctgctttcggagatggctgtgaaaatatggaagttcctctcaagtaggccaagaaacagttctagattttactaagttttattttgtcaggttttttaaattttttcagtgagcgtggtgactgcagaggttagtgctgtgaaaagctgggctaaatattctttctgtaaagtcaaacaggattccatcccctgtgaaataacacaaaatttcactctctaaaagcaacagcatgtaaactagaatgaaagaaggaaattatgtacgtatgcctaatattctttgtgaatgtctttcatttaactaaaattatattagaaaccagattgataaataaaaaattcaaagtagttttaattatcctaaaa

SEQ ID NO: 3685 - DNA, 3691 bp, Homo Sapiens
  NM_014143
ggcgcaacgctgagcagctggcgcgtcccgcgcggccccagttctgcgcagcttcccgaggctccgcaccagccgcgcttctgtccgcctgcagggcattccagaaagatgaggatatttgctgtctttatattcatgacctactggcatttgctgaacgcatttactgtcacggttcccaaggacctatatgtggtagagtatggtagcaatatgacaattgaatgcaaattcccagtagaaaaacaattagacctggctgcactaattgtctattgggaaatggaggataagaacattattcaatttgtgcatggagaggaagacctgaaggttcagcatagtagctacagacagagggcccggctgttgaaggaccagctctccctgggaaatgctgcacttcagatcacagatgtgaaattgcaggatgcaggggtgtaccgctgcatgatcagctatggtggtgccgactacaagcgaattactgtgaaagtcaatgccccatacaacaaaatcaaccaaagaattttggttgtggatccagtcacctctgaacatgaactgacatgtcaggctgagggctaccccaaggccgaagtcatctggacaagcagtgaccatcaagtcctgagtggtaagaccaccaccaccaattccaagagagaggagaagcttttcaatgtgaccagcacactgagaatcaacacaacaactaatgagattttctactgcacttttaggagattagatcctgaggaaaaccatacagctgaattggtcatcccagaactacctctggcacatcctccaaatgaaaggactcacttggtaattctgggagccatcttattatgccttggtgtagcactgacattcatcttccgtttaagaaaagggagaatgatggatgtgaaaaaatgtggcatccaagatacaaactcaaagaagcaaagtgatacacatttggaggagacgtaatccagcattggaacttctgatcttcaagcagggattctcaacctgtggtttaggggttcatcggggctgagcgtgacaagaggaaggaatgggcccgtgggatgcaggcaatgtgggacttaaaaggcccaagcactgaaaatggaacctggcgaaagcagaggaggagaatgaagaaagatggagtcaaacagggagcctggagggagaccttgatactttcaaatgcctgaggggctcatcgacgcctgtgacagggagaaaggatacttctgaacaaggagcctccaagcaaatcatccattgctcatcctaggaagacgggttgagaatccctaatttgagggtcagttcctgcagaagtgccctttgcctccactcaatgcctcaatttgttttctgcatgactgagagtctcagtgttggaacgggacagtatttatgtatgagtttttcctatttattttgagtctgtgaggtcttcttgtcatgtgagtgtggttgtgaatgatttcttttgaagatatattgtagtagatgttacaattttgtcgccaaactaaacttgctgcttaatgatttgctcacatctagtaaaacatggagtatttgtaaggtgcttggtctcctctataactacaagtatacattggaagcataaagatcaaaccgttggttgcataggatgtcacctttatttaacccattaatactctggttgacctaatcttattctcagacctcaagtgtctgtgcagtatctgttccatttaaatatcagctttacaattatgtggtagcctacacacataatctcatttcatcgctgtaaccaccctgttgtgataaccactattattttacccatcgtacagctgaggaagcaaacagattaagtaacttgcccaaaccagtaaatagcagacctcagactgccacccactgtccttttataatacaatttacagctatattttactttaagcaattcttttattcaaaaaccatttattaagtgcccttgcaatatcaatcgctgtgccaggcattgaatctacagatgtgagcaagacaaagtacctgtcctcaaggagctcatagtataatgaggagattaacaagaaaatgtattattacaatttagtccagtgtcatagcataaggatgatgcgaggggaaaacccgagcagtgttgccaagaggaggaaataggccaatgtggtctgggacggttggatatacttaaacatcttaataatcagagtaattttcatttacaaagagaggtcggtacttaaaataaccctgaaaaataacactggaattccttttctagcattatatttattcctgatttgcctttgccatataatctaatgcttgtttatatagtgtctggtattgtttaacagttctgtcttttctatttaaatgccactaaattttaaattcatacctttccatgattcaaaattcaaaagatcccatgggagatggttggaaaatctccacttcatcctccaagccattcaagtttcctttccagaagcaactgctactgcctttcattcatatgttcttctaaagatagtctacatttggaaatgtatgttaaaagcacgtatttttaaaatttttttcctaaatagtaacacattgtatgtctgctgtgtactttgctatttttatttattttagtgtttcttatatagcagatggaatgaatttgaagttcccagggctgaggatccatgccttctttgtttctaagttatctttcccatagcttttcattatctttcatatgatccagtatatgttaaatatgtcctacatatacatttagacaaccaccatttgttaagtatttgctctaggacagagtttggatttgtttatgtttgctcaaaaggagacccatgggctctccagggtgcactgagtcaatctagtcctaaaaagcaatcttattattaactctgtatgacagaatcatgtctggaacttttgttttctgctttctgtcaagtataaacttcactttgatgctgtacttgcaaaatcacattttctttctggaaattccggcagtgtaccttgactgctagctaccctgtgccagaaaagcctcattcgttgtgcttgaacccttgaatgccaccagctgtcatcactacacagccctcctaagaggcttcctggaggtttcgagattcagatgccctgggagatcccagagtttcctttccctcttggccatattctggtgtcaatgacaaggagtaccttggctttgccacatgtcaaggctgaagaaacagtgtctccaacagagctccttgtgttatctgtttgtacatgtgcatttgtacagtaattggtgtgacagtgttctttgtgtgaattacaggcaagaattgtggctgagcaaggcacatagtctactcagtctattcctaagtcctaactcctccttgtggtgttggatttgtaaggcactttatcccttttgtctcatgtttcatcgtaaatggcataggcagagatgatacctaattctgcatttgattgtcactttttgtacctgcattaatttaataaaatattcttatttattttgttacttggtacaccagcatgtccattttcttgtttattttgtgtttaataaaatgttcagtttaacatcccagtggagaaagttaaaaaa

SEQ ID NO: 3686 - DNA, 918 bp, Homo Sapiens
  NM_014147
ggggggagaggtagagatgagacaagaggtagaggggagaggtagaggtagccacgagctgataattacagacaagagatgcggagtatgtgggggctcattatcctgcatagtctatctttgtatatctttgaacttttcaagaataaaaaagcttaaaaagtatacatggcctggtcctaccagagactcacccaatgccagcctccagccagggagagccaagtttgcattttcacacgcatctcacactcctctgcactctcaacttggagagctccaaacagggaaaccccaagccttgctggcttctgccaaccccctgagcagaagcatgggtccccctgatcaccacctcaccaccctcatcctgatctcactgtacactccctttcctggtctgctaagtagcgggtgttttccttgacactaacgctacagctagaccacggtgggcttggcaacaggtgtcttcccagatgctggcgttaccgctagaccaaggagccctctggtggccccgtccgggcataacagaaagctcgcactcttgtcttctggtcactcctcactgtccccttcagcctcctatctctgtatggcctggtgtttcctaggttatgattgtagagcgaggattattataatattggaataaagaataattactacaaactaatgattaatgattcatatataatcatatctaagatctatatctagtataactattcttattttatatattttattatactggaacagctcgtgccctcggtctcttgcctcggcacctgggtggcttgctgcccacatccaccaagtgcactttgggaggctgaggctggaggactgctggaggccaggagttcaataccagcctgggcaacatagggagaccccccccccaccatctcc

SEQ ID NO: 3687 - DNA, 4619 bp, Homo Sapiens
  NM_014149
tttctcccaggccccgcccctccgtccctcaccgcaccacccctaaagacgctagcgctgcgatggcggaggccgtggagcgcactgacgagctggtccgggagtacctgctcttccgcgggttcacgcacacactgcggcagctggacgccgagatcaaggcggacaaggagaaggggttccgggtggataagattgtggaccagctgcagcagttaatgcaggtgtatgacttggctgcccttcgggattattggagctacttggagcgtcggctcttcagccgcttggaggatatatacagacccacaatccacaagctgaaaaccagcctgtttcgattttatcttgtctacacaatccagacaaacagaaatgacaaggctcaggagttctttgcaaagcaggccacggaactccagaaccaggctgagtggaaggattggtttgtcctgcccttcctgccatccccggacaccaaccccacctttgctacctacttttctcgacagtgggctgacaccttcattgtgtccctgcacaacttcctgagcgtcctgtttcagtgcatgccagtccctgtgatcctgaactttgatgcggagtgtcagaggactaaccaggttcaagaagaaaatgaagttctgcgtcagaagctttttgcattgcaagctgaaatccaccgactgaagaaagaggagcaacagccagaagaggaagaggccttggtccaacacaaattgcctccttatgtctccaacatggaccgcctgggggactcggaacttgccatggtgtgcagccaaaggaatgcctccctctcccagtcacctcgtgtgggcttcctgtcctcgctgctgcctcagagtaagaagagcccctcaaggttgtcgcctgctcagggccctcctcaacctcagagctcggccaagaaagagtccttcggtggtcagggcaccaagggaaaggacccgacgtccggagccaaggatgggaagagcctcctcagcgggctggccactggggagtccggttggtcacagcaccggcagcggcgcctgcaggaccatggcaaggagaggaaggagcttttctccacaaccacttcccagtgtgcagagaagaaaccagaagccagtggcccagaggctgagccctgcccagagctccacacggagccagtggagccactgactcgggcatcctcggcaggccctgagggtggaggagtccgccccgagcagccctttattgtgctgggacaggaggagtacggggaacaccactcatccatcatgcactgcagagtggactgctctgggaggagagtcgccagcttagacgtagatggggtcatcaaagtgtggtccttcaaccccatcatgcagaccaaagcatcctccatttccaaatcaccgctgctgtctttggaatgggccaccaaacgggacagactgctcttgctgggcagtggtgtgggaacagtgcgtctctatgacacggaagccaagaagaatctctgtgaaatcaatatcaacgacaacatgcccagaatcctgtctcttgcgtgcagccccaacggggcctctttcgtctgttcggcagcagctccgagcctcacttcccaggtggacttctcagcaccagacatcggcagcaagggcatgaaccaggttcctggcaggctgctgctgtgggacacgaaaaccatgaagcagcagctccagttctccctggatccagaacccattgctatcaactgtacagccttcaatcacaacgggaacctgctggtcacaggggcagctgatggcgtcatccggctgtttgacatgcagcagcatgagtgcgcgatgagctggagggcccactacggggaggtctactctgtggagttcagctatgatgagaacaccgtgtacagcatcggcgaggacgggaagttcatccagtggaacatccacaagagtggcctcaaggtatccgagtacagcctcccctcagatgccacgggcccctttgtgctgtctggatacagcggctacaagcaggttcaagtccccaggggccgactcttcgcttttgactcggagggaaattacatgctgacatgttctgccacaggcggcgtcatctacaagctgggtggcgatgagaaggttctggagagctgcttgagcctaggtggccaccgagcccctgtggtcaccgtggactggagcactgccatggactgtgggacctgcctcaccgcctccatggatggcaagatcaagctgaccaccctcctggcccataaagcctgatgacttgccccaagggccacccgaggaagcagtattatctgcggtggggggaggagatataggacaggaaaaccacgtgctccactccagctccctgccagtgcagtgactctgcagggaaagactggcaaggaggctcaggtgcttccatctgtggtgactggaatgggacccacgtggagtaggtgacatatgcttcccagagactggtattgtggctgtgccaggagtacatgtgagactatgggaggaaagctccggaagaaggagaaacattgcagtggctactgtgttggcccagtagaaattgacagtattttgtatatatgtgcccatttatctttttcttttttaaaaaaagagaatactcttgtggtcccctgatgtctctttctaggatgtgtgtcactttgcttcagtgacagccctcccacccagcctggctctgctggccctgaactgaacctctccaggctctcctgttgctttgccatggagccaggtcagctctctgtctgttctgctgggtaacaaggtttggcagttcctgtttctctgggcttaagtcaaggccacagaattctttttcttccctgaaagctggcagcttttgttacagaagattctcaggatgaaggcaggggctgaggcctctgctactggctgcccctttccatccagtggctgctgtttcccaagacaggctaagcgtttcttatctgaaatgcttgggacaggagtgttacagattttggattttttcagactttggaatatttgcatatatacataatgaggtatcttggtaggtctcatgtctaaacatgaaattcattcatgttttatatataccttatacatgtagcctgaaggtaactctatacagtattttaaataattttgtacatgaaacaaagtattgattgtggtcaggtgtggtattttccacttgtggtgtcatgttggtgctcacagttttggggctgggcacggtggctcacgtctgtaatcccagcactttgggaggccaaggtgggtggatcacttaaggtcaggagcttgagaccagcctggccaacatggtgaaaccccatctctactaaaaataccaaaattagccaggcatggtggcaggtgcctataatcccagctactctggaggctggggcaggagaatcacttgagcccaggaggcggaggttgcagtgagccgagatcacgccactgggagaacccaactcaaaaaaaaaaaaagttttgggttatggagcatttttgattttggatctttgggttaaggacgctcaacctgtacctttttcatttggtggctcctctcattcctccaactgaacatctttgtggaaagatgatggctgcctgcacccactgctggcgaatggtgagaaggtagagcaagggggccaagttgctgctggtgggcacctggggttcaggccggcccaactgtggctgagccgatctgtagctgagctgagtgtcaaccagctgtgtccacaccctgcctgaggcctgccctctcctccctggctggggtgggaccttgaagaggcatatcttcccactaggtgaggaggaacaagagcctcactccccttctccctcttgcctttcacagctgaggcagagcttatgggaggagtcactatgggagtgatggacctgggctttggtctccagtgtttggcaggggcgaccttatcactgagctggggaaggcagctgccatgagtcattttaagtctctgagctccagcccagttctaggggcacaaggctggagtagggatactcctagttacctgcttgaggaaaagcacgaagaaattggtaccaaagtcttggctttgttctgggagttgagggaaaagtagggaggtatttaagtggcttgattatgagaaaacaccagagacagtagtaaatagttatttaccgatttttacccatttctaccctggtaatcctccctgcaaatgaagaaaaccaagacttctttatttattatctttccccatctgtattgaaacagtgatcttacttatctcacccagtgattctgtaggacatttaaaaagtggtcatgggtttcattggagtgagaatggtattaacgtttcctcttgtcatctcaaagttttctctccccttaataccatctctacagcttgctgagatgctttaaggatcacagagacacaaagaaaatttgaaccctacgcttctcccatcccacttcttactccatcccgggtgagcgctcgtcctcaaataaagcatgttggaacttcc

SEQ ID NO: 3688 - DNA, 9351 bp, Homo Sapiens
  NM_014155
aaccgtccccaacggtcgccagcgcgcggctcccgggccccctcgctcctcccctctggcccctccgagcgctgggggtgcttccctccccgcctcctcgcactcccactcgcgggcacgccggtggctgtgccgccatgccccaccacaggctgctcacgggcctaggcgcggcggcccgagataggggcccctgagcctcccgggggaggagagaggcagcgagccgcgctccgccccctccccccgggccgccgccgccgccgcctcgccgccccagcctggcgggagaaggaggaggagcagcaggcctccgggcccggcgccgccgcccgcaggacatttctgatttatttgcatccttgaagagcatctgtagaagaggaagtaaaagatgggtgtgaaaacatttactcatagctcctcttcccacagccaggaaatgcttggaaagctaaatatgctgcgaaatgatggacatttttgtgatatcactattcgtgtccaggacaaaatcttccgggcacataaggtggtactagcagcttgcagtgatttctttcgcaccaaacttgtaggccaagccgaggatgagaacaagaatgtgttggatctgcatcatgttacagtgactggctttatacctcttttagaatatgcttacacagccactctatcaattaacacagaaaatattattgatgttctagcagcagccagctatatgcaaatgttcagtgttgccagcacctgctcagagttcatgaaatcaagcattttatggaatacacccaacagccaacctgaaaagggtctagatgctggacaagaaaataattctaactgcaattttacttctcgagatgggagcatttctcccgtgtcctcagagtgcagtgtggtagaaagaaccattcctgtctgccgagaatcccggagaaagcgcaaaagctacattgttatgtctcctgaaagtcctgtaaagtgtggcacacaaacaagctcaccccaggtattgaattcttcagcttcctactcagaaaatagaaaccaaccagttgactcttccttagcttttccttggacttttccttttggaattgatcgaaggattcagcctgagaaagttaagcaagcagaaaatacccggactttagaattacctggcccatctgagaccggtagaagaatggctgattatgtgacttgtgagagcacaaaaactaccttgcctttaggtaccgaagaagatgtccgggtcaaagtagaaagattaagtgatgaggaggtccatgaggaagtgtcccagcctgtcagtgcatctcagagttcgctgagtgatcagcagacagttccaggaagtgaacaagtccaagaggaccttctgattagtccacagtcttcctctataggctcagtagatgaaggcgtttctgagggcttgcctacacttcaaagcacgtctagcactaatgctcctccggatgatgatgatcgattggaaaatgttcagtatccctaccaactctacattgctccttccaccagcagtacagagcgaccaagtccaaatggtcccgacagaccttttcagtgtccaacctgcggggtgcgattcacccgtattcagaacctaaagcagcacatgctcatccactcaggaattaaaccatttcagtgtgaccgctgtgggaaaaagttcaccagggcttactcgctaaagatgcatcgcctaaagcatgaagtgatttcctagtaccggactacttaaaccaggaacaagaagagacccttgttcaatatgatcttggagaacacggttttgaaagcaactcctctgttcaaatgcctgtcatttcacaggtctcctcaacccagaattgtgaaagcacttttcccttggggtctcttggtgggctggcagaaaaagaggaagaagtgccagagcagccaaagagcagtgcttgtgctgaggcaaccagagatgaccccccaaaatcagagctgtcttctataactattgagtagttttgtgatttggcttcagttttgttttttggaaagtgcctgtgcttggtcttgtacatttaaatttaatttaattttttaaacaaaaaaagccgggtgggagggagggggagattgggaaagaatttccctttttactttctgagccctgaaactgattttatttttcctaactgagagattgcttctgtaagtacacaataacatgatgttgaaacagaaactatgagacttaaggagaactggttgacttaaaacatataccagttccttcttccattgttaaaagtaggctaacaacagatcattagctagagaggaaatcagatgattattgaccttcttgagacaagagggtacatgagaaactaattactaaacagcttgacaaatggcctgagtagatacttactgctgtacacaggatgttgtataatattttgtaaagcctgttgtttttggaagtatttatggtaagctttcttaaaaattattatggtaaatacttctgaaatccggcgtacttttctttaagctttgtcatttctgttatgatttttcatggtgaaattttggtactgagatgggcattctctgtacctttatagtaccactccaaaggcaaggaaccatgattgacaacagtcaagctgtggatgaaatgaccaggaacggagaatgaagtatgtaaatcccagcttcataggaactcttctcatactgcttttcagattaaaattgctgtttacctggtctccgaatgtaatgcctgactgtgtcattgcccggatcagttttccccctgccccatcaatatgttctcttgcatatattggcgtgctgccatataaagtaaaaatactggagatattctatattttatatataggtttatgtgttgttggggatgttttcattgtgctcttttggacataataaataattctctattgaggctacattctttttttttttctttttttttaaaagaatggcatctcactctgttgcccaggctggagtatagtggctaagtcatagctcactgcagcttcgaactcctgggctcaggccattctcctgcctcagcctcttgagtatctaggattataggcatgctccaccacacctggttaacttcatttttattttttgtagagatgaggtctcactatggtgcccaggctggtcttgaactcctagaccaagtgatcctcctcctttggcctcccagactgctgggatcactgcaccggccaaggctgcattcttaacccaactagattgtttactgaatcccatatgacagcgatacattgtccttacatatttatttttagacattgcaaagttattaaaaacagttaactatagtttttacacaacgtaggcaacaatgaagagtatagactgtaagattttcatctatgactcataaatctgggagaaaaaaattattaagactaatgagaaactgaaaaccttaaactaatgaatattatttctgctgctaaaaatatgaaactttctggtctgtagttgaaatttgtatgatcctctagacttgggtatacttttcatctggtgccattaaagcatctctaatattgatcctaaatatttgtaagtccatgagcagtgaactttggaataagtttctgtgtagatacccaaagtttaataattatgagagcacctgatttgatagacagaaaatacagttctttagtcaaaacacaagatctgaattttgttcaggtgctagaccatactaaatgtatatatttttaattatagtgatttgtttcatttttttagattggctaattctgtaattttttccccaaaaacatgtgaagaaaggaaaagtaaattaaattccttagaactgttttaggttaagattctctgtgtctgcccatattctgcagtccttaacttgttttcaactctttacctcactcatgaacttgtttttacccatttgctgccaaacataggtgtgttcccttcaggagaatcagcatatacaggttatgataggctcccaccatttatgcttcttcactgatagggttgcattactttctgcagcagactataatacttcatatagtactgctgtgtctcaactggaaaggtcaggaattttaatgttacgttgtggtctttgaaaactgttaggcctagcaatagataaatctcaaaattaattttaaaatctgtattgacaagaataggtaaaattatgaccaggaatcattgttacccttagttccaagaggtggtttttgaaagagcaagaggaaagaaaaaagaaaagaaggaaagaagaataaagaagagaaacgtgtaagaatggtttgcagattgattggttaaaagtgtttttagcacatccccaaccctgaaaacttcgcattaagagccaagcacaatgttggtagctccaagatattctgactgtgttctcagaatgagggattacccatcactgggtattccttcccaagtagaaactttagattttcactggtaatacacattgccaagttttatgggaaatctgaatatactgtgaaaatgcatatctggttagttgtctgctgcccagatcttatcaataccagtaactaaccagtatttaacataaaatgatacaaataaaggcctttttctatttcagtgagggtacatttttcttgatatatatgtactttaaggatattggatctgtttatggatctgttttaggaaacagatttgcaagggataattgtatatatagtagtatttaggtttatttcaaattcatcttagggatgcctagatgcataatttttaccaggacatattgaaaatattgcaaagagatagccagttatattatcccattcattagaaattaccagtgtaactaaacataaatattccagtttagagtgcttaaacgtagctatctttcttaaggccaggagggtaactttgtggtatctaaagggcttaaatttcagaatgcagaataaattgcctttttaaaaccaagcattttgtacaagcttttattttcagttttttaactaccaaataggtgtgatgtactttagaagtaaacaaagatgttcacccatgataatggatgttaaagctcctgcagttgttcttttcgtgtttaaagggtatattctaatagtggaagcatcaaacatgtcagtgatttcatctcattcagaaataaagagattaatattggtctttattttttggcattttaagttttatataaatggatgcagatggagattatcacccacaaatatatttaaatggatttttcttaatttgaatttcaagtaatctttttatttcaagtaattagttacgcatttagttacattgccagttttttttttttatcaatttcagtaagacaaaatatactaaaatgtttaaatagcctcattcaatcttacattttgacatttcagcaatcattctggcttacagtaattagatcccctgttacgacacatgccctttgttcttaataactagcaaaaaaaaaaaaaaaaaaaaactttcatcttgttaaaatactttgccaaatgaaatagactagtcaatacatctgatgtccataattattggtaactcagttaccttctaactaataggctggttcaggagactctcccagtttataaatggttctcttgggagcctttggaagctgtattaaatctttcagtcttttatttctaattttttctcttaatctaaatagaggccagttatctattttatcagcttttattcttgaagattctcagattatgttttagtcccttttagctttaatagtccttgaaaaatacattactgtataatgtggcaattctgtaacagagacttattacttgaatgaataatcctaaaattttaatattttagctgaagtttgagatttgtggaatgaacaaaagaattagaaactttcatatgttactttgtttcagtcatctgcaaagtatgaagctgtaattctgaaatacacatccaagtgaatgagaattaaaaattttctaaatattaatactaactgggaaaaaaaaactagtgtgaagtttacagttagaagaaacagacccaaagttgccagaaggtaataaataaatgtagttttcactgtaagtaagttattgacgtaagatgctttatttgtaatatatttagattttgaaagttattgagagatgaatgtataaaagctaaattttcttttctgaagcagtgaaacaaaattggggtaacaaggaagctctgttgtggcaaacatgtctatgaggaatattaaaactaagcatactcccacaggctttaaactcaaactatgaacatttaaattaagttgttccttattttgcctatacccatttttatctttcattgtcgtttttgcttgacagtatggtgacagagtatttttatttggaaagtcctcagcaagatgaattagccaaaagcaataatggttcagattaaacaataaagtggaattgattcaatcccaggctcaactaagaacagtcgctctctggatgtttcattttagacgatagataagttgagatgttgtaatatttatggggggttaagcctgtgtcagttatgggatgaagacttgtagtaccagtaccatcagtggtcatacttttttttaactttttactaaactaatacagttagacatttccactctatcgtgattatatttttatgatgggaaaataaaaacacttccatgtttttataaatagtctctgcaaagatttcagatgttattggtatctcggtttggcagtatctgaaaaattgagattgtctttgaaatgtttgtgctacttttacttaagtaaacccccactgtgcaagacccaggccggcttcagctaataccaaggtttctgtgtgcataatagtttacagagaacttaagagtaaggactgcggattaaaaacaaaactttttttaactttaaaatttttagtttttgttcaaagtacctggtttataaagtcaaattcttttattagttcctttctcgtttaaattgactgatgttgctgatgaagcttaaagtcccaggcacggttgtggcgatatactgataaaattggtgcctagtggtgggaggagctccagtgtcaggacttttattaaaaggcccttgttttcccaaatgccaatctagccacatttagatttcattattcaataaaacagatgaaaaatcatcccataaatgaatgttgaggttaccaaagtacatcacctgctgaggaaggataaatcttcctgctttaagggagccctgtcatctctcctcttaatgcacgtttcccttggtattagtggaagctgtgttcaagatgggaagcctttcctgcagttcttagaaacacctgctttctaaggagagccttttctaggattagcttatgtgtgttttctctaggcgattttttatttcagttaccaatttaattttcaagttgacagatgctgtgtaaagtctctcataatgagagtagtccattaaattgttgaaagttgcactgcttttcatctttcaggtacctgaaatgagtgacatcaggtatttggaaggagtaagatcataaactgtattcattttcttccttgtacaaagtgatgacttctaatgcttatatctcaaggtattttttaaaaaagcaacggtccctaatagagtaaaatttggttttggtccaagttcccaataatgtatttaatgtttctgttgtttactggtgcctcccgttgcatcaggtagagattgcctgcctctttgtagggcagccttgtggcaccttatgtccaacttggaggatagtatatggcttctttgtgcctctactatcttttcaaaagccattttataaaaatcctaggtagcctattttaatatttaaatatatatatttgtgaaagaacttttagaacagaccttttctttttactttaaaattcctgtatttccatttttaagagtaaatttaatctccaggatttagaagtgtctttccagagaagcataatgagaaagtcagactgaggtaataagaccagaattaagtgatagaagaaactgttgtttggttaaaggacacagatttgaaggaaaaaaattttgatgtaacaattttttaaataaaattttgtttttctgtaatgtcatatttgctgctacagtagctcaatattttacagggctaacataaagctggctccatttaaaaactggagtacttcctagtgcagccagcctaggcggaaactgtacaccatggtcttccagatgggtgactgatggctttgggtagctgatgcatgctttaatatttgcctatagcccggcagcaaggaagtcggggcggggggacttttttaccctgccagttatagcattgtgattctttctgggcactggcattttgtgaaactctcaagggaaggtgatgcaggggagaaaatgtgaattaaattacatagatgggtgtttttatgtcttctacccctttcctagaattagtacaactcttaactgtgccagtccccagttcaccagctttgtatccagtcgtcatctcattcaagtatggctttacttggtgacactggccatagctaagttaacttggcatgtttgacttttgacaataacaaaaatggttttggattttgttttatttccaaaaaatgtatacaatatcagaacttcacattttatatactagtatctggctattagtattttacaggaaccatagttcttggtgactacatatatatatatatttttgtgaccttttttgtaaactaagtgccgtttcaacgttacaatcatttttagggttattgtaatcaatgtgaatatcatgttttttcaaatctgttctgagcctatagtgtttgctttgtgaacatgtgtattgtatatattctgtatagttatattgtactgaaattagcttgtttgatataaggaaaatatgtattgagtacctttttgctagcctgattgtttaatctttttaaaaaaggtttaaactttttttaaaaaaaaaatctttaaactggcctttattacatggtcacacataaagttgcagttaggaaagggatgggcagggaaaaactagttttgagtgtctttagatagaaacatgagactaaggtttgattttgttttcgttttctcattaaaatatcttatgctttatggaataaaaaaaaaaaaa

SEQ ID NO: 3689 - DNA, 2778 bp, Homo Sapiens
  NM_014160
ggcggcagcggctgcgagaggcggcggcacgacgacggtccctcagcccagccaccatgagcaccaagcagatcacttgcaggtattttatgcatggtgtgtgtcgggaaggaagtcagtgcctattctcacatgacttggcaaacagcaaaccgtccaccatctgcaagtactaccagaagggctactgtgcctatggaactcggtgcagatatgaccacacgaggccctctgctgcagctggaggtgctgtgggcaccatggcccacagtgtgccctccccagctttccacagtcctcaccctccttccgaggtcactgcatccattgtgaaaactaactcacatgaacccggaaagcgtgaaaagagaacattggttcttagagaccgaaatctctctggcatggctgaaaggaagacccagccgagcatggtgagtaatccaggcagctgcagcgacccccagcccagccccgagatgaagccgcattcctacctggatgccatcaggagtggccttgatgacgtggaggccagcagctcctacagcaacgagcagcagctgtgcccctacgcagctgctggggagtgccggtttggggatgcctgtgtctacctgcacggggaggtgtgtgaaatctgtaggctgcaagtcttgcacccattcgacccagagcagaggaaggctcacgaaaagatctgcatgttgacgttcgaacacgagatggaaaaggcctttgccttccaggcaagccaggacaaagtgtgcagtatctgcatggaagtgatcctggagaaggcctctgcttctgagaggagatttgggattctctccaattgcaatcacacgtactgtttgtcctgcatccggcagtggcggtgtgccaaacagtttgaaaacccaatcattaagtcttgtccagaatgccgtgtgatatcagagtttgtaattccaagtgtgtattgggtggaagatcagaataaaaagaacgagttgattgaagctttcaaacaggggatggggaaaaaagcctgtaaatactttgagcaaggcaaggggacctgcccatttggaagcaaatgtctttatcgccatgcttaccccgatgggcggctagcagagcctgagaaacctcggaaacagctcagttctcaaggcactgtgaggttctttaattcagtgcggctctgggatttcatcgagaaccgagaaagccggcatgtccccaacaatgaagatgtcgacatgacagagctcggggacctcttcatgcacctttctggagtggaatcatcagaaccctaaagagtagatggttgccctgcatcttgggctccatcggccgaaactttcccaagccagggtgtgcggagcttccctgtactgcagccaaggtgacgtgtgacttggatttgagtggagttgggcttagccttagtctcattcaatctccattattacagccatggggaagagtgaaagatataaagtaacctaattaaatgtatggaattgctatttttatagctgatatagttacacctcaagcccctcaggggtaacaactaacaaacacccaaactgtttggattgattgctttaaaaaacaaacctggctcttacctttgatcttttcttccccagaaatagtaaacttgcagctgcccctaatgcagcatatttttcttaccaaaggagtcttcagccctataaaaggattcctctatagtgtatttctctagtgtatttagtgtgtcgtcaaaattttgatttatacagagctttcaagaacacacaatgcaaagtgagcgcagcatagctgttaacaaacatacaacttttttctagggctttaagggtggtcatttttttcaagttctctcaagtgtcccaaatcagggtagcaatcttgttgccacatgtgcagcaaacaaagtggaagtatagatcttcttctcccttagggaggctcttgaaggagcaggaggtacagtactgggtagcagtctggccctcctgtcgtctggttggtgttggggcctccagccagggccctctaggggaaccaagcctctgctctcacctgtgggttcttgcccatcagggtaattgtattgagaactcaaatatacgtgcacttacatgtgtggttcgtactcaagtgatctattatctagctgcaaagcctggctttgatttgaaattttgtaaaaatttcatggcacccaaggtttctgattctgacccagcagtggtcctgaagagagctgatggcaagtcttgtagtcattttgattttaattgaagggtgagcataaccttgtgaaccagcactagcttgttccaagctggaatttatctaatctatttttgtgtttaaaaaagctgtacctaccaaataaataaatagtttataaaatgtattacttaaggtattagctgagtttagagtactttctgcttaattaatttttatacttaactcttcagtagaggtttacaaagagtacaaaggttaaattacaaattcattcccagcctaggctctgggcacatttcctgttcttgaattctgctcctgaagagggtgaacaaatggggcattcaagttgtgagctcagaattactttaaaaggaggtaacagccagccattacacctaaatttaatttattttattaaaataacataattgagggaccatcagataactgtattttgtcaggtgcaataaaaacaaaattaaaacccaaatcatcaagaaaaaaaaaaaaaaa

SEQ ID NO: 3690 - DNA, 8606 bp, Homo Sapiens
  NM_014339
gggcccgggctggaagccggaagcgagcaaagtggagccgactcgaactccaccgcggaaaagaaagcctcagaacgttcgttcgctgcgtccccagccggggccgagccctccgcgacgccagccgggccatgggggccgcacgcagcccgccgtccgctgtcccggggcccctgctggggctgctcctgctgctcctgggcgtgctggccccgggtggcgcctccctgcgactcctggaccaccgggcgctggtctgctcccagccggggctaaactgcacggtcaagaatagtacctgcctggatgacagctggattcaccctcgaaacctgaccccctcctccccaaaggacctgcagatccagctgcactttgcccacacccaacaaggagacctgttccccgtggctcacatcgaatggacactgcagacagacgccagcatcctgtacctcgagggtgcagagttatctgtcctgcagctgaacaccaatgaacgtttgtgcgtcaggtttgagtttctgtccaaactgaggcatcaccacaggcggtggcgttttaccttcagccactttgtggttgaccctgaccaggaatatgaggtgaccgttcaccacctgcccaagcccatccctgatggggacccaaaccaccagtccaagaatttccttgtgcctgactgtgagcacgccaggatgaaggtaaccacgccatgcatgagctcaggcagcctgtgggaccccaacatcaccgtggagaccctggaggcccaccagctgcgtgtgagcttcaccctgtggaacgaatctacccattaccagatcctgctgaccagttttccgcacatggagaaccacagttgctttgagcacatgcaccacatacctgcgcccagaccagaagagttccaccagcgatccaacgtcacactcactctacgcaaccttaaagggtgctgtcgccaccaagtgcagatccagcccttcttcagcagctgcctcaatgactgcctcagacactccgcgactgtttcctgcccagaaatgccagacactccagaaccaattccggactacatgcccctgtgggtgtactggttcatcacgggcatctccatcctgctggtgggctccgtcatcctgctcatcgtctgcatgacctggaggctagctgggcctggaagtgaaaaatacagtgatgacaccaaatacaccgatggcctgcctgcggctgacctgatccccccaccgctgaagcccaggaaggtctggatcatctactcagccgaccaccccctctacgtggacgtggtcctgaaattcgcccagttcctgctcaccgcctgcggcacggaagtggccctggacctgctggaagagcaggccatctcggaggcaggagtcatgacctgggtgggccgtcagaagcaggagatggtggagagcaactctaagatcatcgtcctgtgctcccgcggcacgcgcgccaagtggcaggcgctcctgggccggggggcgcctgtgcggctgcgctgcgaccacggaaagcccgtgggggacctgttcactgcagccatgaacatgatcctcccggacttcaagaggccagcctgcttcggcacctacgtagtctgctacttcagcgaggtcagctgtgacggcgacgtccccgacctgttcggcgcggcgccgcggtacccgctcatggacaggttcgaggaggtgtacttccgcatccaggacctggagatgttccagccgggccgcatgcaccgcgtaggggagctgtcgggggacaactacctgcggagcccgggcggcaggcagctccgcgccgccctggacaggttccgggactggcaggtccgctgtcccgactggttcgaatgtgagaacctctactcagcagatgaccaggatgccccgtccctggacgaagaggtgtttgaggagccactgctgcctccgggaaccggcatcgtgaagcgggcgcccctggtgcgcgagcctggctcccaggcctgcctggccatagacccgctggtcggggaggaaggaggagcagcagtggcaaagctggaacctcacctgcagccccggggtcagccagcgccgcagcccctccacaccctggtgctcgccgcagaggagggggccctggtggccgcggtggagcctgggcccctggctgacggtgccgcagtccggctggcactggcgggggagggcgaggcctgcccgctgctgggcagcccgggcgctgggcgaaatagcgtcctcttcctccccgtggaccccgaggactcgccccttggcagcagcacccccatggcgtctcctgacctccttccagaggacgtgagggagcacctcgaaggcttgatgctctcgctcttcgagcagagtctgagctgccaggcccaggggggctgcagtagacccgccatggtcctcacagacccacacacgccctacgaggaggagcagcggcagtcagtgcagtctgaccagggctacatctccaggagctccccgcagccccccgagggactcacggaaatggaggaagaggaggaagaggagcaggacccagggaagccggccctgccactctctcccgaggacctggagagcctgaggagcctccagcggcagctgcttttccgccagctgcagaagaactcgggctgggacacgatggggtcagagtcagaggggcccagtgcatgagggcggctccccagggaccgcccagatcccagctttgagagaggagtgtgtgtgcacgtattcatctgtgtgtacatgtctgcatgtgtatatgttcgtgtgtgaaatgtaggctttaaaatgtaaatgtctggattttaatcccaggcatccctcctaacttttctttgtgcagcggtctggttatcgtctatccccaggggaatccacacagcccgctcccaggagctaatggtagagcgtccttgaggctccattattcgttcattcagcatttattgtgcacctactatgtggcgggcatttgggataccaagataaattgcatgcggcatggccccagccatgaaggaacttaaccgctagtgccgaggacacgttaaacgaacaggatgggccgggcacggtggctcacgcctgtaatcccagcacactgggaggccgaggcaggtggatcactctgaggtcaggagtttgagccagcctggccaacatggtgaaaccccatctccactaaaaatagaaaaattagccgggcatggtgacacatgcctgtagtcctagctacttgggaggctgaggcaggagaattgcttgaatctgggaggcagaggttgcagtgagccgagattgtgccattgcactgcagcctggatgacagagcgagactctatctcaaaaaaaaaaaaaaaaaaagatggtcacgcgggatgtaaacgctgaatgggccaggtgcagtggctcatgcttgtaatcccagcactttgggaaggcgaggcaggtggattgcttgagctcaggagttcaagaccagcctgggcgacatagtgagacctcatctctacctaaatttttttttagtcagtcatggtggcacatgcctgtagtcccagctactcgggaggctgatgccagatgatcacttgagcccaggaggtagaggctgcagtgagctataatggtaccattgcaatccagcctgggcagcagagtgagaccctgtctcaaaaaaaataaaaaagtagaaagatggagtggaagcctgcccagggttgtgagcatgcacgggaaaggcacccaggtcaggggggatccccgaggagatgcctgagctgaaggattgtggttggggaaagcgtagtcccagcaaggaagcagtttgtgggtaagtgctgggaggtgagtggagtgagcttgtcagggagctgctggtggagcctggaggggaaggagggaggcagtgagagagatcggggtggggggtggggggatgtcgccagagctcaggggtggggacagccttgtgcgcatcagtcctgaggcctggggcacctttcgtctgatgagcctctgcatggagagaggctgagggctaaacacagctggatgtcacctgagttcatttataggaagagagaaatgtcgaggtgaaacgtaaaagcatctggcaggaaggtgagtctgaagccctgcacccgcgttccgactatcagtggggagctgttagcacgtaggattcttcagagcagctgggctggagctcccctgagctcaggaagccccagggtgcaagggcaaggaaatgaggggtggtgggtcagtgaagatctgggcagaccttgtgtggggaaggggtgctgctgtgacttcagggtctgaggtccaaagacagcatttgaaaagaggctctgaagccagtgtttgaagaatttgttcctgaagtacctcctgggggtaggctagaggcttctggcttcagggtcctgaagaacacattgaggtgccgtctgacactggaatagggtgcccttcattcctatgcctgagtccttaactatatttccaacctccagtgaggaggagaagattcggaaatgtgacaggagagcaaacaggacagtttgcatgtgtgtgtgcgcacacatacatgtgcgtgaaagattatcaataaaagtgcataaatttgttgatctggtaagagtttctagcaggaaggtcgagccacttactgtaggtcaagaagttgctagttgcggagttttttcttgcagttagactttacctagtggtagcagggccaccaaagctctgtgtcccagatggtgtatggcccataatccacccaacagcagcaaaggaccaggcaaaggagaacaggagcagaagcctcccagccactagccttttgggctcagtctctccaataatcctggagaggggcttcgttgggtctggacacctaccatgcattctgtgacctttccctagcttccaataaataactgtttgacgcccagagtacaggataccacaatgcactcttcctgcgtagagcacatgttcccatctgctcccattcctcaggaaccttgaattctagctctgctggcctttgagcccatgccagtaaatgtcctgatgggcattgcctactatctccagggcagctgcctttgtcctcctaacagctttattggagtacagttcacttaccatacaatccacaattgaccctgcacaatttgatgccggtttagtatagtcacagttcagcagccatcagcacagtcagtcttagagtttactacccccaaaagaaatccagccccccttagtcaccaccccaacctccccatccctaggcacccctaggctactttgatctctgtagacttgcctcttctggacatgacatagagaaaggagtcataaattctccaaggtgtctgtttcttctttaatgtcattccctgtttctcctcacattccctccccatttcctgggcccagtctcacactggtccttgcttaccctaaatgctattaattccatcactctgagtatggtgtttgctgtccgctgaatgccaagagcttcaagagtgtgtgtaaataaagccacacctttatttttgtattattctgaaccatggctaataaattgtttcaccaagaaatgtctctctaagaacaggtgccctccacgctgtgcccctcccacctcttcagctcgtctcctgagtgtgcagaggtggttccggttgggaaagaagcagcggagcatctaaccatgcctgtgtccaggccgattatgcacgcagccaccaacaagctcccaactcccgcgtagagtttcatgactttttcctgcctactatcttgatcctagttttttttttgttttttttttttttaaggaataattactttgattcaaaaccagtttctcttttctgcataggaaggtccttgaaggtgtttagggtctaaaaagggtggtgttcggtctctgaaacatccattcagcagtttgagctgggatctctgaatgcaagggtatgatggatatacttctttcttgcttttgttgtgttttggttttttgtttgtttttaagtcagggtctctctgtcaccaggctgtattacagtggtgcaatcatggctcactgcagcctcgacctcccaggctcaagccatctttccacctcagcctgccagtggctagaactacaggcgtgcaccactgtgcccggctaatttgtgtgtatatattttgtagaaatggggtttcaccatgttgtccaggctggtcacgaactcctgggctcaagccatctgcccgcctcatcctcccaaagtgctgggattataggcctgagcccaccgtgcctggcctttcctgtttatctttgaaaattaaatagggcataagagagaagaagatgtacttacaatgcagtgggtggttttaactctatagcctttgggctctgtggttggtgctccccttcctaaataaatgaggtgtatgcagggccctcttctgccttagcgccctgccagctgggactccagcaaggcccggggcacctgaggacagagtgagatggagggccgctgctccagcagccgggcctgcatcccacaagtcaactgtgtcggacagaggatccttacaaagaagaggcagcagggttgggggctggccagctgctcgtccgccctaggtagcttgctcatctgtaaagtgggtggggcaggagttcccacctcatggggtcctggcaagcctgcagtatccccgagtggcaccagcctgcttctggggcagagcagtttgtgccccctgaggtaccactgatcctctttccctgctattaggtattgctctcttcctccggtgtttgccttttcagattatagaagtaatatgtgttcccatatttggcgtctctcaggagctcaggaagtacttggctgagtgaacatgtccattgtggaaaaatggcaacaatatggattccatgggtatattttatagaagaatatgaagaaaagcagctacccctaaacccattgcacaagctgttcatgttaattctgtacccgacgctttccccacggggcctcccctcactctgaaatggcatccaggtccatcttgccctccacctctgcatggctctccatgccccatcgcctctcccagatcctagcactgggtccacactctcgccctgtccatttaggttgatgaaagcaggcagtcacccgggtgggccagtcttgcctgtgggaggaacatgcagtctcctgtctcatggtttgaagtgtgccaggaagcctggcccagcccacctccccctggagtccttcccaggaggaataaccccttaggtcattgactataagatgagttcgctcactggatccttcctctctgatgagacaggaagaaggtacacagtgaccaggtaggaggaggagagggagtagaaaggagggatgcgggtggctggtccctgcatttgcctgcttccctgcacgggtgtcccactggccgcctctgctcaccagtgtcatgggattctctcagaagatgaaaacagcccctgcttttttgctagaatggctgagctttcatggaaaggaagctggacccaagcaacagccgactaccgaaggttgcctggagcagtgcagatgtgggaggaagaagggccttggtgcacactggcttttcttcctgactgcaatgtggcattgtgccagctacctcctctttctcggcctcaggaaaatggagagaaagcagccctgaaggtggctgtgacgagggaaggggcagagggcctgacagtcaaccacgcgctatattttcctgttcttccttagggcaagaactgcatggccagactcaggcaaggcctaggtgtgggctgggcattgcctacacgtgaagagatcactccgcgtccctactgcacctgtcacaaagtgccttctgatatgcctggcaaaccaaaatcggtgagcgccagcttgcttccctagaagacatttctaaatattcataacatgcttgctcaaatcaatcaccttattttacatccgctccagggagaaatgaagacatggtcctacgttgttctgtaattattttctatgtaaattttgttccttgttacaattatatatgtcttaggggaaaggaccatttcacatgtgtcacctcatgtgattctcaccacagccctgtgattgctcctgttttataaataatgacatagttccagttgatggccaaagccacagctaacgagaggcagagagagctcaggctcccaggagcttccactctcagaccttgcctcccgggctgccctgagtgaaacgcctgcttagcatttggcacagccagaagcagcaagctagggtcacaacacagagaggggctgtgtaatactggctgcctctgtgctaagaaaaaaaaaaaatcactgtgtgtttgtttattttggtgcaggcccagtgttcttgcttagacttaatactacccttcatgttaaaataaaaccaaacaaaaacccat

SEQ ID NO: 3691 - DNA, 1890 bp, Homo Sapiens
  NM_014341
atgggagcttcggacccggaagtggcgccctgggctcgcggcggtgccgcggggatggcgggagccggagctggagccggagctcgcggcggagcggcggcgggggtcgaggctcgagctcgcgatccaccgcccgcgcaccgcgcacatcctcgccaccctcggcctgcggctcagccctcggcccgcaggatggatggcgggtcagggggcctggggtctggggacaacgccccgaccactgaggctcttttcgtggcactgggcgcgggcgtgacggcgctcagccatcccctgctctacgtgaagctgctcatccaggtgggtcatgagccgatgccccccacccttgggaccaatgtgctggggaggaaggtcctctatctgccgagcttcttcacctacgccaagtacatcgtgcaagtggatggtaagatagggctgttccgaggcctgagtccccggctgatgtccaacgccctctctactgtgactcggggtagcatgaagaaggttttccctccagatgagattgagcaggtttccaacaaggatgatatgaagacttccctgaagaaagttgtgaaggagacctcctacgagatgatgatgcagtgtgtgtcccgcatgttggcccaccccctgcatgtcatctcaatgcgctgcatggtccagtttgtgggacgggaggccaagtacagtggtgtgctgagctccattgggaagattttcaaagaggaagggctgctgggattcttcgttggattaatccctcacctcctgggcgatgtggttttcttgtggggctgtaacctgctggcccacttcatcaatgcctacctggtggatgacagcttcagccaggccctggccatccggagctataccaagttcgtgatggggattgcagtgagcatgctgacctaccccttcctgctagttggcgacctcatggctgtgaacaactgcgggctgcaagctgggctccccccttactccccagtgttcaaatcctggattcactgctggaagtacctgagtgtgcagggccagctcttccgaggctccagcctgcttttccgccgggtgtcatcaggatcatgctttgccctggagtaacctgaatcatctaaaaaacacggtctcaacctggccaccgtgggtgaggcctgaccaccttgggacacctgcaagacgactccaacccaacaacaaccagatgtgctccagcccagccgggcttcagttccatatttgccatgtgtctgtccagatgtggggttgagcgggggtggggctgcacccagtggattgggtcacccggcagacctagggaaggtgaggcgaggtggggagttggcagaatccccatacctcgcagatttgctgagtctgtcttgtgcagagggccagagaatggcttatgggggcccaggttggatggggaaaggctaatggggtcagaccccaccccgtctacccctccagtcagcccagcgcccatcctgcagctcagctgggagcatcattctcctgctttgtacatagggtgtggtcccctggcacgtggccaccatcatgtctaggcctatgctaggaggcaaatggcccagctctgcctgtgtttttctcaacactacttttctgatatgagggcagcacctgcctctgaatgggaaatcatgcaactactcagaatgtgtcctcctcatctaatgctcatctgtttaatggtgatgcctcgcgtacaggatctggttacctgtgcagttgtgaatacccagaggttgggcagatcagtgtctctagtcctacccagttttaaagttcatggtaagatttgacctcatctcccgcaaataaatgtattggtgatttggaaaaaaaaaa

SEQ ID NO: 3692 - DNA, 1384 bp, Homo Sapiens
  NM_014343
ggctccagggtaagtctgccccccccaccctcgtggggcggggagcccggggcagcccagaggctggggggagggggtggacttttggcccgtttcggttattccctccatctcgtcaacagctgccgcgcgcaggcttagctcattcctctgacctgccaggaagcagagagacccacagagcaggagggaggcagaaagtggagacggacctgagcccgaggaagaggcaggcagaggctgaggctgattccaccccagcctgcctggacaaccctccttagccgcagccccttccagttccctaggggttctgcccctccccctctctggggcaccagccccccagggtcctgcatcccaccatgtcgatggctgtggaaacctttggcttcttcatggcaactgtggggctgctgatgctgggggtgactctgccaaacagctactggcgagtgtccactgtgcacgggaacgtcatcaccaccaacaccatcttcgagaacctctggtttagctgtgccaccgactccctgggcgtctacaactgctgggagttcccgtccatgctggccctctctgggtatattcaggcctgccgggcactcatgatcaccgccatcctcctgggcttcctcggcctcttgctaggcatagcgggcctgcgctgcaccaacattgggggcctggagctctccaggaaagccaagctggcggccaccgcaggggccctccacattctggccggtatctgcgggatggtggccatctcctggtacgccttcaacatcacccgggacttcttcgaccccttgtaccccggaaccaagtacgagctgggccccgccctctacctggggtggagcgcctcactgatctccatcctgggtggcctctgcctctgctccgcctgctgctgcggctctgacgaggacccagccgccagcgcccggcggccctaccaggctccagtgtccgtgatgcccgtcgccacctcggaccaagaaggcgacagcagctttggcaaatacggcagaaacgcctacgtgtagcagctctggcccgtgggccccgctgtcttcccactgccccaaggagaggggacctggccggggcccattcccctatagtaacctcaggggccggccacgccccgctcccgtagccccgccccggccacggccccgtgtcttgcactctcatggcccctccaggccaagaactgctcttgggaagtcgcatatctcccctctgaggctggatccctcatcttctgaccctgggttctgggctgtgaaggggacggtgtccccgcacgtttgtattgtgtataaatacattcattaataaatgcatattgtgaccgttcaaaaaaaaaaaaaaa

SEQ ID NO: 3693 - DNA, 8021 bp, Homo Sapiens
  NM_014345
ctgcggcggcgcgctccgagcctgcgtctagggcgcccccgggtcagagctgtcgccgtggccgccgctgcaagaaccatgtaccgcagcagcgctcgctcctccgtctcttcccaccggcctaaagacgacggcgggggcggcccgcgcagcggccgcagctctggctcctcctcaggcccggctcgccgcagctcaccgccgcctccgccctccggctcctcgtcgcggaccccggctcgccgaccccgctcgccctcagggcaccgcggccgccgggcctcgccgtccccgccacggggtcgtcgcgtctccccgtccccgcctcgggcccgtcgcggctccccgtcgccaccgcggggccgacgactcttcccgccgggcccggccggcttcagaggcagcagccggggggagtcccgcgccgactatgcccgggacggccgcggagaccatccaggcgacagcggcagccggagacgctctcctggtctgtgttctgactctttggaaaagagcttaaggatcactgttggcaatgaccacttctgtgttagcacaccagaacggcgacggcttagtgatcggctggggtcaccagtggataatctggaagacatggacagggatgacctgactgatgattctgtcttcactcgaagctcccagtgctctcggggtcttgagcgatatatttcccaggaggaagggcctctcagtcccttcttgggacaacttgatgaggactaccgaacaaaagaaactttcctgcatcgatctgattatagtccccatatcagttgtcatgatgagctgttgcggggaacagaacggaatcgagaaaaactcaaaggctactccatacgatctgaagaaaggagccgggaggccaaaagaccccgttatgatgacacagtgaagataaacagcatgggaggggatcacccaagttttacatcaggaactcgcaactatcgacagcgtagaagaagcccaagtcctaggtttctcgaccctgagtttcgagaactggatcttgccagacgaaagcgagaggaagaggaggagcgaagtaggagcttgagtcaggagctggttggagttgatggtggtggtactggctgttccatccctggattgtcaggtgtcctaacagcatcggagccaggatattctttgcatcggcctgaggaagtatctgtgatgcccaagaaatccattttgaagaagcggattgaggtggacataatggagccctccatgcagcttgagagtttttccagcagtaccagctccagccaggatcaccctctctactctgggcacccatcccttccactaagtggtgctattgctgcttttgcctcagagattgaaaacaaggggactatggtagagactgccttgaaggaacctcagggcaacctctaccaatggggtccccttcctgggattcccaaagacaacagtcctctcagagaaaaatttggaagttttctatgccacaaggataatttggatttgaaggctgagggacctgagcgacacacagacttcctgctgccccatgagagagctagccaggatggcagtggtttttcccgcattctgagcatgttggctgattctaccagtacacaggaaaaaaggcgacgtagctttcccgacattgaagatgaggagaaatttctctatggggatgaagaagaggatttaaaggcagaatccgtaccaaagccccttgggagctctgagagtgaagttatgaggcagaaggcaagctccctgccgtcttcagctccagctgtaaagctagaatcactagaagagaccaatccagaatatgcgaagatccatgacttgctcaagacaatagggctggatattggagtagcagagattagtcaattggctgcacgcacccaggaacgacttcatggcaagaagccatcattacgctcctcagctgaccgccgttcctcagttgaccgatacttttcagctgaccactgttcctcagttgaccaccgcttctcagctgaccgctgttcctcagttgaccactgcttctcagctgatcgacgttcctcagatccccacagactagagagcagggaggcacatcatagcaatacccactctccagaggtgtcccatccacacccaccttctcctgtggatccttacctgctcacaaaaaacagccctccattcctaaagtctgaccatccagtgggtcatatttcaggaccagaggtggttggtagtgggtttcagtcatctgttgcagtcaggtgcatgttgccatcagccccatctgccccaattagacttccacacactgctgctttatctcagtttcacatgccaagggcctctcagtttgctgcagctcggatacctccgaactaccagggacctgccattccccctgcctcttttgatgcctataggcactacatggcatatgcagcctccagatggcccatgtatcccacctctcaaccgtcaaaccaccctgtacctgaaccacacaggataatgccaataaccaaacaagctactcgtagccgtcccaatcttcgtgtgatccccactgtgactcctgataagcctaagcagaaagagtctctgcgaggctcaattcctgcggcccaagtgcctgtccaggtgtccattccatcactcataagatataatccagagaagatctctgatgagaagaaccgtgcttcccagaagcaaaaggttattgaagagagggaaaaactaaagaatgaccgggaagcccgccagaagaagatgtactatcttaggaccgagttagagcggcttcataaacaacaaggagaaatgctgcgcaagaaacgaagggagaaggatggccacaaagatcctctcttggtggaggtgagtcggcttcaggataacattatgaaggacattgcagagctacggcaagaggcagaagaggcagaaaagaagcaatctgaactggacaaagtggctcagatcttgggaattaacatcttcgataaatcccagaagtctttaagtgacagtagagagcctacagagaagcctgggaaagcagaaaaatctaagagcccagaaaaagtgtcatcgttctcaaactcctcctccaacaaggaatcaaaagtaaacaatgagaagtttcgtactaagagccccaagcctgccgaaagcccccagtcagccactaagcagttggatcagcccactgctgcttatgagtattatgatgctggcaatcactggtgcaaagactgcaacaccatctgtgggaccatgtttgatttcttcactcatatgcacaataagaagcacacacagacactggatccctacaacagaccttgggcttcaaagacccagagtgaggccaagcaagatgccataaagcgcactgacaagataactgttcctgcaaaaggctctgagtttctggttcccatcagtggattttattgccagctctgtgaggaatttttgggggatccaatttctggggagcaacatgtgaagggtcaccaacacaatgagaaatacaagaaatatgtggatgaaaacccattatatgaggagcggcggaatctggaccgccaagctggcttggctgtggtcctagagacagaacggcgacggcagagtgagctaaagcgcaaacttagtgagaaaccaaaggaggagaagaaagaaaaaaaggcaaaggctgtgaaagaagtaaaggaggatgacaaggtctctgagaaattagaagaccaactctctgagggtaggaactcccctgaaaaagctgaaaataaaaggaacactggcatcaaactccagttaaaagaagaggtaaagaaggaatcaccaacatcatcttcttttgggaaattcagctggaagaagccagaaaaagaagaggagaaaagttcattggtgaccccaagtatctctaaagaagagattctagaaagtagtaaggacaaagaggatggcaaaactgaagctgggaaggcaaagcctatcaaaatcaagctctctgggaaaactgttgttgcacataccagcccttggatgcctgttgtgacaacttccacacagactaagatccgacccaacctgcctattccatccacagtactccgcaagtcatgttcagccacaatgagcaagccagctcctcttaacacctttctgtctattaagtcctctggaaccactgctaaacctctgccagtggttaaagagtcttcagctgatctcctcttacctccagacatcatctccaaagcatttggaggggaagaggtgattctaaaagggtctccagaggaaaaagtggtgttggctgaaaagagtgagccatctcatttacctgaacaaatactaccacctcctccaccacccccacctccaccacctccaccaccccccgttatacctcatccagctgccccgtctgctgctcaagcaaatgctatcttggctccagtaaaatcaaacccagttgtatctcagactctcagccctggcttcgtgggtcctaacattttgaacccagtgttgcctgtagccatcatggcctcagcacagccagctgccattccttctgatgagacagctcctggggtgagtgagagtgaccgagaccagaccctgttctctgtgttagtacgtcctccaccacccctctcaagtgtgttcagtgaacaagccaaaaaattagagaagcgaaattcatgcttagccacagccaatgctaaggacctgtatgacatattctatagtagtggtggaaagggggcccctgagactaagggggcccctgagactaagctaagtggtggtccattggccaatggggaaaatagcaacctctctagaaccaaaagttcagacacctcttctacttctcctttgaacagcagtgcatcccaagaggagttgcatcaagatgagggtttggtcgctgctcctatagttagcaactctgaaaagcccattgcaaaaactctggtggccctagggaaatggtcagttgtagaacatgtaggcccaaaaagcacaggcagcacctatggcttcctacagcctctgacaaggttgtgccaaagcaggccttatgaaacaattaccccaaagacagacactttggccatatggacctctagttccttccagagtgacactagtagggatatatctccagagaagagtgagcttgacctgggagagccaggaccacctggtgtagaaccacctcctcaactgttagatatacagtgcaaagaatctcagaagttggtagaaatccacctcagagaatctgttaaccaggataaggaaagccaagagctccgtaaatctgaggattgtagagaaagtgagatagagacaaacactgaactaaaagaaagggtaaaggagctgtctgaggggatagttgatgagggagtaagtaccagcattggaccccacagcatagatgattctaatttgaaccatggaaacagatacatgtgggagggagaagtaaaacagcccaacttgctaatgattgacaaagaggctgaacagtccaataaattgatgacaggaagtgaaactccaagtaaagtagtgatcaaattgagtccacaggcttgctctttcacaaaggcaaaattagactcatttttatcagaagctaggtctttactcaacccacaagatacacctgtgaaaatttctgccccagagttgctgcttcattccccagccagatcagctatgtgtttaacaggtagtccacaagagcaaggagtttcagttgttagtgaggaggggctagagaattcagctccagaatcagcttctagaacttctaggtacagaagtctcaaactcaagagagaaagatcaaaagactttcaagttaaaaagatctatgagttggctgtttgggatgaaaacaagaagaggccagagacctgggagagcccagagaaaccaaaaacagaagcactggagctacaagatgtccatccagagttaacagtgacaatagaaagcaaggccctagaagactttgaagctacagacttaaaggtagaggagcttactgccctggggaatctgggggatatgcctgttgatttctgcactactcgggtaagcccagcacatagatccccaactgtcttgtgtcagaaagtgtgtgaagaaaattctgtatcacctatagggtgtaattcctccgatcccgctgacttcgaaccaatcccatctttttctgggtttccgttagattctcccaaaaccttggtgcttgactttgagacagagggtgaacgaaactcacctaatcccaggagtgttaggatcccttctcctaacattttgaaaactggacttacagaaaatgttgaccgtggcttggggggcctagagggaacacaccaggcccttgacctgttagcaggaggaatgatgcctgaggaagtaaaagaatcttcccaattagacaaacaagagtcactcggattggaattaaaaacaattaattctgcaggccttgggccatctccttgccttccagaccttgttgactttgtcacacggacctctggagttcaaaaagataaactgtgttctccactctctgagccaggtgacccttctaaatgtagttccctggagttggggccattacagctagaaatatcgaatgcatccaccacagaggtggcaattctgcaagtagatgatgacagtggcgaccctctgaatttggttaaagctccagtgtcaaggtcccctccaagggagcaggtaattgaagacaatatggtccctcagggaatgcctgaacaggaaactacagttggtgccatccaggaccacacagaatccagtgttcacaactaagaataaatacctagagctacttgtgagtgaatcattggcttctagaaatcagatgcccagatgatccaagactagtttgttatctcatctggaacctacaccaagagatgcagtcagcatcttaaagtaaatgttcatggaagctaaaaaatttacctcctttccttttccctttccccttaaaacaccagacaaatcgataacaacttatatatatatatatatatctgtaaaaatgtattttgttaatttttttggccaatttattttctcccactttgtcattaaaatcacatgtctaactggctcaccacatagtgtgctttgattgtattttggctttgactctgccatttctgaaatgtgggggaggatggaggcagctgacctctccagttgctgtgttgtattcctacccaatttcctgggcagttgatgcatctctgggaaaaacaccagaaagcttgctgaaatggaaaacttggaagaattgttcatctcttaggcttccatttggatgggcctgccttaacattgtttgaaatgcagcgtgagtagctcttttgtttactgtttacaccccttattggcatgtcaactcctgtacttcccttactctgttgcctttcttgagatgcattgtcctgctaacccacaaacctgtttggaaataaacatggaagaatatctggcaggcttacttttagaagacgacaaatcggtaaggcttattcatggttcattgccaggagcagatatgcttttgagatcacttttatttttgaaatggcctttgttcattgtattgtgatccaataacactttgtattaaattgtttagcagccatttgtgttgtgaaggggtagaagatctctgaaacttgtcttgagattgaactcattccctgttccacaaacccatatgtatcctttcctctacctcctcctttcccaattaatttcaaccatagtacgatgtttggggttgtatattttgttaaaaagattaaagaatttatgagttggcttggacaagtttaactttatttttaatgtgttaattacttggaataaatgcattaatctcaaaaaaaaaaaaaaaa

SEQ ID NO: 3694 - DNA, 3231 bp, Homo Sapiens
  NM_014347
aaccgaagggctggacttccggcggtgggactgtcacttcgccgcccgcgtcaggccacaccggtggtctgggctggggaccgcgggtcgggtccggtttccagggggttcctggtgctcgaggctggcggcgaggaaggaccagatggcctttgaggatgtggctgtgtacttctcccaggaggagtgggggctcctggacacagcccagagggccctgtaccgccgcgtgatgctagacaacttcgcacttgtggcctcgctgggactctccacctctcgacctcgtgtggtcatccaactggagcgtggcgaggagccctgggttcccagtggaacggacacaaccctgtccaggaccacctacaggaggcgcaaccctggttcctggagtttgacagaggatagagatgtttctggagaatggccacgagctttcccagataccccacctgggatgactactagcgtcttccctgttgccggtgcctgccacagtgtaaaaagcctgcagagacaacggggtgcctccccatctcgggagagaaaacccacgggggtgtcggtgatctactgggagaggctcctgctaggctcaggcagtgggcaagccagcgtcagcctgcgactgacctccccgcttaggcctcccgagggcgtccggcttagagaaaagacactcacagagcatgcgttgctggggaggcagcccaggacgcctgagcggcagaaaccatgtgcacaggaggtccctgggagaacctttgggagcgcccaggacctggaggctgccggcggtcggggacatcaccgaatgggtgcagtttggcaggagcctcatagactcctcggtggccaggagccctcgacctgggacgagctgggcgaggctcttcacgctggggagaagtccttcgaatgcagggcgtgcagcaaagtgttcgtgaagagctccgacctcctcaagcacctacgcacccacaccggggagcggccctacgagtgcgcccagtgcggcaaggccttcagccagacgtcgcacttgacgcagcaccagcgcatccacagcggcgagacgccctacgcgtgccccgtgtgcggcaaggccttccggcatagctcctcgctggtgcggcaccagcgcatccacacggccgagaagtccttccgctgctccgagtgcggcaaggccttcagccacggctccaacctcagccagcaccgcaagatccacgcgggtgggcgtccttatgcttgcgcacagtgtggccgccgcttctgccgcaactcgcacctgatccagcacgagcgtacgcacacaggcgagaagcccttcgtgtgcgcgctctgcggtgctgccttcagccagggctcctcgctctttaagcaccagcgcgtgcacacaggcgagaagcccttcgcctgcccacagtgcggccgcgcctttagccacagctccaacctcacccagcaccagctcctgcacacgggcgagcggcccttccgctgcgtggactgtggcaaggccttcgccaagggcgccgtgctgctcagccaccggcgcattcacacgggcgagaagcccttcgtgtgtacgcagtgtggccgcgccttccgtgagcgcccggccctcttccaccaccagaggatccataccggcgagaagaccgtccggcgatccagggccagcctgcacccccaggccaggtctgttgccggggcatcatcagaaggtgcgccagcgaaggaaaccgagcccactcccgcctcgggcccagccgccgtctcgcagccagcggaggtctgaggtcacaggttgcagccctggccttctgtgaatcccttccacagctaaagggcatatgtcctctgcagatccacagcagagaaaaagtcccgtgcttgctagtcagggacaagggaggccctttggctgtgatttcatttgcacgtggggacaggatttgccagttcacccacagatcacacctccatccccaaagaggtagcactgcagcaacatcagggggaggacgtggtggctgaactctagtggggccgagactattcagagccagtaggaggccgacagtcacagcactgcactgtggtgcggcttcatgtgatatgacagtggatgctaaggtgagagggatgcaggcatgggttgggggtggcccagagaaacttatgacagctgtacacaaactggccgctggagagatgcccgctgagggtattctcccctcaacccactgcctctgttcatccaagacttcctaggggccagcctagcagacaagagaccacaagggactggggatcagggtctgggctctgtcagccgccacctctgggaaagagaaaaggtttgggtccactgaacatcatgtttgtagacgctgacaggtggggtcctaatgagagccaacacatgctcactgccagctcctgtcctgagtactgggaagtttctcctgaagccctgtgagatggctctgtggctggtatcccgacttggaagatgaggaaactgaggcacacggcctggcctggcttcacacacatagccgactcaggagagggatgcccatgggggaacatgtgactctcagcattggaaggacagagctaggatgatggctttccggtggcactcgttcaggtttttgcccaagtctcagcttggccaaggcctgtcactgactggtttaccaaagtcgatgtgaggaggaggctttatacctgaggggatgatgttaacttcagacaagatggagctgctcacttttgccgggtttggtggccacttcacccccaaccctgtctcacccccattatccctcctcaattggaggctggacagagctgaataggaaagacttgctattgcctaaggctatgtgtgacaccctcctgaggacctccccaccccagtgtaatggcccttcatggcagggacagaaaggtggactgggggccatttgcttcctgtggccttcagcagaccaggccctgtccctacctggagcctcacctccaaggaaattcatgttctccttaatggaaaaaaaaaaaaaaagactaccatctgcaactcagagtaggtgttgcagtttcctgtacagcagtttggacctccagagcacagcctcttgtccctactccagagcatggttcagtcttaatagcagttcaagagcttctctgataaaggtttctttttaaaca

SEQ ID NO: 3695 - DNA, 2158 bp, Homo Sapiens
  NM_014358
atattctacatctatcggagctgaacttcctaaaagacaaagtgtttatctttcaagattcattctccctgaatcttaccaacaaaacactcctgaggagaaagaaagagagggagggagagaaaaagagagagagagaaacaaaaaaccaaagagagagaaaaaatgaattcatctaaatcatctgaaacacaatgcacagagagaggatgcttctcttcccaaatgttcttatggactgttgctgggatccccatcctatttctcagtgcctgtttcatcaccagatgtgttgtgacatttcgcatctttcaaacctgtgatgagaaaaagtttcagctacctgagaatttcacagagctctcctgctacaattatggatcaggttcagtcaagaattgttgtccattgaactgggaatattttcaatccagctgctacttcttttctactgacaccatttcctgggcgttaagtttaaagaactgctcagccatgggggctcacctggtggttatcaactcacaggaggagcaggaattcctttcctacaagaaacctaaaatgagagagttttttattggactgtcagaccaggttgtcgagggtcagtggcaatgggtggacggcacacctttgacaaagtctctgagcttctgggatgtaggggagcccaacaacatagctaccctggaggactgtgccaccatgagagactcttcaaacccaaggcaaaattggaatgatgtaacctgtttcctcaattattttcggatttgtgaaatggtaggaataaatcctttgaacaaaggaaaatctctttaagaacagaaggcacaactcaaatgtgtaaagaaggaagagcaagaacatggccacacccaccgccccacacgagaaatttgtgcgctgaacttcaaaggacttcataagtatttgttactctgatataaataaaaataagtagttttaaatgttataattcatgttactggctgaagtgcattttctctctacgttagtctcaggtcctcttcccagaatttacaaagcaattcactaccttttgctacatttgcctcattttttagtgttcgtatgaaagtacagggacacggagccaagacagagtctagcaaagaaggggattttggaaggtgccttccaaaaatctcctgaatccgggctctgtagcaggtcctcttctttctagcttctgacaagtctgtcttctcttcttggtttcataccgttcttatctcctgcccaagcatatatcgtctctttactcccctgtataatgagtaagaagcttcttcaagtcatgaaacttattcctgctcagaataccggtgtggcctttctggctacaggcctccactgcaccttcttagggaagggcatgccagccatcagctccaaacaggctgtaaccaagtccacccatccctggggcttcctttgctctgccttattttcaattgactgaatggatctcaccagattttgtatctattgctcagctaggacccgagtccaatagtcaatttattctaagcgaacattcatctccacactttcctgtctcaagcccatccattatttcttaacttttattttagctttcgggggtacatgttaaaggctttttatataggtaaactcatgtcgtggaggtttgttgtacagattatttcatcacccaggtattaagcccagtgcctaatattgtttttttcggctcctctccctcctcctaccttccgccctcaagtagactccagtgtctgttattcccttctttgtgtttatgaattctcatcatttagctcccacttataagtgaggacatgcagtatttggttttctgttcccatgtttgctaaggataatggtttccagttctaccgatgttcccacaaaagacataattttcttttttaaggctgcttagtattccatggtatctatgtatcacattttctctatccaatctattgttgactcacatttagattgattccatgtttttgctattgtgaatagtgctgcaatgaacattcgtgtgcatgtgtctttatggtagaaagatttatatttctctgagtatgtatccagtaatagcccattcatttattgcataaaattctaccaatac

SEQ ID NO: 3696 - DNA, 2048 bp, Homo Sapiens
  NM_014366
gcggccgccaagcgatccctgctccgcgcgacactgcgtgcccgcgcacgcagagaggcggtgacgcactttacggcggcagcgtaagtgcgtgacgctcgtcagtggcttcagttcacacgtggcgccagcggaggcaggttgatgtgtttgtgcttccttctacagccaatatgaaaaggcctaagttaaagaaagcaagtaaacgcatgacctgccataagcggtataaaatccaaaaaaaggttcgagaacatcatcgaaaattaagaaaggaggctaaaaagcggggtcacaagaagcctaggaaagacccaggagttccaaacagtgctccctttaaggaggctcttcttagggaagctgagctaaggaaacagaggcttgaagaactaaaacagcagcagaaacttgacaggcagaaggaactagaaaagaaaagaaaacttgaaactaatcctgatattaagccatcaaatgtggaacctatggaaaaggagtttgggctttgcaaaactgagaacaaagccaagtcgggcaaacagaattcaaagaagctgtactgccaagaacttaaaaaggtgattgaagcctccgatgttgtcctagaggtgttggatgccagagatcctcttggttgcagatgtcctcaggtagaagaggccattgtccagagtggacagaaaaagctggtacttatattaaataaatcagatctggtaccaaaggagaatttggagagctggctaaattatttgaagaaagaattgccaacagtggtgttcagagcctcaacaaaaccaaaggataaagggaagataaccaagcgtgtgaaggcaaagaagaatgctgctccattcagaagtgaagtctgctttgggaaagagggcctttggaaacttcttggaggttttcaggaaacttgcagcaaagccattcgggttggagtaattggtttcccaaatgtggggaaaagcagcattatcaatagcttaaaacaagaacagatgtgtaatgttggtgtatccatggggcttacaaggagcatgcaagttgtccccttggacaaacagatcacaatcatagatagtccgagcttcatcgtatctccacttaattcctcctctgcgcttgctctgcgaagtccagcaagtattgaagtagtaaaaccgatggaggctgccagtgccatcctttcccaggctgatgctcgacaggtagtactgaaatatactgtcccaggctacaggaattctctggaattttttactgtgcttgctcagagaagaggtatgcaccaaaaaggtggaatcccaaatgttgaaggtgctgccaaactgctgtggtctgagtggacaggtgcctcattagcttactattgccatccccctacatcttggactcctcctccatattttaatgagagtattgtggtagacatgaaaagcggcttcaatctggaagaactggaaaagaacaatgcacagagcataagagccatcaagggccctcatttggccaatagcatccttttccagtcttccggtctgacaaatggaataatagaagaaaaggacatacatgaagaattgccaaaacggaaagaaaggaagcaggaggagagggaggatgacaaagacagtgaccaggaaactgttgatgaagaagttgatgaaaacagctcaggcatgtttgctgcagaagagacaggggaggcactgtctgaggagactacagcaggtgaacagtctacaaggtcttttatcttggataaaatcattgaagaggatgatgcttatgacttcagtacagattatgtgtaacagaacaatggctttttatgattttttttttaacattttaagcagactgctaaactgttctctgtataagttatggtatgcatgagctgtgtaaattttgtgaatatgtattatattaaaaccaggcaacttggaatccctaaattctgtaaaaagacaattcatctcattgtgagtggaagtagttatctggaataaaaaaagaagatacctattgaaaaaaaa

SEQ ID NO: 3697 - DNA, 838 bp, Homo Sapiens
  NM_014367
cttcccactccaacgctgggtgacattgagctcaccagcgccaccgtccccggcgaagttctgcgctggtcggcggagtagcaagtggccatggggagcctcagcggtctgcgcctggcagcaggaagctgttttaggttatgtgaaagagatgtttcctcatctctaaggcttaccagaagctctgatttgaagagaataaatggattttgcacaaaaccacaggaaagtcccggagctccatcccgcacttacaacagagtgcctttacacaaacctacggattggcagaaaaagatcctcatatggtcaggtcgcttcaaaaaggaagatgaaatcccagagactgtctcgttggagatgcttgatgctgcaaagaacaagatgcgagtgaagatcagctatctaatgattgccctgacggtggtaggatgcatcttcatggttattgagggcaagaaggctgcccaaagacacgagactttaacaagcttgaacttagaaaagaaagctcgtctgaaagaggaagcagctatgaaggccaaaacagagtagcagaggtatccgtgttggctggattttgaaaatccaggaattatgttataacgtgcctgtattaaaaaggatgtggtatgaggatccatttcataaagtatgatttgcccaaacctgtaccatttccgtatttctgctgtagaagtagaaataaattttcttaaataatgactgtgttttattgttttgatccaagtcaagtgtagcctctcagccttttggagaaaaatgaaacaatttatttcaacttgaataccaactcttcagagaagcaggtaccata

SEQ ID NO: 3698 - DNA, 3082 bp, Homo Sapiens
  NM_014372
agtgcccgagccggcctcgttctggctgccgccgtctcgctgaggcggagtaggatgaggcccgcggccgtggctccggcgtcggcgggggcagcagcagctgaggcagcagctgaggcagccgcgacggccgcgcccccccccgctgacctggattaggcccagcagctccgtggccgccgccgccccgcgggggggcggggtggggaagtgcttcgtctccccgcccccccccccccatcgctgcctcgcaggaggcgaacgccgcgaccccagcggagcccgcggcccagccttgatcccccaaccccgggggctggcatgagcggcccctcggcggcaccgtggggcggtggagtcgcctccgcctgatccccggcctgtcgcccgaccccacctcgccaaccgaggcggaccgcggagtgtgcgaacgaccccaccgctgctttctcctcccccagatcacgcaccccagctccggaagatggggaactgcctcaaatcccccacctcggatgacatctccctgcttcacgagtctcagtccgaccgggctagctttggcgaggggacggagccggatcaggagccgccgccgccatatcaggaacaagttccagttccagtctaccacccaacacctagccagactcggctagcaactcagctgactgaagaggaacaaattaggatagctcaaagaataggtcttatacaacatctgcctaaaggagtttatgaccctggaagagatggatcagaaaaaaagatccgggagtgtgtgatctgtatgatggactttgtttatggggacccaattcgatttctgccgtgcatgcacatctatcacctggactgtatagatgactggttgatgagatccttcacgtgcccctcctgcatggagccagttgatgcagcactgctttcatcctatgagactaattgagccagggtctcttatctgacttcaagtgaaccaccattttggtggttttgatcttttgtcactgagcccaaagagccagggattaggaattaagatcgtgcacaaaagtttccttaaaattcctggatggctgcagatgttgggggaaaaagtacgtgatattttagaaacttagtgggaaaagtaggatggtatttttatgtaaagccttgacccaatgtttaaaaatataattgtatttagatcttgttattgctccagtacataggaattgtgtaaagtgttaacagcagctgtatttgtttaaattgtgtgtattgaagattaggaaaaagatagtagttatttttcctaaatgaaataactttcttctcttccccttccccacccgaattcttttctgaagttgctggcatttgggtcaaggttttattaaaagctacattttataacactggcacacacaaaaaagtagttttaagcttgtttgcacagttctttttttccattggaaatggaattcattgccttaggtctttttaaatagtgtattattatcgttggggctggctctatgcttgaaaaccagtttatttataacctgttataagtgctatattctgtttgcagttaggaaatgcagaattcaaagtgatctcctagcttgtaagcaaactgagatgcactatcccttttctataaaaaataagttaatgtgtcaagaaaccaactctattaaggtggggtttaatattaccctttcctatgtgttttatctaattattttggttgttaatatggtgataatggaaagtcaagttaaattttaaatattaagaattctgatttattgagattgaattatgccaccacgtttatgtaaaaatgaaggtggcaccgtggtgagacctaatgagaaatagttactcagttgtaaaaattttgatttattctctttcttctgacctccttgcctcttgtcttgaaccatagcaaaaggatactgcatctctcattactgtagtgctgaggttattgaagttatacaaaacacatctcagtctctgtttcttggaaaggtatctattacatcctgctagctgactgacaaaactaagcagggagaataaagataattgtattttatgttttgcacacaaacgcagaatttgtataaccatatgacttcatagttgtgatctcaaaaaagaaggaatttctcctttgtttcttgcagttaatgtaagaatactttaaatctctaagcttctgaagtgttagaggtagagatggtctagtaaagatgtagtagtaatgttttatccatttagcatgtgtttattttttcatatgtactcaaaggtgacttattggttcacctcagtgatattacagctaaaaaaatcattcattagcaaaaggaaaagtggtctcaacctaacatcagaagtgtttcttattattattttatattgagttgaatattgaactctaacagttttctacatacaaaacacagtgtcatgaaggttattcataattgcattatagaggaatgtagtatgtcataagtactttgtaaagatttgacattcaactgtagtatccatatgttgcttaaatttccttatgagccccatgatggaaagacttaaagatgaatttgagaaaaattgaaagaaattagattatcaggttctgttaaattgttacatgtatcttgcttaaatttctgtttattaatttatatccacccaagtacataaagcaaatttggaggaaacaactgaagttgtgcaatattttctgataattgctttttttattcttgtgttttctacttaaacataatgtctgtgtcatcaagtattatagtcagacttttctttttttctagattgttaaaattggcaaatgaacttttttaaaaatcatcttccatgttgcagttagtctttcttttcattacaagtctttcacagaagtttggtggtaatattgaaagaactagcattgggcagaatgtgtcttttttaggcactttatattctcaacatacaatgttaagaaccatcaattttgacttttactaagttgttaaataaagttataatacagctgtgaaaaaaaaaa

SEQ ID NO: 3699 - DNA, 2021 bp, Homo Sapiens
  NM_014373
ggcccggacgggacgtgcgcgctcaaaggttgcccgtctctgacgcccgcatttcctggtctggagccggctgagccacagcagggtcgccgcggggtcccggggccgtgctcccctgcccctcccgggagcgcgcggggcggggcggggcggggcgggaccaggcgggcgagctgggccctcgcccctccctcgggcggtcacctgggcacgggcgctgcaggtgtcggggcctcaaccttgcggagccgacagccatcgatcctcgggtggcctcgaggtggtggcagggccgccccctgcagtccggagacgaacgcacggaccgggcctccggaggcaggttcggctggaaggaaccgctctcgcttcgtcctacacttgcgcaaatgtctccgagcttactcacatagcatattggtatatcaaaatgaaatgcaaggaaccaaaaataacataattgaaggcagtaaaagtgaaattaaataggaagatcatcagtcaaggaagacccactggagaggacagaaaatgaagcagtgttttatcatgtgtatttcagcaggtcttcttgaaatttaactaaaaatatgactgctctctcttcagagaactgctcttttcagtaccagttacgtcaaacaaaccagcccctagatgttaactatctgctattcttgatcatacttgggaaaatattattaaatatccttacactaggaatgagaagaaaaaacacctgtcaaaattttatggaatatttttgcatttcactagcattcgttgatcttttacttttggtaaacatttccattatattgtatttcagggattttgtacttttaagcattaggttcactaaataccacatctgcctatttactcaaattatttcctttacttatggctttttgcattatccagttttcctgacagcttgtatagattattgcctgaatttctctaaaacaaccaagctttcatttaagtgtcaaaaattattttatttctttacagtaattttaatttggatttcagtccttgcttatgttttgggagacccagccatctaccaaagcctgaaggcacagaatgcttattctcgtcactgtcctttctatgtcagcattcagagttactggctgtcatttttcatggtgatgattttatttgtagctttcataacctgttgggaagaagttactactttggtacaggctatcaggataacttcctatatgaatgaaactatcttatattttcctttttcatcccactccagttatactgtgagatctaaaaaaatattcttatccaagctcattgtctgttttctcagtacctggttaccatttgtactacttcaggtaatcattgttttacttaaagttcagattccagcatatattgagatgaatattccctggttatactttgtcaatagttttctcattgctacagtgtattggtttaattgtcacaagcttaatttaaaagacattggattacctttggatccatttgtcaactggaagtgctgcttcattccacttacaattcctaatcttgagcaaattgaaaagcctatatcaataatgatttgttaatattattaattaaaagttacagctgtcataagatcataattttatgaacagaaagaactcaggacatattaaaaaataaactgaactaaaacaacttttgccccctgactgatagcatttcagaatgtgtcttttgaagggctatgataccagttattaaatagtgttttattttaaaaacaaaataattccaagaagtttttatagttattcagggacactatattacaaatattactttgttattaacacaaaaagtgataagagttaacatttggctatactgatgtttgtgttactcaaaaaaactactggatgcaaactgttatgtaaatctgagatttcactgacaactttaagatatcaacctaaacatttttattaaatgttcaaatgaaagcaagaaaaaaaaaa

SEQ ID NO: 3700 - DNA, 2894 bp, Homo Sapiens
  NM_014374
gggagaaacaggggcagagtgagttggtctctggagtgactgtgcttttccaccctcagcagaggaagaaccgatgctggaacgtcgttgcaggggccccctggccatgggcctggcccagccccgactcctttctgggccctcccaggagtcaccccagaccctggggaaggagtcccgcgggctgaggcaacaaggcacgtcagtggcccagtctggtgcccaagccccaggcagggcccatcgctgtgcccactgtcgaaggcacttccctggctgggtggctctgtggcttcacacccgccggtgccaggcccggctgcccttgccctgccctgagtgtggccgtcgctttcgccatgcccccttcttagcactgcaccgccaggtccatgctgctgccaccccagacctgggctttgcctgccacctctgtgggcagagcttccgaggctgggtggccctggttctgcatctgcgggcccattcagctgcaaagcggcccatcgcttgtcccaaatgcgagagacgcttctggcgacgaaagcagcttcgagctcatctgcggcggtgccaccctcccgccccggaggcccggcccttcatatgcggcaactgtggccggagctttgcccagtgggaccagctagttgcccacaagcgggtgcacgtagctgaggccctggaggaggccgcagccaaggctctggggccccggcccaggggccgccccgcggtgaccgccccccggcccggtggagatgccgtcgaccgccccttccagtgtgcctgttgtggcaagcgcttccggcacaagcccaacttgatcgctcaccgccgcgtgcacacgggcgagcggccccaccagtgccccgagtgcgggaagcgctttaccaataagccctatctgacttcgcaccggcgcatccacaccggcgagaagccctacccgtgcaaagagtgcggccgccgcttccggcacaaacccaacctgctgtctcacagcaagattcacaagcgatccgaggggtcggcccaggccgcccccggcccggggagcccccagctgccagccggcccccaggagtccgcggccgagcccaccccggcggtacctctgaaaccggcccaggagccgccgccaggggccccgccagagcacccgcaggacccgatcgaagcccccccctccctctacagctgcgacgactgcggcaggagcttccggctggagcgcttcctgcgggcccaccagcggcagcacaccggggagcggcccttcacctgcgccgagtgcgggaagaacttcggcaagaagacgcacctggtggcgcactcgcgcgtgcactccggcgagcggcccttcgcctgcgaggagtgcggccgccgcttctcccagggcagccatctggcggcgcatcggcgcgaccacgcccccgatcggcccttcgtgtgtcccgactgcggcaaggccttccgccacaaaccctacctggcggcgcaccggcgcatccacaccggcgagaagccctacgtctgccccgactgcggcaaagccttcagccagaagtccaacctggtgtcgcaccggcgcatccacacgggcgagcggccctacgcctgtcccgactgcgaccgcagcttcagccagaagtccaacctcatcacccaccgcaagagccacatccgggacggcgccttctgctgtgccatctgtggccagaccttcgacgacgaggagagactcctggcccaccagaagaagcacgatgtctgagacggtgggcggggccgtgttggctgagagagggctggggtccttcgtggtgggagtcgcagtgggctgggggtgcctgcctagtgctggagtaggggacaatgggaatcctagaggggatggaagacgcggggagtgagctgggtgggccctgctagcgagagaggtcaaccccggtggccagggaacccacttccaagcgcagggacgccggcctccagctggtgtgtgctaaggctccgtcctgactgccctgtgccctggaaaagcagcaatagcatccgccccttagagccctctggctagaggagccaccagtggaaaggaagaccctccatcctctggtattaacgccttaatgcccctgtcttttactgtaagttacttaagatcatttttggaagcaggcgtggtagagtcctgtaaatgaatgctctgggctagatacagcttggagaacctgctggccttgttagacagcacttgggcctttgccagcagcaagaggtgaagcgaagccactcttacctctcccttcccctcccacctgccccctgcgtaggcacccagacttggagagacccgtctgctgttaatacttccatcctcttccttcccaaagagcagatcccaaggcatttactccttggtctgtctcgctttatctgtcgcccctcccagcgctgagagcctcccctggctgtcagcagcactgtgtccaggctcttgtctgaacaccgcagcccctccttcgctccttccagagctcagcatgtcacggcaaggactgccgcattggtgatggagggccagctgaggggaagttgctggtgagtttccttttctccatttctagcatatggacacctggcctctgcttgagcacttaggtgacaggaacttccgcacctcctgaggccctggatgattctaattgttagaaattctaattgttagaaatccttccttataatgaatgaattctgctttcctataatttctacctattgggccttgttctgttctctggaactaaacagaacaaccatttacccctccttttcaaactagagaataaagatttggttttagaactggtaaaaaaaaaaaaaaaaaa

SEQ ID NO: 3701 - DNA, 891 bp, Homo Sapiens
  NM_014380
accccatcccccactcctataccggtcctccattttggtgcctgcaaagctctgggaaagaatcccgggaaacgaaaaatggtgggtttgggggaagggaggtaaggggagaaagctggagggaggggctttaattggaggccccgtagaggacgcgcggaacttctaaggtgggaaaaaacgaaattaaaaaatcctttgatatcagggctctgaatcctgctggtcagagcaccaagcattcagtctctctccttgcctttgtcttacttgtgttcaaagaaaaacaaccagaaaaaaaaaatctcatcatggcaaatattcaccaggaaaacgaagagatggagcagcctatgcagaatggagaggaagaccgccctttgggaggaggtgaaggccaccagcctgcaggaaatcgacggggacaggctcgccgacttgcccctaattttcgatgggccatacccaataggcagatcaatgatgggatgggtggagatggagatgatatggaaatattcatggaggagatgagagaaatcagaagaaaacttagggagctgcagttgaggaattgtctgcgtatccttatgggggagctctctaatcaccatgaccatcatgatgaattttgccttatgccttgactcctgccatttatcatgagattaatactgtgattcccgctgttttctttttccttgcattttcctaatatgcctttactgatccgtttgctgtgaaccctatgttatttccatgtgtcaagtgggtcttgtgttgccagcttctatttgaagattgcctttgcactcagtgtaagtttctgtcagcagtagtttcacccatttgcatggaaaaatttaaagctaataaagcaatttaaaaagc

SEQ ID NO: 3702 - DNA, 4964 bp, Homo Sapiens
  NM_014382
gctggcgtgagctggggacgttgcgggcacacgacggggcgggtgcgggatcttggggaggggggctcccgagatagtggctgggcggggaactccttcctcagcctctcgtcagcgccgcttctcctggtttctcttgcagatgctgctgctaggggtggtgggagcagccgtgggacgcgtggccgggagcgggggtgacagcctgggattccgggggcttctcttccttgtcctcctcctctcctctctattcccagtgtggccgtggctgacactaaagactttgtagccatcaacccgagtgcagtttcgatggaaaatgaaggttgcacgttttcaaaaaatacctaatggtgaaaatgagacaatgattcctgtattgacatcaaaaaaagcaagtgaattaccagtcagtgaagttgcaagcattctccaagctgatcttcagaatggtctaaacaaatgtgaagttagtcataggcgagcctttcatggctggaatgagtttgatattagtgaagatgagccactgtggaagaagtatatttctcagtttaaaaatccccttattatgctgcttctggcttctgcagtcatcagtgttttaatgcatcagtttgatgatgccgtcagtatcactgtggcaatacttatcgttgttacagttgcctttgttcaggaatatcgttcagaaaaatctcttgaagaattgagtaaacttgtgccaccagaatgccattgtgtgcgtgaaggaaaattggagcatacacttgcccgagacttggttccaggtgatacagtttgcctttctgttggggatagagttcctgctgacttacgcttgtttgaggctgtggatctttccattgatgagtccagcttgacaggtgagacaacgccttgttctaaggtgacagctcctcagccagctgcaactaatggagatcttgcatcgagaagtaacattgcctttatgggaacactggtcagatgtggcaaagcaaagggtgttgtcattggaacaggagaaaattctgaatttggggaggtttttaaaatgatgcaagcagaagaggcaccaaaaacccctctgcagaagagcatggacctcttaggaaaacaactttccttttactcctttggtataataggaatcatcatgttggttggctggttactgggaaaagatatcctggaaatgtttactattagtgtaagtttggctgtagcagcaattcctgaaggtctccccattgtggtcacagtgacgctagctcttggtgttatgagaatggtgaagaaaagggccattgtgaaaaagctgcctattgttgaaactctgggctgctgtaatgtgatttgttcagataaaactggaacactgacgaagaatgaaatgactgttactcacatatttacttcagatggtctgcatgctgaggttactggagttggctataatcaatttggggaagtgattgttgatggtgatgttgttcatggattctataacccagctgttagcagaattgttgaggcgggctgtgtgtgcaatgatgctgtaattagaaacaatactctaatggggaagccaacagaaggggccttaattgctcttgcaatgaagatgggtcttgatggacttcaacaagactacatcagaaaagctgaatacccttttagctctgagcaaaagtggatggctgttaagtgtgtacaccgaacacagcaggacagaccagagatttgttttatgaaaggtgcttacgaacaagtaattaagtactgtactacataccagagcaaagggcagaccttgacacttactcagcagcagagagatgtgtaccaacaagagaaggcacgcatgggctcagcgggactcagagttcttgctttggcttctggtcctgaactgggacagctgacatttcttggcttggtgggaatcattgatccacctagaactggtgtgaaagaagctgttacaacactcattgcctcaggagtatcaataaaaatgattactggagattcacaggagactgcagttgcaatcgccagtcgtctgggattgtattccaaaacttcccagtcagtctcaggagaagaaatagatgcaatggatgttcagcagctttcacaaatagtaccaaaggttgcagtattttacagagctagcccaaggcacaagatgaaaattattaagtcgctacagaagaacggttcagttgtagccatgacaggagatggagtaaatgatgcagttgctctgaaggctgcagacattggagttgcgatgggccagactggtacagatgtttgcaaagaggcagcagacatgatcctagtggatgatgattttcaaaccataatgtctgcaatcgaagagggtaaagggatttataataacattaaaaatttcgttagattccagctgagcacgagtatagcagcattaactttaatctcattggctacattaatgaactttcctaatcctctcaatgccatgcagattttgtggatcaatattattatggatggacccccagctcagagccttggagtagaaccagtggataaagatgtcattcgtaaacctcctcgcaactggaaagacagcattttgactaaaaacttgatacttaaaatacttgtttcatcaataatcattgtttgtgggactttgtttgtcttctggcgtgagctacgagacaatgtgattacacctcgagacacaacaatgaccttcacatgctttgtgttttttgacatgttcaatgcactaagttccagatcccagaccaagtctgtgtttgagattggactctgcagtaatagaatgttttgctatgcagttcttggatccatcatgggacaattactagttatttactttcctccgcttcagaaggtttttcagactgagagcctaagcatactggatctgttgtttcttttgggtctcacctcatcagtgtgcatagtggcagaaattataaagaaggttgaaaggagcagggaaaagatccagaagcatgttagttcgacatcatcatcttttcttgaagtatgatgcatattgcattattttatttgcaaactaggaattgcagtctgaggatcatttagaagggcaagttcaagaggatatgaagatttgagaactttttaactattcattgactaaaaatgaacattaatgttaaagacttaagactttaacctgctggcagtcccaaatgaaattatgcaactttgatatcatattccttgatttaaattggcttttgtgattgagtgaaactttataaagcatatggtcagttatttaattaaaaaggcaaaacctgaaccaccttctgcacttaaagaagtctaacagtacaaatacactatctatcttagatagatatatttttttttatttttaaatattgtactatttatggtggtggggctttcttactaatacacaaataaatttaatcatttcaaaggcattctatttggtttagaagttgattcccaggagtgccatatttcagctactgtatttcctttttcttgtaatgtaagcagctcagataccatgtgctatcatttttgtatcaagttttttgcacaggatgtgaccactgtcagatcactgttcttttctttctttttgtgattgaaaagcctatactacaatttgaagtaaatttttgtttttcttagtaagtgtaaatggttgctttatttttattttaaaaaggtatgtctttggtttggcagaattcatgcagggctatcaagtggtgttctagggtaacagtgtccataattaacgcttagtcatagagtcaaaaacatttaagactgattgggttgaagtttataataaattatattaacatgtcttcctttttgaggtaaagatatatactttgtcaaatatcattttgtcatcctctaaatataaatccaaatacctcagctaagtaattctattttattatttttactgttatgtatgtttttaatcatatttcttaggaagtataggctactggacttagaataaaaagtccccaaacccaaacaaatggtttatgaaccagagtatatgtggaagattctttgctggtcttgctctgtgtgcatctgaagcttctttggcctagattttagcacaaacctgagtatatctcttctactttcatcatgtgttctgtaccttctttttgtttcattgggcatgctagggaaataggtggattttgtgtgtaatgccatcagtttttatgaaagcttgatgaggtataggtcatttgttttgagtatgtgggccagaaatttaaaattagaaatttgtttttctgttgagtatataaacaaaaattggtcccaattctaacaggtttaatccttcttgaagccaataagttttatcttttataatctgtcaggatgaaccactccttagcttttatccaatattaaactgcaagtgttagcactgaaatattgtcattgatagggaaaatatctattctttgagtcattgttactgaggcagttgagtgtaaggagctggctgcagtttattctacttaaccctttaaggctgaattgtcaaatgtacattgttccatgtcgttagatggaacatggaagccattgtctaatcaactctatcattagtgacttgatgtctcataccttaattttgtaatgatttttattctctgttacaaagacttgaaatacgtattaaatgcacgttaatgttttgctttgcattttaggttcagattatgacttgattgaaataaatgtgcctatacattcatttgctttgtactataaaaataaaaatgatttcttaagttaatgacatcccagtggggactattagcattaaaattatccatatggatgctgaaaaaaaaaaaaaaaaaaaaaaaaaaaaaaaa

SEQ ID NO: 3703 - DNA, 8505 bp, Homo Sapiens
  NM_014388
aaagcgcagtcagcgagcccacgtgcttgtgttgactggacaacttcctggtggaaaaccgcgactcttgcaagtgggcaaacttgacgttttcgctatgggcaaacgcgggagccggagccagagccagctactcaacaccctaactaaaaagcagaagaaacatcttcgagatttcggcgaggagcatcccttctatgacagggtttccagaaaggaagcaaagccacagatttgtcaactgtcagagagttcagattcttcagattctgaaagcgactcagagagtgaaccacaacaagtttctggctaccacagactacttgctacattaaagaatgtttctgaggaagaagaggaagatgaggaggaggaagaggaagaagacagtattgtagatgatgcagaaatgaacgatgaagatggtggtagcgatgtcagtgtggaagaagagatggctgcagagtctactgaaagtccagagaatgtagctttatctgctgaccctgagggaaaagaagatggggaagagccaccgggcacatcacaaacatcccccgaagagttcacagatgcaaaacacgagtcactgttcagcctggaaaccaattttctggaagaggaaagtggagacaactcttctttgaaagcctctcaagatccatttcttcaacatgtgaacaaagaactgaaagaaaaagcaattcaggctgttgccacaaatcccaaaactacccacgagcttaaatggcctattctgggccagcttttcttttcctctaagtttcagaagttggaaacatttaaacccccaaaggatattgacttaaagtcacttcatctccagaagcctctggaatccacctggactaagaccaacagccagttcctatctggtccccaaaaatcaagcagcccattcacccccctccagaaagaactcttcttaattatgaattcttaccgggacctgttctacccggaaaggactgctctgaagaacggggaagagatccgccatgtgtattgcctgcatgtgataaatcacatcctcaaagccaatgcccaggtgcttggcaacaatagcagacgccgaagccagaagtttggagtgggtgatgatgatgacttcagagaccaagggttaacaaggcccaaggtactgatagtggtgccattccgggaagctgctttgcgggtggtgcagctcttcatcagcctcctcgagggtgacagcaagaagaaaatcattgtgagcaacaaaaagaggtttcagggagaatatggatcagatcccgaggagagaccacccaacttgaagaggcctgaggattatgaagccgtatttgtgggcaatattgatgaccacttcaggattggagtggcaatacttcagagaagcatccgactctatgccccgttttactcctcggatatcctcattgcttcccccctgggcttgaggaccatcattggtggagaaggagagaagaagagagattttgactttctgtcttctatcgagcttctcatcattgatcaagctgacatttacctgatgcagaactgggagcatgtcctgcatttgatgaatcacatgaacctactacccctggactcacatggggtagacttttctcgagtgcggatgtggagcctcaataattggtccaagtactatcgccagacactgctatttggggcccttcaggatgcccagatcaactcagtgttcaacaagtactgtgtcaacatgcaaggccaggtggccgtgaggaatgtcccaatgacaggctctatcagtcatgtcctggtgcagctcccacatgtcttccagaggatggaagctgaaaacctagcttcagtgattgatgccaggtttaacttttttgtgaacaagattttgccacagtatcgtgatgcagtcatgtctcacacgctcatctatatcccctcctactttgacttcgtgcgtcttcgaaattacttcaagaaggaggaattgaattttacccacatctgcgagtacacgcagaagtctggtgtctccagggccagacacttcttccttcaaggagagaaacagtttctacttttcacagagcgcttccatttctacaaaaggtatacaataaaaggcatcaggaacctgattttctatgaactgccgacatatccacacttttacagtgaaatctgtaatatgctgagagccaccaacagaggagaagaggccacgtggacctgcactgttctctactccaaatatgatgcccagaggttagctgccgtggttggtgtggagcgggcggcacagatgctacagtccaacaagaatgtccacctcttcattactggagaaaaatgaaattttgttgggcaggaagtggtatttggcatgatacataatgtttgattctatgccatttggacccaattctgattacttacagaagaaggactgatacaaagaaagtgcatgaggcaatgtcagtattatctgacatctttcttttcaggtcatgtgtccctgaaaagttaaatgtaaaccagattttggtaaatcccatctttcagaagtgaagagggggctagaaggactctgagaagttggtagaagaaaactcccacttgtgaatatttttgtgagacataaattcttttattacgatttacctctaatttattacacttagtaaattcttccagatttttctatttgtttgacacttccttaaagtaaggaatacacattgcttgcgagaactggttatgagacattggaatacttcttgctgctacatgtcatcttaattttggatggcatgggttttgtaaaacttattctgccccagccaaacttttttgaaaccttaaatagtctaccttaattcagcctagaagagtacattgatttactgatcttttttcatattcataatactaaatgttttagttttgttcaaatatatgcttaaaatcacgttatttaaaaaacacatcagctctgtctcaagaagtaattttgttgaaactccatgttaaaatatccatcttcaacagtagtgtcttcataataactagtcattttttcagtcataaacagatgcaaataaaaaggaaattacacttttaaaaacatttttattttgaaacattctcaaacagaaaaattccaagtacagaacctgaaccatttgagagtgagttgccaacccagtgggcctatcacctttaaatactttagtatatatttcctgtaaacaattaagggtattgtttgtgattaggaatgccccaccaataaggataatgtgaatatttcagaatccaaaaaaattcgaaacacgtctggtcccaagcatttcagataagagatattcaactcatcctagtatggactcgtagtttcttcttttattcaatgggttacggtttgttacatcattatttctttagatgcgtaactggtctcaaatatggccgctgggagcaccttcaggttagcccctgtgtacttttgacatgtcccccatctacttgggcactgctgtattttttgacaatgagacattccaggtttctctactccagccctgcttgcttttagtaggaaattattataaaaggttagattggagtgcttactattgtggtgccactcatcccaggctcagtggtcagaacttgggaattgtgtacatgtatgcacacacatatgtacacacgttgtctaaatttgcttcacattaatatctaaatttactttcatatccatatattgaaaaccatgaattcacaccagtacctccaattctagtccaacaacacaggattgcttctcattttctttccatattgataactcctttctcagacagtggctcccattatcctcaatgtaataacccatgattggtacagattttttttatccttgggcacgcttaaaattacttagcaaaaacaaaaagtaaaatcagttttgaagtaatatttctgctaaatatttagacatttttacttctttttcttcagcatggtaagtaaaaccatttattccatatttagatggttttctaaatttcagaaaatttagttagataaaagccgaccgaacccatgctacaaagaactttttgtatctataggcatgccctgtggttactggcgtaattgtgctgctgtttatcatagatcctgtatattatgagaataagaaatgagtttatttacctcattcagaaatgtgaggcgaagggactgtaattacctggatctttttttttttttttgagatggagtctcgctctgttgcccaggctggagtacactggcatgatcttggcttactgcaatctgtgcctcccgagttcaagcgattctcgtgcctccgcctcccaagtagctgggactacaggcgcatgccaccatgcacagctaattttttatatttttagtagagatggggttttgccatgttggccaggctggtctcaaactcttgacctcaagtgatctgcccacctcagcctcccaaagtgctggggttacaggcctgagccgccacgcctggccaattacctacatctttttctactgccatattcttttgcctgtgaattgtagttcatctcgtggtttccattattactattcacacgactcccaaatctccagcttctctggctctccactcacatgtgagtctggatttcaaatccatgatgtagccccagaaataaccattttattaagcacccctagtgattttcatgctggcatagagccaaacccagccaactgcttcttgcctgcagagaacactgaggatttcaagtgtgaacaaagtagtgttgctttgttcctggctcagcacctgaaaagaaggtaagcctctgcagttagccctggctccttagtgcattgcagagtggagtctctgcaatggttttattaaaaggatgccttgaagatctggtctctctcaacacacaataagcgagaagagaggctactgaaatacggatgcgtgagctggaattacacactaccttgatgttaacaaggctcatttgcagcaagcaagtgcctatatagggtctgaaatatagacaaaggatggtcccaatcctggaaacagtggaattaaaaggtatggaaaggaacttacccagaaagtaacacttttaaatgttttttcttttcccatagttaaaacaaccagcttagcacttttctttttgagagagaaaaagctttgaatcgtggatgcttctcacagctggctgcaccacgtgcagtgttcaaaaaacaagaacaagctaatcatagagaaccagcagcagctaaacagccctctgcttgcttccaaagggcttataattgagcacagatggtcctagtggagatggggaatgtgtccctgctgactcctcataccccagaggaccaaggggggctcatgaaggctctcagccctgattgtgccctcgtgagggcaaggagctatgctgctgaaggaggaaagggaaaggcaggtggggccagaccctattggccatctgaccagccttcccaagcccacgtgagcagatctagggtctcaagattacagaaggcctggggtgagggagcaagagttggaagttctttatagttgtctgaagagcctcattgtccaactgcaggggcctgaggtgcccaaagcttcgtggaaaagtaatgtcagtggaatgctcagaagtggctcttttcagggcacggcttctgaggagcgtggggccaccacagctagccctccctccgtctagccatcctctccttccagtccctttcccatcttttctctcaaaggagcatggtagtgatcttcattaccaaatttctactccacacttattttaaaaagcttttctgaaagcctggctacatagaattctaaacagatttcagtcaacttttaattagagtcaatgaatggggagtaaatacacagataatccaaaattgatgtaagcattggaaggggaaagagggaacgcttctttccctctgggcttggtcatttcctcccaagcaaaccccgcgacgttcagccgtcttcctcctatgccacgtgctctcaccagaactgcagcaaaactgcattttatgtcctgtgtctaaagctaaacacatgttcctgtctacttttgctttgttcctgtttcccttctgtgaggaccttcccctcctcagatgtggggagttgccgcctccacttgcattacatgtatttcagagtaggtcctaggctccccttacacctctggtcacgttgccattattcctatggtagataaaggggatgagaaagaacagagctccaggcctttttcaaacaaactggttttctcagtatagccctatgctcaaaaggagtgaggacaggtatgtgactgccataaggagctgtttgctttgcacagagaaatctaatctttctcctgctgggcagctcagtacagatgtcccctcactgctggaagaaacacctgcccttgcttgttctcctgatggcccctcacagtcaggtgtgggatggcacatttctaggtgctcctcgccgagctgtcatgggcttcagtcttgggcctctgcagctggctgtgaccaggtggaaactgtagccttggctgacccagagaaggaaaggaggcagtctgccgcttggctgatttaggagttgtgctgaattcctgcccatctgttctcccagctgagccaaggccaaagctgtctaccttttgccaacctaaggaatgacacagagcatggagcaccatcactgaaacatctgccccagtgccctgccaccttcgtcctcactgacctctgcagcctctctcatctgccagttttgattccgcaaggagaggtggccctgggctcacagctggtgtttgtccacagatgttcatgggtttctttgtgttctctcattttttcaaagctgggtgttgggaccaacatcaccactgacattctgtggctctaaacaagtcctcacgaccacttctcagttttctcatctttatgaagtatggagtaatccccactagccttatagagggactgtgtgagaagggaagagactgctattgtttgccctatatccacctacttccctagttccagaacgctggactttaatgagataacaaagtacctagtaaaaacactgcatcattttccatcccccaccccttgcagtaaaatgtggcccatgagacagaagcactaactactgagcaggacttctaggggagttctttaaaactcagaggagcaccacttttaccttctgctcttccctttttcctgcctggaacgcagaagtgatggctgaagctcctgaggctataagctctgtacgtaggagagtggtgaagaaaggagcttggttctgcaaggatgttgtagagctgccataccagtcctgcatggtattcctgtgcactactgttacgtgaacacacaaacacctaatttgtttaagccattaggccaggcctctattagccattcctgactgatacagaagacaaaaatggcatcacagactcctgaactccaaagacactgcctattctttcgtctgttcttggcaagcaccaacattgagactgtacttcagggttgatgctggccatttggtggcgtgaggagtgggcactcacatgtctctgctagcagttctgacgtgtccattccacactggatccatagaacgagggaacacaagtgtcttctcataagatttatagaaacagtgatcgttgcagaaaaataattagcaagagaacagacttcagctctctgaaggctgatgaccacctgtttctcatctcttctagtgtatgtcaaagctaaattaggtcaaataggaaataagtcagaatccccaattcgatagaaacttacaggtcttgtgatctaatctgccacttgatccgtgaattacctataggtcatccctaagaggtggcctccagcttctgcttgaattccttcaaggatggggtgctcattgtggcttttctaatcatctctgattgttagaaacactgtgaaacttttatccatcagtcctgtttctgaagctgtacggtacaaattttttttttccccacttaaggctcaactattggaatacatctaccatgtctcctatgaaacttgcttctccaggccaatcatccttacttccttaaacttttttttttcctgaaaagttattcttttaatcttattaaaaaagcaacccatgcccattccacaaatacaagtgaaatagtgaaaaacaaaaatcaaactacatctatttggtgatcattattaatgtcttatgtttcctcccagattgttttctgcatgaataataaccaacaatgtgtgtgtatgtatatatatgcttttgcattaaaaggtggttttgaaggtaaaaaaaaaaaaaaaaaaaaa

SEQ ID NO: 3704 - DNA, 3688 bp, Homo Sapiens
  NM_014389
acaggcagcctcatccgccatcactccgggaaccgagcaccccgctgcctcggcgcccaggctgctctctccgcgcatgctccttcccagcttgagcccgcgagtccagcctgccttcactcagtgcgcaagaccgcagccccctccccacgccccctccccagtaggcggccgtcgcggtgtgtttgcgtcatcgcgccacgccaccactggaacccgggggaagatggcggcagccgttctgagtgggccctctgcgggctccgcggctggggttcctggcgggaccgggggtctctcggcagtgagctcgggcccgcggctccgcctgctgctgctggagagtgtttctggtttgctgcaacctcgaacggggtctgccgttgctccggtgcatcccccaaaccgctcggccccacatttgcccgggctcatgtgcctattgcggctgcatgggtcggtgggcggggcccagaacctttcagctcttggggcattggtgagtctcagtaatgcacgtctcagttccatcaaaactcggtttgagggcctgtgtctgctgtccctgctggtaggggagagccccacagagctattccagcagcactgtgtgtcttggcttcggagcattcagcaggtgttacagacccaggacccgcctgccacaatggagctggccgtggctgtcctgagggacctcctccgatatgcagcccagctgcctgcactgttccgggacatctccatgaaccacctccctggccttctcacctccctgctgggcctcaggccagagtgtgagcagtcagcattggaaggaatgaaggcttgtatgacctatttccctcgggcttgtggttctctcaaaggcaagctggcctcattttttctgtctagggtggatgccttgagccctcagctccaacagttggcctgtgagtgttattcccggctgccctctttaggggctggcttttcccaaggcctgaagcacaccgagagctgggagcaggagctacacagtctgctggcctcactgcacaccctgctgggggccctgtacgagggagcagagactgctcctgtgcagaatgaaggccctggggtggagatgctgctgtcctcagaagatggtgatgcccatgtccttctccagcttcggcagaggttttcgggactggcccgctgcctagggctcatgctcagctctgagtttggagctcccgtgtccgtccctgtgcaggaaatcctggatttcatctgccggaccctcagcgtcagtagcaagaatattagcttgcatggagatggtcccctgcggctgctgctgctgccctctatccaccttgaggccttggacctgctgtctgcactcatcctcgcgtgtggaagccggctcttgcgctttgggatcctgatcggccgcctgcttccccaggtcctcaattcctggagcatcggtagagattccctctctccaggccaggagaggccttacagcacggttcggaccaaggtgtatgcgatattagagctgtgggtgcaggtttgtggggcctcggcgggaatgcttcagggaggagcctctggagaggccctgctcacccacctgctcagcgacatctccccgccagctgatgcccttaagctgcgtagcccgcgggggagccctgatgggagtttgcagactgggaagcctagcgcccccaagaagctaaagctggatgtgggggaagctatggccccgccaagccaccggaaaggggatagcaatgccaacagcgacgtgtgtgcggctgcactcagaggcctcagccggaccatcctcatgtgtgggcctctcatcaaggaggagactcacaggagactgcatgacctggtcctccccctggtcatgggtgtacagcagggtgaggtcctaggcagctccccgtacacgagctcccgctgccgccgtgaactctactgcctgctgctggcgctgctgctggccccgtctcctcgctgcccacctcctcttgcctgtgccctgcaagccttctccctcggccagcgagaagatagccttgaggtctcctctttctgctcagaagcactggtgacctgtgctgctctgacccacccccgggttcctcccctgcagcccatgggccccacctgccccacacctgctccagttccccctcctgaggccccatcgcccttcagggccccaccgttccatcctccgggccccatgccctcagtgggctccatgccctcagcaggccccatgccttcagcaggccccatgccctcagcaggccctgtgccctcggcacgccctggacctcccaccacagccaaccacctaggcctttctgtcccaggcctagtgtctgtccctccccggcttcttcctggccctgagaaccaccgggcaggctcaaatgaggaccccatccttgcccctagtgggactcccccacctactatacccccagatgaaacttttggggggagagtgcccagaccagcctttgtccactatgacaaggaggaggcatctgatgtggagatctccttggaaagtgactctgatgacagcgtggtgatcgtgcccgaggggcttccccccctgccacccccaccaccctcaggtgccacaccaccccctatagcccccactgggccaccaacagcctcccctcctgtgccagcgaaggaggagcctgaagaacttcctgcagccccagggcctctcccgccacccccacctccgccgccgcctgttcctggtcctgtgacgctccctccaccccagttggtccctgaagggactcctggtgggggaggacccccagccctggaagaggatttgacagttattaatatcaacagcagtgatgaagaggaggaggaagaggaagaagaggaagaagaagaagaggaagaagaggaagaggaggaagactttgaggaagaggaagaggatgaagaggaatattttgaagaggaagaagaggaggaagaagagtttgaggaagaatttgaggaagaagaaggtgagttagaggaagaagaagaagaggaggatgaggaggaggaagaagaactggaagaggtggaagacctggagtttggcacagcaggaggggaggtagaagaaggtgcacctccacccccaaccctgcctccagctctgcctccccctgagtctcccccaaaggtgcagccagaacccgaacctgaacccgggctgcttttggaagtggaggagccagggacggaggaggagcgtggggctgacacagctcccaccctggcccctgaagcgctcccctcccagggagaggtggagagggaaggggaaagccctgcggcagggccccctccccaggagcttgttgaagaagagccctctgctcccccaaccctgttggaagaggagactgaggatgggagtgacaaggtgcagcccccaccagagacacctgcagaagaagagatggagacagagacagaggccgaagctctccaggaaaaggagcaggatgacacagctgccatgctggccgacttcatcgattgtccccctgatgatgagaagccaccacctcccacagagcctgactcctagccatcttctgcaccccactctttgtttccaataaagttatgtccttagatagcgaaaaaaaaaaaaaaa

SEQ ID NO: 3705 - DNA, 3522 bp, Homo Sapiens
  NM_014390
acgcttgcgcggcgagtagaacgtgtggcggcggcggagatcgcgtctctttcgctccgtgtcccgctgctgctcctgtgagcgcccggcgagtccgtcccgtccaccgtccgcagctggtagccagcctgcccctcgcctcgactccctttcaccaacaccgacacccacattgacacctccagtccggccagccgctccactcgttgcctttgcatctccacacatggcgtcctccgcgcagagcggcggctcctccgggggacccgcggtccccaccgtgcagcggggcatcatcaagatggtcctctcagggtgcgccatcattgtccgaggtcagcctcgtggtgggcctcctcctgagcggcagatcaacctcagcaacattcgtgctggaaatcttgctcgccgggcagccgccacacaacctgatgcaaaggatacccctgatgagccctgggcatttccagctcgagagttccttcgaaagaagctgattgggaaggaagtctgtttcacgatagaaaacaagactccccaggggcgagagtatggcatgatctaccttggaaaagataccaatggggaaaacattgcagaatcactggttgcagagggcttagccacccggagagaaggcatgagagctaataatcctgagcagaaccggctttcagaatgtgaagaacaagcaaaggcagccaagaaagggatgtggagtgaggggaacggttcacatactatccgggatctcaagtataccattgaaaacccaaggcactttgtggactcacaccaccagaagcctgttaatgctatcatcgagcatgtgcgggacggcagtgtggtcagggccctgctcctcccagattactacctggttacagtcatgctgtcaggcatcaagtgcccaacttttcgacgggaagcagatggcagtgaaactccagagccttttgctgcagaagccaaatttttcactgagtcgcgactgcttcagagagatgttcagatcattctggagagctgccacaaccagaacattctgggtaccatccttcatccaaatggcaacatcacagagctcctcctgaaggaaggtttcgcacgctgtgtggactggtcgattgcagtttacacccggggcgcagaaaagctgagggcggcagagaggtttgccaaagagcgcaggctgagaatatggagagactatgtggctcccacagctaatttggaccaaaaggacaagcagtttgttgccaaggtgatgcaggttctgaatgctgatgccattgttgtgaagctgaactcaggcgattacaagacgattcacctgtccagcatccgaccaccgaggctggagggggagaacacccaggataagaacaagaaactgcgtcccctgtatgacattccttacatgtttgaggcccgggaatttcttcgaaaaaagcttattgggaagaaggtcaatgtgacggtggactacattagaccagccagcccagccacagagacagtgcctgccttttcagagcgtacctgtgccactgtcaccattggaggaataaacattgctgaggctcttgtcagcaaaggtctagccacagtgatcagataccggcaggatgatgaccagagatcatcacactacgatgaactgcttgctgcagaggccagagctattaagaatggcaaaggattgcatagcaagaaggaagtgcctatccaccgtgttgcagatatatctggggatacccaaaaagcaaagcagttcctgccttttcttcagcgggcaggtcgttctgaagctgtggtggaatacgtcttcagtggttctcgtctcaaactctatttgccaaaggaaacttgccttatcaccttcttgcttgcaggcattgaatgccccagaggagcccgaaacctcccaggcttggtgcaggaaggagagcccttcagcgaggaagctacacttttcaccaaggaactggtgctgcagcgagaggtggaggtggaggtggagagcatggacaaggccggcaactttatcggctggctgcacatcgacggtgccaacctgtccgtcctgctggtggagcacgcgctctccaaggtccacttcaccgccgaacgcagctcctactacaagtccctgctgtctgccgaggaggccgcaaagcagaagaaagagaaggtctgggcccactatgaggagcagcccgtggaggaggtgatgccagtgctggaggagaaggagcgatctgctagctacaagcccgtgtttgtgactgagatcactgatgacctgcacttctacgtgcaggatgtggagaccggcacccagttggagaagctgatggagaacatgcgcaatgacattgccagtcacccccctgtagagggctcctatgccccccgcaggggagagttctgcattgccaaatttgtagatggagaatggtaccgtgcccgagtagagaaagtcgagtctcctgccaaaatacatgtcttctacattgactacggcaacagagaggtcctgccatccacccgcctgggtaccctatcacctgccttcagcactcgggtgctgccagctcaagccacggagtatgccttcgccttcatccaggtgccccaagatgatgatgcccgcacggacgccgtggacagcgtagttcgggatatccagaacactcagtgcctgctcaacgtggaacacctgagtgccggctgcccccatgtcaccctgcagtttgcagattccaagggcgatgtggggctgggcttggtgaaggaagggctggtcatggtggaggtgcgcaaggagaaacagttccagaaagtgatcacagaatacctgaatgcccaagagtcagccaagagcgccaggctgaacctgtggcgctatggagactttcgagctgatgatgcagacgaatttggctacagccgctaaggaggggatcgggtttggcccccagccccgctcacgccagtccctcttcctctgccgggagggtgttttcaactccaaaccccagagaggggttgtagattgggtccagctttgcttcagtgtgtggaaatgtctcgtggggtggcatcggggctgcggggtggggaccccaaggctttctggggcagacccttgtcctctgggatgatgggcactgctatccacagtctctgccagttggttttatttggaggtttgtgggctttttttaaaaaaaaaaagtcctcaaatcaggaagaaacatcaaagactatgtcctagtggagggagtaatcctaacacccaggctggccgccagctggcacctgcctctatcccagactgccctcgtcccagctctctgtccaactgttgattatgtgatttttctgatacgtccattctcaaatgccagtgtgttcacatcttcgctctggccagcccattctgtatttaaagcttttgaggcccaataaaatagtacgtgctgtctgcagcccttattgatcaaaaaaaaaaaaaaa

SEQ ID NO: 3706 - DNA, 4161 bp, Homo Sapiens
  NM_014393
gggagcgccggggaggcgggcggaggcgggcggaggcggggggcggggagcccgaggggtggaagccggcggcggccgagcggggtcagttctctgtagtgtttgccaatgttggagccgtctgcaaagtgtccccggcaagaagaggctgcctaccacaaggactttagcttactttttaaagattgaagaaaaaaaagaagacagaaaaagaagaactcaaagatacacaaagtaatttgaaccaaggctcagaagtttttggagccgtgagggatacagcagtttggtcaatattgtcttaacatgcttcaaataaatcagatgttctcagtgcagctgagtcttggtgagcagacatgggaatccgaaggcagcagtataaagaaggctcagcaggctgttgccaataaagctttgactgaatctacgcttcccaaaccagttcagaagccacccaaaagtaatgttaacaataacccaggcagtataactccaactgtggaactgaatgggcttgctatgaaaaggggagagcctgccatctacaggccattagatccaaagccattcccaaattatagagctaattacaactttcggggcatgtacaatcagaggtatcattgcccagtgcctaagatcttttatgttcagctcactgtaggaaataatgaattttttggggaaggaaagactcgacaagctgctagacacaatgctgcaatgaaagccctccaagcactgcagaatgaacctattccagaaagatctcctcagaatggtgaatcaggaaaggatgtggatgatgacaaagatgcaaataagtctgagatcagcttagtgtttgaaattgctctgaagcgaaatatgcctgtcagttttgaggttattaaagaaagtggaccaccacatatgaaaagctttgttactcgagtgtcagtaggagagttctctgcagaaggagaaggaaatagcaaaaaactctccaagaagcgcgctgcgaccaccgtcttacaggagcttaaaaaacttccacctcttcctgtggtggaaaagccaaaactattttttaaaaaacgccctaaaacaatagtaaaggccggaccagaatatggccaagggatgaaccctattagccgcctggcgcaaattcaacaggccaaaaaggaaaaggagccggattatgttttgctttcagaaagaggaatgcctcgacgtcgagaatttgtgatgcaggtgaaggtaggcaatgaagttgctacaggaacaggacctaataaaaagatagccaaaaaaaatgctgcagaagcaatgctgttacaacttggttataaagcatccactaatcttcaggatcaacttgagaagacaggggaaaacaaaggatggagtggtccaaagcctgggtttcctgaaccaacaaataatactccaaaaggaattcttcatttgtctcctgatgtttatcaagagatggaagccagccgccacaaagtaatctctggcactactctaggctatttgtcacccaaagatatgaaccaaccttcaagctctttcttcagtatatctcccacatcgaatagttcagctacaattgccagggaactccttatgaatggaacatcttctacagctgaagccataggtttaaaaggaagttctcctactcccccttgttctccagtacaaccttcaaaacaactggaatatttagcaaggattcaaggctttcaggtatgaattaaaagcaaaaacaaaaaacaaaacaattcattagcctcagattcttcatctgtatacatcacaaggctcattcttgcctgctagtatggcctacatgccacttacgttttaagttatttaggaacacaaaggacagacaaaaaagccatatgcacatgcctcattttctcttatttttgatctatctagtaattcttttgctgcctgtctcttctccattttccttcttcttttttaagcatttttcatattcttcactgtcttctatttggtcttgattaggtgcatctatctcttcgctctgtcttccacaaacaaaaattctgccttcagacatttggtgttagtatttcacactcagttctccctttttttacataaggattgagtttctttttatgatgattttacctttatagcaattttgaattttgcattctattgctagtattgattcaggtacaccattaagatacaacattctagaagtctattaccttaggagttaattaaacatgatatttgaagaataatgaaatgctttatagttgtttgaggcataacaatgtgtatttgttttactggatcatgttttgaactgactagggagggtagcacctgcctcagatagtaccaacaattctgtttcactgggtagtctaaaactagcttatagtttaacttaacttgttgtgtatgtgaatttagggatggaaactttttttcccctatttattctttgtttccttctgggaaaaaaccccacaaaaatcagcactcctttatggatacattggagcttttgaaagaattgtaaactctaggaaggggaaatatctgtgtcttgatttcttagttgccttgaaaatcatgtactgaactgtaaccgctaacttgactggatgaactagtttgcttgtgtgtagagagtgtattgcttcctcagatttcactgttttcatctccttttccatcttagtctttattccttaagaccaaaaactgtaatatcctttagaaatgctctagaagatctgtattgtgtagaatgatcatgtatttataaatattttacaagtttagattataaaatgaaaaagaaggtcatgtgttttggggggtattttgcatgttcggatttttttttcacttcaccgaacccttctgattctttcaaactattgccaggtagttgttagtgtttctaattggactcttaatatgaacttcaagaagctgttaccagttatcggctctgtcatctgaaattttaaccacttaatttaaagttacaattttagaatttgtttttgttgttttaccttaagaaacacaataaatcactgtttaaaaaagatctcaatttatataaagtactggaaaaaagctaagtaatttttagttctatctataatctccgtaggatgaattagaaataaattgtgatgaaaagaaattaactgcttatttatgaatctaatcatttagaaatgtctgagagtaacactgcattcttatagaaacaaagcacaaattgcattcaagctctgaattgattttttgcttggagctgttgttacagtagctgtaattttgctaccagaatgtcttaattttttaaatttgtttttatttctaagctcttggcaatgacaataattataattttaacatatcttcactgtagtcaacatgtagagtctgcttccctcattattgcattgctaaggcctttttaaaaagcttatgcttacataatatactcttttttatggacacgttatatgtttccaaatctgtgtattgtgatttttacatactaatgaatataaacaggtgattttaaaatattactgtgcttctttggttgaatgagctggtattgatgtaaaatactctgtcattgatggaccactacctgcagctaagcagtgagcagaatctccgggaaatgacttagtctggccacatgcatagcccatcttcataatgtcgcagcagaaggttctttgtggttaaaagttttaaagcctatttctttataggtaaccctctcaggtatatttacctggtagaaaaacatgtagattgtttctattacttaaatgttttaattggactgtagtttagaaattacaggaccagcttgttacagattatacactattctgttacttttatttctgaaacttaaaaacaataaattctttttctgtgtttctaggttagaacttttttattttattgcacactgaacagatactgttgcttattgaatattgtgtaaacccttctttggctttccttgcccattgcaatttgatttaagcctactagagccattgtatgtgacagctatattgtattacaaagtaaaaatatatgagtgtattgaaaacaaaaaaaaaaaaa

SEQ ID NO: 3707 - DNA, 2449 bp, Homo Sapiens
  NM_014394
agtgtggccgcttttccgacagaggcctgcccgtgattggctgctcgtactatttacgtcctttcgatgttgcgtcatgcagtgcgccggaggaactgtgctctttgaggccgacgctaggggcccggaagggaaactgcgaggcgaaggtgaccggggaccgagcatttcagatctgctcggtagacctggtgcaccaccaccatgttggctgcaaggctggtgtgtctccggacactaccttctagggttttccacccagctttcaccaaggcctcccctgttgtgaagaattccatcacgaagaatcaatggctgttaacacctagcagggaatatgccaccaaaacaagaattgggatccggcgtgggagaactggccaagaactcaaagaggcagcattggaaccatcgatggaaaaaatatttaaaattgatcagatgggaagatggtttgttgctggaggggctgctgttggtcttggagcattgtgctactatggcttgggactgtctaatgagattggagctattgaaaaggctgtaatttggcctcagtatgtcaaggatagaattcattccacctatatgtacttagcagggagtattggtttaacagctttgtctgccatagcaatcagcagaacgcctgttctcatgaacttcatgatgagaggctcttgggtgacaattggtgtgacctttgcagccatggttggagctggaatgctggtacgatcaataccatatgaccagagcccaggcccaaagcatcttgcttggttgctacattctggtgtgatgggtgcagtggtggctcctctgacaatattagggggtcctcttctcatcagagctgcatggtacacagctggcattgtgggaggcctctccactgtggccatgtgtgcgcccagtgaaaagtttctgaacatgggtgcacccctgggagtgggcctgggtctcgtctttgtgtcctcattgggatctatgtttcttccacctaccaccgtggctggtgccactctttactcagtggcaatgtacggtggattagttcttttcagcatgttccttctgtatgatacccagaaagtaatcaagcgtgcagaagtatcaccaatgtatggagttcaaaaatatgatcccattaactcgatgctgagtatctacatggatacattaaatatatttatgcgagttgcaactatgctggcaactggaggcaacagaaagaaatgaagtgactcagcttctggcttctctgctacatcaaatatcttgtttaatggggcagatatgcattaaatagtttgtacaagcagctttcgttgaagtttagaagataagaaacatgtcatcatatttaaatgttccggtaatgtgatgcctcaggtctgcctttttttctggagaataaatgcagtaatcctctcccaaataagcacacacattttcaattctcatgtttgagtgattttaaaatgttttggtgaatgtgaaaactaaagtttgtgtcatgagaatgtaagtcttttttctactttaaaatttagtaggttcactgagtaactaaaatttagcaaacctgtgtttgcatatttttttggagtgcagaatattgtaattaatgtcataagtgatttggagctttggtaaagggaccagagagaaggagtcacctgcagtcttttgtttttttaaatacttagaacttagcacttgtgttattgattagtgaggagccagtaagaaacatctgggtatttggaaacaagtggtcattgttacattcatctgctgaacttaacaaaactgttcatcctgaaacaggcacaggtgatgcattctcctgctgttgcttctcagtgctctctttccaatatagatgtggtcatgtttgacttgtacagaatgttaatcatacagagaatccttgatggaattatatatgtgtgttttacttttgaatgttacaaaaggaaataactttaaaactattctcaagagaaaatattcaaagcatgaaatatgttgctttttccagaatacaaacagtatactcatgattgctaagtgtttttttatttttgcatatttattgaactgtctaattgaatacagcttgctcttgtcacctcttcaagctttcaagcctttatagaaaagcttctttgtggcttacactggaaattatgaaagcagtttttctcctaagacttttggtttctcgcattgcctctcagactaagcactaaaaagcaaagcaaaacagaactagttctgtcttaatgaaatatatcaacccaaaagtgtaatgaggaaaatgcttcattagtttcccctagcagacttttacttctcttacactgctacaccattactttcttgagacatttgtaagttctttgatacagaagagttatatttagaagtctttaatgaaggg

SEQ ID NO: 3708 - DNA, 4894 bp, Homo Sapiens
  NM_014396
ctgtcaggtgactctcccgtggcgccatggcggaagcagaggagcaggaaactgggtcccttgaagaatctacagatgagtctgaggaagaagagagcgaagaggaacccaagctgaagtatgaaaggctttccaatggggtaactgaaatacttcagaaggatgcagctagctgcatgacagtccatgacaagtttttggcattgggcacacattatggcaaggtttatttacttgatgtccaggggaacatcactcagaagtttgatgtaagtcctgtgaagataaatcagattagcttggatgaaagtggagagcacatgggtgtgtgttcagaggatggcaaggtgcaggtatttggactgtattctggagaagaatttcacgagacttttgactgtcccattaaaattattgctgtgcacccacatttcgtgagatccagttgcaagcagtttgtgaccggagggaagaagctgctactgtttgaacggtcttggatgaacagatggaagtctgctgttctgcatgaaggggaagggaacataaggagtgtgaagtggagaggccatctgattgcttgggccaataatatgggtgtgaagatttttgacatcatctcaaagcaaagaatcaccaatgtgccccgggatgatataagtcttcgcccagacatgtatccctgcagcctctgctggaaggacaatgtgacactgattattggctgggggacttctgtcaaggtgtgctcagtgaaggaacggcatgccagtgaaatgagggatttgccaagtcgatatgttgaaatagtgtctcagtttgaaactgaattctacatcagtggacttgcacctctctgtgatcagcttgttgtactttcgtatgtaaaggagatttcagaaaaaacggaaagagaatactgtgccaggcctagactggacatcatccagccactttctgagacttgtgaagagatctcttctgatgctttgacagtcagaggctttcaggagaatgaatgtagagattatcatttagaatactctgaaggggaatcacttttttacatcgtgagtccgagagatgttgtagtggccaaggaacgagaccaagatgatcacattgactggctccttgaaaagaagaaatatgaagaagcattgatggcagctgaaattagccaaaaaaatattaaaagacataagattctggatattggcttggcatatataaatcacctggtggagagaggagactatgacatagcagcacgcaaatgccagaaaattcttgggaaaaatgcagcactctgggaatatgaagtttataaatttaaagaaattggacagcttaaggctattagtccttatttgccaagaggtgatccagttctgaaaccactcatctatgaaatgatcttacatgaatttttggagagtgattatgagggttttgccacattgatccgagaatggcctggagatctgtataataattcagtcatagttcaagcagttcgggatcatttgaagaaagatagtcagaacaagactttacttaaaaccctggcagaattgtacacctatgacaagaactatggcaatgctctggaaatatacttaacattaagacataaagacgtttttcagttgatccacaagcataatcttttcagttctatcaaggataaaattgttttattaatggattttgattcagagaaagctgttgacatgcttttggacaatgaagataaaatttcaattaaaaaggtagtggaagaattggaagacagaccagagctacagcatgtgtatttgcataagcttttcaagagagaccaccataaggggcagcgttaccatgaaaaacagatcagtctttatgctgaatatgatcgaccaaacttacttccctttctccgagacagtacccattgcccacttgaaaaggctcttgagatctgtcaacagagaaactttgtagaagagacagtttatcttctgagccgaatgggtaatagccgaagtgccctgaagatgattatggaggaattacatgatgttgataaagcaatcgaatttgccaaggagcaagatgatggagagctgtgggaagatttgattttatattccattgacaaaccaccatttattactggcttgttaaacaacattggcacacatgttgacccaattctactgattcaccgtattaaggaaggaatggagatccccaatttgagagattccttggttaaaattctgcaagactacaatttgcaaattctgcttcgtgaaggctgcaagaagattctcgtagctgactctttgtccttactgaagaaaatgcaccgaactcaaatgaaaggtgttcttgttgatgaggagaacatctgtgagtcgtgcctttcccctattcttccatcagatgcagctaagcccttcagcgtggtggtcttccattgccggcacatgttccacaaggagtgcctgcccatgcccagcatgaactctgctgcacagttctgcaacatctgcagtgctaagaaccgtggaccaggaagtgcaattttggagatgaaaaaatagctcatttctccttgtcagtctccttgtcaccactctttttgagactgtttttgcaacaacaaaagcatttgttgacactcgtgctgttaagagatttgtttatgtttatattatactcaaaaacaatttcttcatctattcctgtactaatggtttctctttgcagttcacagagaatttggggctctcttcatgccttgaaattttggggtccatagtgaatattttgttatttatttgtttggctcattctttatatagtaatggaaacataagtctaggagttagaaatgaattttttagaccttagtaaaaccatttaaccataaaatggacaactgagaattctcccagctgcctgaaagcgtcgccaactgtggttatcctgcaagctgctacctgcaacttggacgttgtttccacgtgctctgctggctacgattcttgcattctgggtttggcttttttctgtgtcatcaactatggttatcctctaaataggcatttaatgaaacattgtacaaattgtcactcatttgatgacacctgggaataacattagcaggctgatgtcctgcaccattatgtttactaatcacatgttctgtgtgctgtgacgactgtcaaagagtatctggccatggcggacactcagcatttgttgattgaataaatgttagctcttctcattgtgaaggactcacttttactgggataaacaaatgcagttaagaattctggcacccttgtaaggaagaaaagagagttcaacaccttcgagtctgagcgcttgtggctagagtttgccaggagggaggaaaccagtgaccctgaaaactgagggtgcctcaggagcagtgggaccacctgatgctgaaggacggactaatgatgtttcctcttgccttctctggtgcctccattgccctcatggaacagagcatatcatagagggagaaaagtcaaacttgtaattgtgtcttacagttactggcttcatcttccttgggatatatggtcatcctctaatgagtgtaaaagtgcgcaaaacacatccttattgttcctgatctcttagtcccataaatgggaacaaatacagctttctgcttctttctttttggggaaaggacagggtgctagtgagtactgacagcatgccagctaccgaagtcacccagccattcccatgagcagcagttcatttaattgtcacagcgtcgccaggaagaagatctgataaacctaggtttacagataaagaaagcaaaatgtagagatgttgttgaggtcacagaggtgactgcctaacttcagagcagggcttctgatccctttaagaaattacagggccagccgggcatggtggctcacgcccgtaatcccagggctttgggaggccttggcaggtggatcacctgagatcgcacgttcgagaccagcctgaccaacatggagaaaccccatctctactaaaaacacaaattagccaggcgtggtggtacatgcctgtaatcccagctactcaggaggctgaggcaggagaatcacttgaccccaggagacgtaggttgtggtgagctgagatcgcgccattgcactccagcctgggcaacaagagcaaaactccgtctcaaaaaagaaaagaaaagaaaagaaatcatagggccaagttcaaaggaaatgcacagaacatatcttcacattagagttaagaattctctagcaaacaacagatttttttgttgttgttagtcacaaatacttagaactggaaggctctttgttattattgaatgtacccctcagccttctcagcatttccttatcccaagactagtgtgctttctgctacactgctagttttcagttttgttcttacccaattgttttttcttttcaacattaccaatttacagattcagtttattacatttacattaatcctcacttatgatttgagcaagctcatttccagaaaagtttactttaagatcatcaataggatttgctaatttcagtgaagtcattttgcttcaggggtaaattatcctagttaccaagtcctatttggacataaagaaaatcctacttatagaaaaggagaaaataattaaacagtcttcatttttaagtaactgatttaaaaggaaaataataaaatatgttcgtttatcatttcagaaattgctgtaacacactggaaaattcctgaacaatatagattttatcgttaataaaaaacactagctttcgttccttagaatgtcttttcttttgaataaacagtattgggtgattta

SEQ ID NO: 3709 - DNA, 1912 bp, Homo Sapiens
  NM_014399
aggggctgggcggggctcgggctcctgctccggctcagctgcggcggccgcaggttccaaagcgggtccgagccgccgccgcgcgcgcgccgcgcactgcagccccaggccccggccccccacccacgtctgcgttgctgccccgcctgggccaggccccaaaggcaaggacaaagcagctgtcagggaacctccgccggagtcgaatttacgtgcagctgccggcaaccacaggttccaagatggtttgcgggggcttcgcgtgttccaagaactgcctgtgcgccctcaacctgctttacaccttggttagtctgctgctaattggaattgctgcgtggggcattggcttcgggctgatttccagtctccgagtggtcggcgtggtcattgcagtgggcatcttcttgttcctgattgctttagtgggtctgattggagctgtaaaacatcatcaggtgttgctatttttttatatgattattctgttacttgtatttattgttcagttttctgtatcttgcgcttgtttagccctgaaccaggagcaacagggtcagcttctggaggttggttggaacaatacggcaagtgctcgaaatgacatccagagaaatctaaactgctgtgggttccgaagtgttaacccaaatgacacctgtctggctagctgtgttaaaagtgaccactcgtgctcgccatgtgctccaatcataggagaatatgctggagaggttttgagatttgttggtggcattggcctgttcttcagttttacagagatcctgggtgtttggctgacctacagatacaggaaccagaaagacccccgcgcgaatcctagtgcattcctttgatgagaaaacaaggaagatttcctttcgtattatgatcttgttcactttctgtaattttctgttaagctccatttgccagtttaaggaaggaaacactatctggaaaagtaccttattgatagtggaattatatatttttactctatgtttctctacatgtttttttctttccgttgctgaaaaatatttgaaacttgtggtctctgaagctcggtggcacctggaatttactgtattcattgtcgggcactgtccactgtggcctttcttagcatttttacctgcagaaaaactttgtatggtaccactgtgttggttatatggtgaatctgaacgtacatctcactggtataattatatgtagcactgtgctgtgtagatagttcctactggaaaaagagtggaaatttattaaaatcagaaagtatgagatcctgttatgttaagggaaatccaaattcccaattttttttggtctttttaggaaagattgttgtggtaaaaagtgttagtataaaaatgataatttacttgtagtcttttatgattacaccaatgtattctagaaatagttatgtcttaggaaattgtggtttaatttttgacttttacaggtaagtgcaaaggagaagtggtttcatgaaatgttctaatgtataataacatttaccttcagcctccatcagaatggaacgagttttgagtaatcaggaagtatatctatatgatcttgatattgttttataataatttgaagtctaaaagactgcatttttaaacaagttagtattaatgcgttggcccacgtagcaaaaagatatttgattatcttaaaaattgttaaataccgttttcatgaaatttctcagtattgtaacagcaacttgtcaaacctaagcatatttgaatatgatctcccataatttgaaattgaaatcgtattgtgtggctctgtatattctgttaaaaaattaaaggacagaaacctttctttgtgtatgcatgtttgaattaaaagaaagtaatggaagaattgatcgatgaaaaaaaaaaaa

SEQ ID NO: 3710 - DNA, 1585 bp, Homo Sapiens
  NM_014402
cttgccggaaatgacgaacgagtcaaccggatcggtgactgtggagggcgagctgagccctggccgccgccacaatgggccgcgagtttgggaatctgacgcggatgcggcatgtgatcagctacagcttgtcaccgttcgagcagcgcgcctatccgcacgtcttcactaaaggaatccccaatgttctgcgccgcattcgggagtctttctttcgcgtggtgccgcagtttgtagtgttttatcttatctacacatgggggactgaagagttcgagagatccaagaggaagaatccagctgcctatgaaaatgacaaatgagcaacgcatccggatgacggttccctgtctctgaaagacctttctctggaagaggagtctgcattgtagtgtctcaaagacacaataaacttcctatggtctgcactgttgtgatattacatttttgtgagtagaatcctgtgtgaccactaatattcaagttcatgaagcgcccctcctcagcatgagtcttgaagttttgcctggtctcgggttttggtgaaagagcagggctccccctttgttccattatctacaagaaagtagctgcaggtactcctgcatctaaccatttgtgggtgacatgggctatggcgagtgctggttcttggccctctgctcccatagcaacaataaagtctactaactatattgtaattagtatgtgtcagggacgcttttattttttattttttgagatggagtcttgctctctcacccaggctggagtgcagtggtgtgatctcggctcactgccatctgtgcctcctgggttcaaacgattctcctgtctcagcctccgagtagctgggattacaggtgcaggacaccacacctggctaattttttgtatttttagtagagacaggtttcaccatgttggccaggctggtctggaactcctgacctcagatgatctgtgcgcctcagcctcccaaagtgctgggattacaggcgtaagccatggtgctctgggcctcaaatactcttcttagctacacaaatgaactgttaaacctcacaagcacctttaacgtatcctcatttggcagatgaggaaatgggcacagagagattaagtaatttgccagaaattatacagcagtgaatggtggagtcttgcactaaagtgatgctcttaaaactatgctctattgcaggggtgtccaatcttttagcttccctgggccacacataaaatacgctaacattacaatagctgataagctttaaaaaatggcaaaaaaaaccctcagcgttttagaaagtttacaaatttttgttgggtcggattcaaagccatcctgggctgcttgctgcccaggactgcggttggacaagcttgctctactgcctttcctcctaaggcaggccttagcctgaggggatatcagctataaaacggatgaggtgatctcttagcctccacagcagttttctgtttctgtgccaggaggccaacaatgttttcaaccatatgtggttcataaagcctcaaagatttactctggccctttatgaataaagtttacccctgatct

SEQ ID NO: 3711 - DNA, 2569 bp, Homo Sapiens
  NM_014411
gtttgatttttgtgggccttacttttcccatttgctcatgtatgtctatattcctatatctaatgtttcttaaaagacaaatctgactgtgtaggtgcatttgtttaaaaaatataactccccattgcctctgggataaagtcttatctcagtttacatatattcttgataacctctccaactttatgtctcaccacccccactcacttcgtaattcgtgccttatcagaatggacctgttatactggcagttcaccatatataccattacattttgtttctcccatctctcaggtagacttacactttcggcccagcacatcagtcatcgcccttgcttgctttcctattcactcctgttctggaaggtgcaccaccttttcttggaaggcttcccttgctctcccaggctagatgagatgtccttccatcagttcccacagcaccctgtgcatgtatctgttgtgcacttaccaatagtatacaagggatctatgacccaagtctctccccactagcttgtaagctcctcacagacaggaaccatgttttgtctttgtactccagtgcctagtatataagagatactcaataaataaatatttgtcaaatcaactaattgattccttgtgacctaattctagagaatgggaagaaggcctgttattttgttgtcctttatggttctttaggaaagctctccaagcttggcatttgtcagggtgggaggaaaactgttgaagtattaagactggacacatggctgctaattcatcagcttatcattgaaaaagtccatagccaaaacctgactgtgcacttactataggaccctgacctgcctgggtctccctgtctctccagccagtatatttaaaggtaatgagataatgatgagtgttttgaaaaatgtttagtgttcaaatagaaaccattcgtgtcccttcactctctgaacatagtctgcaaatctctccctctctggtatgtttctgttttgtggattagactgctaaataagcgaagagttaattttgaagttcaggtcaacaaattcctgtttggagacgggctgttcctgaataccaggttgttatctgtctattacagccccttcacttctgggctcctggccctttgcgaagtacttcagaaagcctagagagaagagagggccctcaaatcccattccagcccctaaatgaaagtggcatcacaaggagaaaagtggaggtagaaatgtaccatgggggacgttgccccattgcctttcttcccctgactactgggcttcctctatcagcttttaacgcctggaagtagctgagtctccagtcactggtggccttccccaagtgagctcagcagcatgtgctaataggtgccaatactgtgctggctccagtgggattcctctctgcaaagctgctggcttagcttgactgtttccctattcctctccttagaactttcatagccagtcaagcatagaattgcatccattcttctgaaataggtactgtgcctaatttttcattggcttggccaagattctgttacctgtaattatgtcatatgggctgactggtgtaggtttggtaggcctcactgctctccagaggctagtgttcctatcccaggatggctgttgggattaggagtggaatgaggaatagtttaggaccacaagagatttggcctccttggaacatgtaggaaggcctcaaggatgtaattctagcccagggaagaaaatccttttcagcagacgcttcccttcccttcccctagggaatgtgtccctactatagtaaactcttccttaagagagttttatgttttctctgtcagatcaatttgtttttcttaatgttgttcctatcaaaaaaaaaaaaaaggaagaaatacagtcctcagacctgacagtttcatttttccccccaagtagaagcaatagaaaccttagcagttccaagactcctggcactcacttttcctctccatctttaggtctaacccagctcagcccagagtaaagacataaaagcctcacatgtgatttcctcttgcattttttctgctagaagggtccacagtacttactttatgcctcatctcaattgaagctggatgatgaggatagtgggcagtgattgcaattggggaatgcatgtactggatcacataaggtcatgaaagtccttgaaacagagccttgccaagcagaacccttgccactcatggtattcgatacagtctacccatctgacatgaaatgatattcttaatgagccattcctatggaagatagctattgccaggcacattcagtctcctggtctccctctcatagctatgtagggcctatgacctagaataaatggaaaaatgttatcaggaggaagagactgctggactcccctgagaggtagggtttgtgctaggagagctgggtgccatttatttcattttgatatatcaggtgctcctagtaacaattcctagtttctcttacctctgtaatcatcctgaatagtcactgcttcttgagctttggtgagtgttctct

SEQ ID NO: 3712 - DNA, 4465 bp, Homo Sapiens
  NM_014413
ccccagtgaaggtgcgcgcgtggcggaggctggttttccgtctggtgaggggttacttccgggtcggacggcgctagctgcagcatcggagtgtggcagtgctgggctggccggcgggctgggctgcggcccgcgcgcggccggcgatgcaggggggcaactccggggtccgcaagcgcgaagaggagggcgacggggctggggctgtggctgcgccgccggccatcgactttcccgccgagggcccggaccccgaatatgacgaatctgatgttccagcagaaatccaggtgttaaaagaacccctacaacagccaaccttcccttttgcagttgcaaaccaactcttgctggtttctttgctggagcacttgagccacgtgcatgaaccaaacccacttcgttcaagacaggtgtttaagctactttgccagacgtttatcaaaatggggctgctgtcttctttcacttgtagtgacgagtttagctcattgagactacatcacaacagagctattactcacttaatgaggtctgctaaagagagagttcgtcaggatccttgtgaggatatttctcgtatccagaaaatcagatcaagggaagtagccttggaagcacaaacttcacgttacttaaatgaatttgaagaacttgccatcttaggaaaaggtggatacggaagagtatacaaggtcaggaataaattagatggtcagtattatgcaataaaaaaaatcctgattaagggtgcaactaaaacagtttgcatgaaggtcctacgggaagtgaaggtgctggcaggtcttcagcaccccaatattgttggctatcacaccgcgtggatagaacatgttcatgtgattcagccacgagcagacagagctgccattgagttgccatctctggaagtgctctccgaccaggaagaggacagagagcaatgtggtgttaaaaatgatgaaagtagcagctcatccattatctttgctgagcccaccccagaaaaagaaaaacgctttggagaatctgacactgaaaatcagaataacaagtcggtgaagtacaccaccaatttagtcataagagaatctggtgaacttgagtcgaccctggagctccaggaaaatggcttggctggtttgtctgccagttcaattgtggaacagcagctgccactcaggcgtaattcccacctagaggagagtttcacatccaccgaagaatcttccgaagaaaatgtcaactttttgggtcagacagaggcacagtaccacctgatgctgcacatccagatgcagctgtgtgagctctcgctgtgggattggatagtcgagagaaacaagcggggccgggagtatgtggacgagtctgcctgtccttatgttatggccaatgttgcaacaaaaatttttcaagaattggtagaaggtgtgttttacatacataacatgggaattgtgcaccgagatctgaagccaagaaatatttttcttcatggccctgatcagcaagtaaaaataggagactttggtctggcctgcacagacatcctacagaagaacacagactggaccaacagaaacgggaagagaacaccaacacatacgtccagagtgggtacttgtctgtacgcttcacccgaacagttggaaggatctgagtatgatgccaagtcagatatgtacagcttgggtgtggtcctgctagagctctttcagccgtttggaacagaaatggagcgagcagaagttctaacaggtttaagaactggtcagttgccggaatccctccgtaaaaggtgtccagtgcaagccaagtatatccagcacttaacgagaaggaactcatcgcagagaccatctgccattcagctgctgcagagtgaacttttccaaaattctggaaatgttaacctcaccctacagatgaagataatagagcaagaaaaagaaattgcagaactaaagaagcagctaaacctcctttctcaagacaaaggggtgagggatgacggaaaggatgggggcgtgggatgaaagtggacttaacttttaaggtagttaactggaatgtaaatttttaatctttattagggtatagttggtacaatgcttcgttgtatttagtaagcctttacaagacttgttaaagatgtcagagtgccccaagctgccgttccttcccttcctgccccacaagctccttttcctgaatttcctacctaaatattaaccatatgcctagtctctgaaactaaaaacttggacctcatcctcaattattttctcctttcaactctgttgaccctctgtctggtcttcctctagaaggtaccgcagaaattgatgtgtgctccctgccctcgtcactgcccaagcccgggcctgcacatactcactggactgttccagttttgacagctgccagtcttcctgcccctttcacactgcagctgaagttcattacctgaaggacgcctcatcatttcattccttggctccaaaccttctgctgcctctaagataaaagctcaacttcttaacagtgtacagtgtgcaacttccaacctttttatctgttctctccaccttcagtttagcgtcattccaaaaccacacccttgcaaagctttgtactccgcaccccagatgatctccaggcagctcagatctctttcctgcctttgccctgcactgttccccggtacttcctcctttattgtagcactcagctccccagccaatctgtacatccctcagaggcagcgatctgatgaattggtttttgaatcccagaaagggtctgccatggagttggcagtcatcacggtagatggcgtatgattttgctgaattttaaataaaatgaaaaccataaattacatgatgcttttattgacacttgacaactggcctaaataaaaagactctgactctaatacaagtccccttactgataataggcatgaaagagcaccattcttaaaatctaaaccctttaaaatcagttacggcaattcacttaaggagcttgagggccgtgttaaaaggagccaggttttcacaagacctcatccacctctgcacattggctggcactgtcacactgcagcctccgatctgctggagtacagaccacagcaccacgtctgctacggtgagttcattcccagcgagccaagggctcttcccaagagcagagttcatggagcggaaaacagcggctttttctttactgcttccctcttttaactgaaaaatcgcaatatctacccagctatctataagggttgcgttgacagcattatgcttctggccaaacagagagaacaagaaacgtgcaatgttcccttcgccttcgatggggcacatcgtctggatgctgaatttcatctgcgtcttcggcactgaaaagaaaaaacacgccaggtagcatcaccagagcagccctgagggaagtactcgcacagtggggaaggggacagtcaccaaacaccacagactgatgacatgggaaagggtgttttcaagaagaacatcacattttcagtctgtctctaagatgcttactactgaaaagggtttaagtgcaaactatgttaaaaaagtaaccaaagagtcattcctggtatttgattatgacacttctgaagctagaagggacctcagaccacctgctccaatccctgctgcctaaggttttgggggctgagggctggaaacccaggagctgcatctcccaggctcttggcctcataatcgccttctgtgagactgagggcaattaagatatgaatgacatgaactcgcttatctccatatcaacataaaccagaagaggcatacatctgtgggatagtcaatacataacatcctatctttatatggccatatgagaagataacttcagtgtccctatgatggtaagttcttgaatgtgagggcaagatggctgtgatagccatgactccccgctttgcctggttggacagaacccccttccccaaatgctcacagtcccccccttgagctgtgtctcactcagagaccctaaattttgcagacgaacaagggcatctttgcgttgcttcatctctgctcctcctctagaactatcccacaggctttctagacttagaatatctgacctgatgcaaatcgctatgtggccagtatgccacagaatgtcctaaacccttgctgcctcttatcaaaaccatgttgcacatctcatcatatagtacagctaacccttgaacagtgggggggttagggacactgacccccgactgctgtgcagtcgaaaatccacataaaacttctgactccttcaaaacttaagcactaatagcctactattcatgggaagccttacccatcacagttgattaacacgttttgtatggtctgtatattatatgctatattcttacaataaacttgagaaaatgttaagaaaataa

SEQ ID NO: 3713 - DNA, 2058 bp, Homo Sapiens
  NM_014426
gagaggcgcccaggcggcggcggcggcggcccagcttcttctttcctcgcacagccaggcggcccctgctcgagtcccgcgtcgccatggccgcggttcccgagttgctgcagcagcaggaggaggaccgcagcaagctgagatctgtatctgtggacctgaatgttgatccctcgcttcagattgacatacctgatgcgctcagtgagagagacaaagtcaaatttacagtgcacacaaagaccacactgcccacgtttcagagcccagagttttctgttacaaggcaacatgaagactttgtgtggctacatgacactcttattgaaacaacagactatgctgggcttattattccacctgctcctacgaagcccgactttgatggtcctcgagagaagatgcagaaactgggagaaggtgaagggtctatgaccaaagaagaatttgccaagatgaaacaagaactggaagctgagtatctcgctgtgtttaagaagactgtgtcctcccatgaagtctttcttcagcggctttcttctcaccctgttctcagtaaagatcgcaactttcatgttttcctggaatatgatcaggatctaagtgttaggcggaaaaatactaaagagatgtttggtggcttcttcaaaagtgtggtgaaaagtgctgatgaagtcctttttactggagttaaggaggtagatgacttctttgagcaagagaagaacttccttattaactattacaataggatcaaagattcttgtgtgaaagctgacaaaatgaccagatctcataaaaatgttgccgatgactatatccacaccgcagcctgcttacatagcctggctttagaagagcccacagtcatcaaaaagtacctattgaaggttgctgagctatttgaaaaactaaggaaagtagagggtcgagtttcatcagatgaagatttgaagctaacagagctcctccgatactacatgctcaacattgaagctgctaaggatctcttatacagacgcaccaaagccctcattgactatgagaactcaaacaaagctctggataaggcccggttaaagagcaaagacgtcaagttggctgaggcacaccagcaggagtgctgccagaaatttgaacaactttccgaatctgcaaaagaagaactgataaatttcaaacggaagagagtggcagcatttagaaagaatctaattgaaatgtctgaactggaaataaaacatgccaggaacaatgtctcccttttgcagagctgtattgacttgttcaagaataactgatatgccttcactcagaagaaaagaaatgaatgtgaaagaaagccaagcatcacttgcacttaaatcattaccacggaagatatattagcttcaactttagtttaaaattatgtgaataaatattttgatttctacaaatcttaacatttaaccatgttggtttaaaaatattattgcttgctacttggacataactaatttttccttgtgcatttaatacctctgggcagaatccaaatactgggttctcccgtagttcgtctttagttactaagaaagggtgtaggacacattagccttctggaaacaagtagaagccatcacctggcccatgtccctacaaacccatgattgtcagggaggtgccagttacagcaggtgattcagctacttgaggtcggtaacagaccttccattcctcactgaaggtggggtttgtgtttttgttttgccctgttactccactggtagtcatctggtgtttgtactataacaacagcaagaaaatctcatttatctttatatactctttgcacctcctttttttagtcgagatataaatatttgaggggagagaaatatctacaggtatatatggaaacaaataatgtggtctgctttataagatggccagatctacattaggaaaagtataagccccctccctaatggccgctggggggtgagggcggtgtgttgtatgtctttgggtgtttgtttttttataaagcatataataaaataatcgtgctactaa

SEQ ID NO: 3714 - DNA, 2859 bp, Homo Sapiens
  NM_014428
atgaacctgtgtggcctcatgcccatcttccccgctcccctcgaccaggtggctgacatggaggagctgaccatctgggaacagcacacggccacactgtccaaggacccccgccggggctttggcattgcgatctctggaggccgagaccggcccggtggatccatggttgtatctgacgtggtacctggagggccggcggagggcaggctacagacaggcgaccacatcgtcatggtgaacggggtttccatggagaatgccacctccgcgtttgccattcagatactcaagacctgcaccaagatggccaacatcacagtgaaacgtccccggaggatccacctgcccgccaccaaagccagcccctccagcccagggcgccaggactcggatgaagacgatgggccccagcgggtggaggaggtggaccagggccggggctatgacggcgactcatccagtggctccggccgctcctgggacgagcgctcccgccggccgaggcctggtcgccggggccgggccggcagccatgggcgtaggagcccaggtggtggctctgaggccaacgggctggccctggtgtccggctttaagcggctgccacggcaggacgtgcagatgaagcctgtgaagtcagtgctggtgaagaggagagacagcgaagagtttggcgtcaagctgggcagtcagatcttcatcaagcacattacagattcgggcctggctgcccggcaccgtgggctgcaggaaggagatctcattctacagatcaacggggtgtctagccagaacctgtcactgaacgacacccggcgactgattgagaagtcagaagggaagctaagcctgctggtgctgagagatcgtgggcagttcctggtgaacattccgcctgctgtcagtgacagcgacagctcgccattggaggaaggcgtgaccatggctgatgagatgtcctctccccctgcagacatctcggacctcgcctcggagctatcgcaggcaccaccatcccacatcccaccaccaccccggcatgctcagcggagccccgaggccagccagaccgactctcccgtggagagtccccggcttcggcgggaaagttcagtagattccagaaccatctcggaaccagatgagcaacggtcagagttgcccagggaaagcagctatgacatctacagagtgcccagcagtcagagcatggaggatcgtgggtacagccccgacacgcgtgtggtccgcttcctcaagggcaagagcatcgggctgcggctggcagggggcaatgacgtgggcatcttcgtgtccggggtgcaggcgggcagcccggccgacgggcagggcatccaggagggagatcagattctgcaggtgaatgacgtgccattccagaacctgacacgggaggaggcagtgcagttcctgctggggctgccaccaggcgaggagatggagctggtgacgcagaggaagcaggacattttctggaaaatggtgcagtcccgcgtgggtgactccttctacatccgcactcactttgagctggagcccagtccaccgtctggcctgggcttcacccgtggcgacgtcttccacgtgctggacacgctgcaccccggccccgggcagagccacgcacgaggaggccactggctggcggtgcgcatgggtcgtgacctgcgggagcaagagcggggcatcattcccaaccagagcagggcggagcagctggccagcctggaagctgcccagagggccgtgggagtcgggcccggctcctccgcgggctccaatgctcgggccgagttctggcggctgcggggtcttcgtcgaggagccaagaagaccactcagcggagccgtgaggacctctcagctctgacccgacagggccgctacccgccctacgaacgagtggtgttgcgagaagccagtttcaagcgcccggtagtgatcctgggacccgtggccgacattgctatgcagaagttgactgctgagatgcctgaccagtttgaaatcgcagagactgtgtccaggaccgacagcccctccaagatcatcaaactagacaccgtgcgggtgattgcagaaaaagacaagcatgcgctcctggatgtgaccccctccgccatcgagcgcctcaactatgtgcagtactaccccattgtggtcttcttcatccccgagagccggccggccctcaaggcactgcgccagtggctggcgcctgcctcccgccgcagcacccgtcgcctctacgcacaagcccagaagctgcgaaaacacagcagccacctcttcacagccaccatccctctgaatggcacgagtgacacctggtaccaggagctcaaggccatcattcgagagcagcagacgcggcccatctggacggcggaagatcagctggatggctccttggaggacaacctagacctccctcaccacggcctggccgacagctccgctgacctcagctgcgacagccgcgttaacagcgactacgagacggacggcgagggcggcgcgtacacggatggcgagggctacacagacggcgagggggggccctacacggatgtggatgatgagcccccggctccagccctggcccggtcctcggagcccgtgcaggcagatgagtcccagagcccgagggatcgtgggagaatctcggctcatcagggggcccaggtggacagccgccacccccagggacagtggcgacaggacagcatgcgaacctatgaacgggaagccctgaagaaaaagtttatgcgagtacatgatgcggagtcctccgatgaagacggctatgactggggtccggccactgacctgtga

SEQ ID NO: 3715 - DNA, 1880 bp, Homo Sapiens
  NM_014435
acggcttacccgggctccgacagcggctgcaggtctccaagttgcggccgctggagcccgagccatgcggaccgcggaccgggaggcgcgcccggggcttccgtccctgctgctgctgctgctggccggggccgggctgtcagccgcctcgcccccagcagcgccgcgcttcaacgtgagcctggactcggtccccgagctgcgctggctgcccgtgctgcggcactacgacttggacttggtgcgcgccgcgatggcgcaagtcatcggggacagagtccccaagtgggtgcacgtgttaatcggaaaagtggtcctggagctggagcgcttcctgccccagcccttcaccggcgagatccgcggcatgtgtgacttcatgaacctcagcctggcggactgccttctggtcaacctggcctacgagtcctccgtgttctgcaccagtattgtggctcaagactccagaggccacatttaccatggtcggaatttggattatccttttgggaatgtcttacgcaagctgacagtggatgtgcaattcttaaagaatgggcagattgcattcacaggaactacttttattggctatgtaggattatggactggccagagcccacacaagtttacagtttctggtgatgaacgagataaaggctggtggtgggagaatgctatcgctgccctgtttcggagacacattcccgtcagctggctgatccgcgctaccctgagtgagtcggaaaacttcgaagcagctgttggcaagttggccaagactccccttattgctgatgtttattacattgttggtggcacgtccccccgggagggggtggtcatcacgaggaacagagatggcccagcagacatttggcctctagatcctttgaatggagcgtggttccgagttgagacaaattacgaccactggaagccagcacccaaggaagatgaccggagaacatctgccatcaaggcccttaatgctacaggacaagcaaacctcagcctggaggcacttttccagattttgtcggtggttccagtttataacaacttcacaatttatactacggtaatgagcgccggtagcccagacaagtacatgactaggatcagaaacccgagtagaaagtaagtcagcagaagagcgagttcgcccgtgctgtgaaagatgattttttaaaaaatgaaattcttgaagagctgcaccttaaaaaataagacaaagtgaaagtattgtattatgttacaaacaatgcaggctccttcctcatttaactttacaaccttgcgaagtgggtccaggagatttggagtttgtggtaaagccagtaatgggcattgtcctgcattcccttcccttcatggtttgcctcgatcctctctaagcttctatcctggcctgaataactcaaagataattggtctcagagatcaagccatatcctcaggccttatttccatcttctcatgattctgccatcatacctttgcttctccgctaatgaaatgagctggcaagacctctgttcattgtgaagtgcttctgaaagagcctaagaaaaaaggctcatctgaaagaaatggagaactctatttcgaaccaagcctgtttgaatgtgtgttagtctgatctttgatcatgtgtttccatgtaatgggagtctcgttttttataatgtttctaacgttttattgaaaaacctatggccctccttctttctcaatagctactttcttactgctttttgaaaataatatgcaaccaaattatttcttaatgtcacataattaagtaataaaatgtcaaaagaaatgttggcaaggagaataaaaaaatttccaagaaacttaaaaaaaaaaaaaaaaaa

SEQ ID NO: 3716 - DNA, 787 bp, Homo Sapiens
  NM_014439
cttcattccattttctgttgagtaataaactcaacgttgaaaatgtcctttgtgggggagaactcaggagtgaaaatgggctctgaggactgggaaaaagatgaaccccagtgctgcttagaagacccggctggaagccccctggaaccaggcccaagcctccccaccatgaattttgttcacacaagtccaaaggtgaagaacttaaacccgaagaaattcagcattcatgaccaggatcacaaagtactggtcctggactctgggaatctcatagcagttccagataaaaactacatacgcccagagatcttctttgcattagcctcatccttgagctcagcctctgcggagaaaggaagtccgattctcctgggggtctctaaaggggagttttgtctctactgtgacaaggataaaggacaaagtcatccatcccttcagctgaagaaggagaaactgatgaagctggctgcccaaaaggaatcagcacgccggcccttcatcttttatagggctcaggtgggctcctggaacatgctggagtcggcggctcaccccggatggttcatctgcacctcctgcaattgtaatgagcctgttggggtgacagataaatttgagaacaggaaacacattgaattttcatttcaaccagtttgcaaagctgaaatgagccccagtgaggtcagcgattaggaaactgccccattgaacgccttcctcgctaatttgaactaattgtataaaaacaccaaacctgctcactaaaaaaaaaaaaaaaaaa

SEQ ID NO: 3717 - DNA, 1737 bp, Homo Sapiens
  NM_014441
tagggcctcctctaagtcttgagcccgcagttcctgagagaagaaccctgaggaacagacgttccctcgcggccctggcacctctaaccccagacatgctgctgctgctgctgcccctgctctgggggagggagagggcggaaggacagacaagtaaactgctgacgatgcagagttccgtgacggtgcaggaaggcctgtgtgtccatgtgccctgctccttctcctacccctcgcatggctggatttaccctggcccagtagttcatggctactggttccgggaaggggccaatacagaccaggatgctccagtggccacaaacaacccagctcgggcagtgtgggaggagactcgggaccgattccacctccttggggacccacataccaagaattgcaccctgagcatcagagatgccagaagaagtgatgcggggagatacttctttcgtatggagaaaggaagtataaaatggaattataaacatcaccggctctctgtgaatgtgacagccttgacccacaggcccaacatcctcatcccaggcaccctggagtccggctgcccccagaatctgacctgctctgtgccctgggcctgtgagcaggggacaccccctatgatctcctggatagggacctccgtgtcccccctggacccctccaccacccgctcctcggtgctcaccctcatcccacagccccaggaccatggcaccagcctcacctgtcaggtgaccttccctggggccagcgtgaccacgaacaagaccgtccatctcaacgtgtcctacccgcctcagaacttgaccatgactgtcttccaaggagacggcacagtatccacagtcttgggaaatggctcatctctgtcactcccagagggccagtctctgcgcctggtctgtgcagttgatgcagttgacagcaatccccctgccaggctgagcctgagctggagaggcctgaccctgtgcccctcacagccctcaaacccgggggtgctggagctgccttgggtgcacctgagggatgcagctgaattcacctgcagagctcagaaccctctcggctctcagcaggtctacctgaacgtctccctgcagagcaaagccacatcaggagtgactcagggggtggtcgggggagctggagccacagccctggtcttcctgtccttctgcgtcatcttcgttgtagtgaggtcctgcaggaagaaatcggcaaggccagcagcgggcgtgggagatacgggcatagaggatgcaaacgctgtcaggggttcagcctctcaggggcccctgactgaaccttgggcagaagacagtcccccagaccagcctcccccagcttctgcccgctcctcagtgggggaaggagagctccagtatgcatccctcagcttccagatggtgaagccttgggactcgcggggacaggaggccactgacaccgagtactcggagatcaagatccacagatgagaaactgcagagactcaccctgattgagggatcacagcccctccaggcaagggagaagtcagaggctgattcttgtagaattaacagccctcaacgtgatgagctatgataacactatgaattatgtgcagagtgaaaagcacacaggctttagagtcaaagtatctcaaacctgaatccacactgtgccctcccttttatttttttaactaaaagacagacaaattcctaaaaaaaaaaaaaaaaaaaa

SEQ ID NO: 3718 - DNA, 3087 bp, Homo Sapiens
  NM_014444
ccgggcgggagtagctggtggaccccgttgagctgccgaacttccgggactcccccgcgaccccttcccagcttcccgtccgctccgccgcagcgattgtctcggtgggttgattcggcacaaaccgcccgacccaggggccggtgcgcgtgtggaaggggaagcactcccctcgtggtcgcctggaggtgcgctggaggagggggtgacataaccagggactcgaggtccgccgtgggaatgatccacgaactgctcttggctctgagcgggtaccctgggtccattttcacctggaacaagcggagtggcctgcaggtatcgcaggacttccctttcctccaccccagtgagaccagtgtcctgaatcgactctgccggctcggcacagactatattcgcttcactgagttcattgaacagtacacgggccatgtgcaacagcaggatcaccatccatctcaacagggccaaggtgggttacatggaatctacctgcgggccttctgcacagggctggattctgttttgcagccttatcgccaagcactgcttgatttggaacaagagttcctgggtgatccccatctctccatatcacatgtcaactacttcctagaccagttccagcttctttttccctctgtgatggttgtagtagaacaaattaaaagtcaaaagattcatggttgtcaaatcctggaaacagtctacaaacacagctgtggggggttgcctcctgttcgaagtgcactggaaaaaatcctggccgtttgtcatggggtcatgtataaacagctctcagcctggatgctccatggactcctcttggaccagcatgaagaattctttatcaaacaggggccatcttctggtaatgtcagtgcccagccagaagaggacgaggaggatctgggcattgggggactgacaggaaaacaactgagagaactgcaggacttgcgcctgattgaggaagagaacatgctggcaccatctctgaagcagttttccctacgagtggagattttgccatcctacattccagtgagggttgctgaaaaaatcctatttgttggagaatctgtccagatgtttgagaatcaaaatgtgaacctgactagaaaaggatccattttgaaaaaccaggaagacacttttgctgcagagctgcaccgtctcaagcagcagccactcttcagcttggtggactttgaacaggtggtggatcgcattcgcagcactgtggctgagcatctctggaagttgatggtagaagaatccgatttactgggtcagctgaagatcattaaagacttttaccttctgggacgtggagaactgtttcaggccttcattgacacagctcaacacatgttgaaaacaccacccactgcagtaactgagcatgatgtgaatgtggcctttcaacagtcagcacacaaggtattgctagatgatgacaaccttctccctctgttgcacttgacaatcgagtatcacggaaaggagcacaaagatgctactcaggcaagagaagggccttctcgggaaacttctccccgggaagcccctgcatctggctgggcagccctaggtctttcctacaaagtacagtggccactacatattctcttcaccccagctgtcctggaaaagtacaatgttgtttttaagtacttactgagtgtgcgccgggtgcaagctgagctgcagcactgctgggccctacaaatgcagcgcaagcacctcaagtcgaaccagactgatgcaatcaagtggcgcctaagaaatcacatggcatttttggtggataatcttcagtactatctccaggtagatgtgttggagtctcagttctcccagctgcttcatcagatcaattctacccgagactttgaaagcatccgattggctcatgaccacttcctgagcaatttgctggctcaatcctttatcctattgaaacctgtgtttcactgcctgaatgaaatcctagatctctgtcacagtttttgttcgctggtcagtcagaacctaggcccactggatgagcgtggagccgcccagctgagcattctcgtgaagggctttagccgccagtcttcactcctgttcaagattctctccagtgttcggaatcatcagatcaactcagatttggctcaactactgttacgactagattataacaaatactatacccaggctggtggaactctgggcagtttcgggatgtgaaaatttctggctcataaattgaaataacagccacgttcccaaggttgtaacagaagattcaaaacatcccattctagccacacacaaataaatatctgcggcttagtgataggactctaccttttctcctagaagcagttactgaacatccaggagtacaactccttcccatcattcccatgtggaagggtctctcccatcaaggagaacatgtggcatctctgatcctttacattgagaacatttgttggatatgttcatttattcaatagtcatttattgagcacctactacgtaccttggtactgttcaagctgtgggagatacagcggtaaacaaacaatatagagcagaaagttaaatattttatggttcatatgtgaaaaagtaattatgtttataaatagactaactgctggatgttaccaccaagtaagaaagcaacaggtaagataggctttctctctccctataccaagtaatttatacctacacagattgggcaattctagctaatgaaaatatacttaaaagtatttcttaggccgggcatggtggctcacacctgtaatcccagcactttgggaggccgaggcgggcggatcacctgaagtcaggagtttgagaccagcctgaccaacatgatgaaacctcgattctactaaaaatacaaaaattagccaggtgtggtggcatgtgcctgtaatcccagctactcaggaggctgagacaggagaattgcttgaacctgggaagcagacgctgcagtgagctgagattgtgccattgcattccagcccgggcaacaagagcgaaattccgtctcaaaaaaaaaaaaaaaaaaaa

SEQ ID NO: 3719 - DNA, 1238 bp, Homo Sapiens
  NM_014450
cagagactttgccaccaccagtattggggatgctgagctgcggggtacgggcctgaggagggatgggagtaagaagtgctgtggaaaccgtcaggccatgaaccaggctgaccctcggctcagagcagtgtgcttgtggactctcacatctgcagccatgagcagaggcgacaactgcacggatctactcgcactgggaatcccctccataacccaggcctggggactgtgggtcctcttaggggctgtgacgctgctatttctcatctcgctggctgcacacttgtcccagtggaccaggggccggagcaggagccatccggggcagggacgctctggagagtctgtggaagaggtcccgctgtatgggaacctgcattatctacagacaggacggctgtctcaagacccagagccagaccagcaggatccaactcttggaggccctgccagggctgcagaggaggtgatgtgctataccagcctgcagctgcggcctcctcagggtcggatccccggtcctggaacccccgtcaagtactcggaggtggtgctggactctgagccaaagtcccaggcctcgggccccgagccggagctctatgcctcagtatgtgcccagacccgcagggcccgggcctccttcccggatcaggcctatgccaacagccagcctgcagccagctgagatggagggcctggcacagcggggcgtgcactgccccagccccccgtagcaggggcatgactgtttcccaaccagcacccaaagacgggcgccattgccaagtcacaggatgtgatctaccccggacttcctatctgagcttcaagggagacatctcagggcaaagctttcgtgatggaggaggcaaagacagtagccccctccttatttcttttttctatctgttcctcttagcccccaaactcccaggttctcacttccttcttctggagtttaaccagatcctccccacccccgctccctcatagtctacccccacgcctcagtgtctcctcaggcacaggaagtgggcggtgggggaggggtaagggcctgacagtgggtgggtgggtatattcctcaggagtccacagactggagtggacctggaacttagagacgggagggacccgagcctggcttttgacctaagaaccctagcaggagaatacagtctccatcctgctgtctctgtcctgtccccaagttttcaaataaaactttccaaaaa

SEQ ID NO: 3720 - DNA, 3662 bp, Homo Sapiens
  NM_014452
gccaccacgtgtgtccctgcgcccggtggccaccgactcagtccctcgccgaccagtctgggcagcggaggagggtggttggcagtggctggaagcttcgctatgggaagttgttcctttgctctctcgcgcccagtcctcctccctggttctcctcagccgctgtcggaggagagcacccggagacgcgggctgcagtcgcggcggcttctccccgcctgggcggccgcgccgctgggcaggtgctgagcgcccctagagcctcccttgccgcctccctcctctgcccggccgcagcagtgcacatggggtgttggaggtagatgggctcccggcccgggaggcggcggtggatgcggcgctgggcagaagcagccgccgattccagctgccccgcgcgccccgggcgcccctgcgagtccccggttcagccatggggacctctccgagcagcagcaccgccctcgcctcctgcagccgcatcgcccgccgagccacagccacgatgatcgcgggctcccttctcctgcttggattccttagcaccaccacagctcagccagaacagaaggcctcgaatctcattggcacataccgccatgttgaccgtgccaccggccaggtgctaacctgtgacaagtgtccagcaggaacctatgtctctgagcattgtaccaacacaagcctgcgcgtctgcagcagttgccctgtggggacctttaccaggcatgagaatggcatagagaaatgccatgactgtagtcagccatgcccatggccaatgattgagaaattaccttgtgctgccttgactgaccgagaatgcacttgcccacctggcatgttccagtctaacgctacctgtgccccccatacggtgtgtcctgtgggttggggtgtgcggaagaaagggacagagactgaggatgtgcggtgtaagcagtgtgctcggggtaccttctcagatgtgccttctagtgtgatgaaatgcaaagcatacacagactgtctgagtcagaacctggtggtgatcaagccggggaccaaggagacagacaacgtctgtggcacactcccgtccttctccagctccacctcaccttcccctggcacagccatctttccacgccctgagcacatggaaacccatgaagtcccttcctccacttatgttcccaaaggcatgaactcaacagaatccaactcttctgcctctgttagaccaaaggtactgagtagcatccaggaagggacagtccctgacaacacaagctcagcaagggggaaggaagacgtgaacaagaccctcccaaaccttcaggtagtcaaccaccagcaaggcccccaccacagacacatcctgaagctgctgccgtccatggaggccactgggggcgagaagtccagcacgcccatcaagggccccaagaggggacatcctagacagaacctacacaagcattttgacatcaatgagcatttgccctggatgattgtgcttttcctgctgctggtgcttgtggtgattgtggtgtgcagtatccggaaaagctcgaggactctgaaaaaggggccccggcaggatcccagtgccattgtggaaaaggcagggctgaagaaatccatgactccaacccagaaccgggagaaatggatctactactgcaatggccatggtatcgatatcctgaagcttgtagcagcccaagtgggaagccagtggaaagatatctatcagtttctttgcaatgccagtgagagggaggttgctgctttctccaatgggtacacagccgaccacgagcgggcctacgcagctctgcagcactggaccatccggggccccgaggccagcctcgcccagctaattagcgccctgcgccagcaccggagaaacgatgttgtggagaagattcgtgggctgatggaagacaccacccagctggaaactgacaaactagctctcccgatgagccccagcccgcttagcccgagccccatccccagccccaacgcgaaacttgagaattccgctctcctgacggtggagccttccccacaggacaagaacaagggcttcttcgtggatgagtcggagccccttctccgctgtgactctacatccagcggctcctccgcgctgagcaggaacggttcctttattaccaaagaaaagaaggacacagtgttgcggcaggtacgcctggacccctgtgacttgcagcctatctttgatgacatgctccactttctaaatcctgaggagctgcgggtgattgaagagattccccaggctgaggacaaactagaccggctattcgaaattattggagtcaagagccaggaagccagccagaccctcctggactctgtttatagccatcttcctgacctgctgtagaacatagggatactgcattctggaaattactcaatttagtggcagggtggttttttaattttcttctgtttctgatttttgttgtttggggtgtgtgtgtgtgtttgtgtgtgtgtgtgtgtgtgtgtgtgtgtgtgtgtttaacagagaatatggccagtgcttgagttctttctccttctctctctctcttttttttttaaataactcttctgggaagttggtttataagcctttgccaggtgtaactgttgtgaaatacccaccactaaagttttttaagttccatattttctccattttgccttcttatgtattttcaagattattctgtgcactttaaatttacttaacttaccataaatgcagtgtgacttttcccacacactggattgtgaggctcttaacttcttaaaagtataatggcatcttgtgaatcctataagcagtctttatgtctcttaacattcacacctactttttaaaaacaaatattattactatttttattattgtttgtcctttataaattttcttaaagattaagaaaatttaagaccccattgagttactgtaatgcaattcaactttgagttatcttttaaatatgtcttgtatagttcatattcatggctgaaacttgaccacactattgctgattgtatggttttcacctggacaccgtgtagaatgcttgattacttgtactcttcttatgctaatatgctctgggctggagaaatgaaatcctcaagccatcaggatttgctatttaagtggcttgacaactgggccaccaaagaacttgaacttcaccttttaggatttgagctgttctggaacacattgctgcactttggaaagtcaaaatcaagtgccagtggcgccctttccatagagaatttgcccagctttgctttaaaagatgtcttgttttttatatacacataatcaataggtccaatctgctctcaaggccttggtcctggtgggattccttcaccaattactttaattaaaaatggctgcaactgtaagaacccttgtctgatatatttgcaactatgctcccatttacaaatgtaccttctaatgctcagttgccaggttccaatgcaaaggtggcgtggactccctttgtgtgggtggggtttgtgggtagtggtgaaggaccgatatcagaaaaatgccttcaagtgtactaatttattaataaacattaggtgtttgttaaaaaaaaaaaaaaaaaaaaaaaaaaaaa

SEQ ID NO: 3721 - DNA, 926 bp, Homo Sapiens
  NM_014453
acgtcacgtcgtttaatccggaaacggcggcggcggcgacaggaccgaggggccttagttggtgggcaagtcggggatcccagaaagagaagcgtgacccggaagcggaaacgggtgtccgtcccagctccggcctgccagtgagcttctaccatcatggacctattgttcgggcgccggaagacgccagaggagctactgcggcagaaccagagggccctgaaccgtgccatgcgggagctggaccgcgagcgacagaaactagagacccaggagaagaaaatcattgcagacattaagaagatggccaagcaaggccagatggatgctgttcgcatcatggcaaaagacttggtgcgcacccggcgctatgtgcgcaagtttgtattgatgcgggccaacatccaggctgtgtccctcaagatccagacactcaagtccaacaactcgatggcacaagccatgaagggtgtcaccaaggccatgggcaccatgaacagacagctgaagttgccccagatccagaagatcatgatggagtttgagcggcaggcagagatcatggatatgaaggaggagatgatgaatgatgccattgatgatgccatgggtgatgaggaagatgaagaggagagtgatgctgtggtgtcccaggttctggatgagctgggacttagcctaacagatgagctgtcgaacctcccctcaactgggggctcgcttagtgtggctgctggtgggaaaaaagcagaggccgcagcctcagccctagctgatgctgatgcagacctggaggaacggcttaagaacctgcggagggactgagtgcccctgccactccgagataaccagtggatgcccaggatcttttaccacaacccctctgtaataaaagagatttgacactaaaaaaaaaaaaaaaaaaa

SEQ ID NO: 3722 - DNA, 3212 bp, Homo Sapiens
  NM_014454
gaacccggtggctgcacagacaaaaaagccccgaatggctggagggcgttcagctgttaacagccttttggggcagagcacggatttgacagctccacaacgtgaggatatccactgaccccgcgagacggaggagaacgcttccccgaaattctctgcccaccaaagccagcgctgcaaggttgcaactttcaaactttgtttttccagaaagaagactgccctttcgtgtacaaggagagggtgagagggtgacctagcttgtagatcggctgaaggcaccagtggttccaaatgtcacccagatgtgtgttttcatgacgatttgatttctctgattttatttttacatttttcattttaaaaatacaaagcaatttttttggggcatgctgaaaggtaactgaagaccgcaaaggaaaaactattgtcatggctgaaggagagaatgaagtgagatgggatggactctgcagcagagattcaactactagggagacagcattggaaaacattaggcaaaccattttgaggaaaaccgagtatcttcgttcggtgaaagaaacacctcatcgtccatcagacgggctttcaaataccgagtcttcggatgggttgaataagctacttgctcatctgcttatgctttctaagaggtgtcccttcaaagatgtgagagagaaaagtgagtttattctgaagagcatccaggaacttggcattagaattcctcgaccactaggacagggaccaagcagattcatcccagaaaaggagatcctccaagtggggagtgaagacgcacagatgcatgctttatttgcagattcttttgctgctttgggccgtttggataacattacgttagtgatggttttccacccacaatatttagaaagtttcttaaaaactcagcactatctactgcaaatggatgggccgttacccctacattatcgtcactacattggaataatggctgcggcaagacatcagtgctcctacttagtgaacctgcatgtaaatgatttccttcatgttggtggggaccccaagtggctcaatggtttagagaatgctcctcaaaaactacagaatttaggagaacttaacaaagtgttagcccatagaccttggcttattaccaaagaacacattgagggacttttaaaagctgaagagcacagctggtcccttgcggaattggtacatgcagtagttttactcacacactatcattctcttgcctcattcacattcggctgtggaatcagtccagaaattcattgtgatggtggccacacattcagacctccttctgttagcaactactgcatctgtgacattacaaatggcaatcacagtgtggatgagatgccggtcaactcagcagaaaatgtttctgtaagtgattctttctttgaggttgaagccctcatggaaaagatgaggcagttacaggaatgtcgagatgaagaagaggcaagtcaggaagagatggcttcacgttttgaaatagaaaaaagagagagtatgtttgtcttctcttcagatgatgaagaagttacaccagcaagagctgtatctcgtcattttgaggatactagttatggctataaagatttctctagacatgggatgcatgttccaacatttcgtgtccaggactattgctgggaagatcatggttattctttggtaaatcgcctttatccagatgtgggacagttgattgatgaaaaatttcacattgcttacaatcttacttataatacaatggcaatgcacaaagatgttgatacctcaatgcttagacgggcaatttggaactatattcactgcatgtttggaataagatatgatgattatgactatggtgaaattaaccagctattggatcgtagctttaaagtttatatcaaaactgttgtttgcactcctgaaaaggttaccaaaagaatgtatgatagcttctggaggcagttcaagcactctgagaaggttcatgttaatctgcttcttatagaagctaggatgcaagcagaactcctttatgctctgagagccattacccgctatatgacctgatgcctttccttcattaaagatgattctggaatgatcagcagatatagtctacaagggggaaggtactaagccccaggaccaatggtagacaaaataattcagaaatccattgtgccatgattcctttagtttctgctatttttctgtggaaaaccactgctggcacaagcagtgactgtttggcagcttcaagtttagagctgtgaagacaggctgccattcacagtattttgctttttgacagtacaagatgctgtgtaactgttttaatacagcaaatagtaactctccaaatcctgttgcttttatgttaaataagataacaagaattggagcatgcaaagaatgggacttggataatgacttaagctttatatgtaaagaattttagaagatcttggtgctgctattcctgctggaggaatgaatagatggctgtttcagttaagctattagtaataaaagtgaacattgctactatctgagcctacatacataacttgtgtgatttcaaattaaacttgcattatgtgttaattttcttgcatctaaaaaagcatagaattcctactcacacagctcagcaacaaccattttgatggtaacagttaatttctttcattagttttttaaattcagggttctggatattaaattaaaatggcattcttaaagattttcttcaaaaagcaatcctaaatgaaagtgtgtaaattataagaagctggcgatcttttgatatgctgtttcacaggatcctgacactggagggcagctgtcttgtgcattacttgtgtttccagcaccaaagttgtgggacatgttgctgtagactgctgcgcagtcctgggtgcattcagtctctctgcctctgcctgcctcctggtccccactttaaaggctgtgcagctccttaaataataaagctggaaaatatttttagtcgggttatcaaatttgatttacaaaaacgctaactttgtttgaaatgcaaacaggtttgaaaatatgtattaagtactttgtattctggaagcgtgaattgcttttgaagtctgtcagtattactggtatttttaaataaagaagaatttttctccaattttaaaaaaaaaaaaaaaaaa

SEQ ID NO: 3723 - DNA, 3505 bp, Homo Sapiens
  NM_014458
atgggccggtgaagggaaaggaaatagctctacgagcggcatcctgcctgcgttagcggcggtggaggaggaggcagagaggagtggagggcggagtagacggaggaggctgctgcagagaagaaagtgtcagagccggttcggctttagagtgtggtgaagggtacttttcatggtgcatggaaggaaagccaatgcgcaggtgtaccaacattcgaccaggagagactggaatggatgtaacaagccgctgcacccttggagaccccaacaaactgccagaaggggttccccaacctgcccgcatgccctatatctcagacaagcaccctcgacaaaccttggaagtgattaaccttctgagaaagcaccgggagctatgtgatgtggtgctagttgtgggcgccaagaagatatatgcccatcgagtcattttgtcagcctgtagtccctacttccgagctatgtttacaggagaattggcagagagccgtcagacagaagtagtgatccgagacattgacgagagggctatggaattactgattgactttgcgtatacctcccagataacagtagaagagggcaatgttcagactcttctgccagctgcttgcctcctccagctggcagaaatacaggaagcctgctgtgaattcttaaagagacaattagatccttctaactgcctgggcattcgggcttttgctgacacacattcatgtcgtgagttgctaaggatagcagacaagttcacccaacataactttcaagaggtaatggagagtgaagagttcatgttgcttccagccaatcaactcattgatataatatccagtgatgagctaaacgttcgcagtgaagaacaagtgttcaatgcagtgatggcctgggtcaaatacagtattcaggaaagacgtcctcaattaccccaggtgctgcagcatgttcgtttgcctttgcttagtcccaagttcctggtcggcacagtaggctctgatcccctcatcaaaagtgatgaagaatgcagagacttggtagatgaggctaaaaactacctcctattgccgcaagaacgaccactaatgcaaggaccaaggacgagaccacggaaacctatccgatgtggggaagtactctttgcagttggtggttggtgcagtggagatgccatttccagtgttgaacgatatgatccacagaccaatgaatggagaatggtggcttcaatgagcaaaaggagatgcggagttggggtcagtgttcttgatgatctgttatatgcagtaggaggccatgatggatcctcttatctcaatagtgttgaaaggtatgaccccaaaacaaaccagtggagcagtgatgtggcccctacaagcacctgcaggacaagtgttggtgtagcagtacttggaggctttctttatgctgtgggtggccaggatggtgtgtcttgcctcaacattgttgagaggtatgatccgaaggagaacaagtggactcgggtagcttctatgagtaccagaagactaggtgtggctgtggctgtgttaggagggttcttatatgctgtaggtggctctgacgggacatctcctctcaacacagtggaacgttacaatcctcaggaaaacagatggcacactatagcccctatggggacccggaggaaacacctaggctgtgcagtatatcaggacatgatctatgctgtaggaggtagagatgacactacagagctgagcagtgctgagagatacaaccccagaaccaaccagtggtctccagtggtggccatgacatcacgccgtagtggagttggcctggcagtggtcaatggacagctcatggcagtaggaggttttgatggcacaacatacttgaagaccatagaagtttttgatcctgatgccaatacatggaggttatatggcgggatgaattaccgtcggctagggggtggcgtaggagttattaaaatgacacattgtgaatcccatatttggtgaacacagagaagacagtcttgtatatattcctctgtattctggggagctttgaccttggagctttgtacagcttgagaaaacattagaacaaattttattatttgccggtgcctcaacaaatggaaatacaatccaatgaaagtacttcacctgcaagatgcacaataattttcaactctgtgcagaagaatatttatttttggttttaatttatcatggttttttgttgttttcgttttgaacttatccttcctcccacaaaaaaagaaaagaagaaaaaattccaagcagcaaaacttactttgtttgtaaggtattcatttaggtttgaaaatactatttaataagggcagaagggctatatatgatttggctattatttctagacactccatccacatgattccactaacaaggattaccaggaataaaggtaggtatgcaaaatgtattagctacccattattctcgcactaaccaccagaagacttgaaaatcttaaaaaaaaaaaacaaaaaaacaagaaaaggcaacatctcattttaaatagtacaattcagaagggatactaaatcaataaaaaccaggactcagacactacagttttcatcagtgtaattttatgtcttgtttctttctatatgaacttgtttatttagtctttttttcataatattctcatagagtttctgctagatctagagctctgctcagtgcctcttataaaaacaatatataagtctcatatgctgtcttgagaatccaagagaatcacatgcagctctgcaacagtttttgctcaaaaatgttactgactaaagcaactgtccttcctgtttccttattgctaccaaggaccagcagggagaaatgtcttctcccagcagtgaattctgttatgcaatttattcttgatgctcaggcctggttaagctgaggcttacctttaataacagcctccaagggaatgaattattcagttaatgtaatagcacacattaaagagtgtaaaatcaattgaggcattttattaatatcttggttcttttatacaaacaatgtatcattatcttcattctataaggtcattgttactacttctctcaaattgcactttctggtaaaaagttaaaaatttttaaggaaaaaataatttcaatggttaaagttttttttcctcattgtattcatagacaaatttttttcaatatattttgcaagaaaaatctttgaataagactaactgcatttaaaaggaataacctccttctccctttccccaactacaaaaatgtttggcaactttgtgtttacatttaaagatcatttgcacctttttcaaggaaaaaaagtattgagtaaacaattgtttacatatatcatttatgcttttttctagcatgtataacttttttaaataaaggtagtatttaccattaaaaaaattttagctaaaaaaaaaaaaaaaaaaaaaaaaaaaaaaaaaaaaaaaaaaa

SEQ ID NO: 3724 - DNA, 935 bp, Homo Sapiens
  NM_014462
gaagtgggtaagggtaatatggaggagcttccggcaggccccggcggctgaaagccggggcagaagtgctggtctcggtcgggattccgggcttggtcccaccgaggcggcgactgcggtaggagggaagaggttttggacgcgctggcctcccgccgctgtgcattgcagcattatttcagttcaaaatgaactatatgcctggcaccgccagcctcatcgaggacattgacaaaaagcacttggttctgcttcgagatggaaggacacttataggctttttaagaagcattgatcaatttgcaaacttagtgctacatcagactgtggagcgtattcatgtgggcaaaaaatacggtgatattcctcgagggatttttgtggtcagaggagaaaatgtggtcctactaggagaaatagacttggaaaaggagagtgacacacccctccagcaagtatccattgaagaaattctagaagaacaaagggtggaacagcagaccaagctggaagcagagaagttgaaagtgcaggccctgaaggaccgaggtctttccattcctcgagcagatactcttgatgagtactaatcttttgcccagaggctgttggctcttgaagagtaggggctgtcactgagtgaaagtgacatcctggccacctcacgcatttgatcacagactgtagagttttgaaaagtcacttttatttttaattattttacatatgcaacatgaagaaatcgtgtaggtgggttttttttttaataacaaaatcactgtttaaagaaacagtggcatagactccttcacacatcactgtggcaccagcaactacttctttatattgttcttcatatcccaaattagagtttacagggacagtcttcatttacttgtaaataaaatatgaatctcaaaaaaaaaaaaaaaaaa

SEQ ID NO: 3725 - DNA, 695 bp, Homo Sapiens
  NM_014463
aaaaactgcgggaagcaggaaagagcacaacaggtttctctctatttccggtgtattgtatcctcacgtttccggagattgacgttgctcttgtgttctcgcgagaggcgggaaagggcgcagggtttgaaacatggcggacgacgtagaccagcaacaaactaccaacactgtagaggagcccctggatcttatcaggctcagcctagatgagcgaatttatgtgaaaatgagaaatgaccgagagcttcgaggcagattacatgcttatgatcaacatttaaatatgatcttgggagatgtggaagaaactgtgactactatagaaattgatgaagaaacatatgaagagatatataaatcaacgaaacggaatattccaatgctctttgtccggggagatggcgttgtcctggttgcccctccactgagagttggctgaaacaaagaatttgtcctgtatggaaaacgggagactttgtacagtggcctctctaaaagtacaaaacattcataagagaaacctgcatacattttgatattaagaaataattccggggattcttccactcctgaaatgagttgatttgcagataactcacaacttcttaagctaaatggtattttcatttttctcaagctctccaataaatatgaccaccaagatgcagaactctttcaggacttcttttgct

SEQ ID NO: 3726 - DNA, 1320 bp, Homo Sapiens
  NM_014465
ggaacttgcctcatgtgtgtgtatgtgtgtgtgtgtgattgtgggtgtgggtagtttaacctttttatatcttagctgcctgtaaactcagtgattgctacgttcagatcaaaccttgaacttttttttttctggtgccaggagccttcctgtgctccccattgcctgccagaaccaccaccgtttcccatggttactctacagcagcttcactgcctgaaaatgaaaactgaacaaagggattaaattgtgagaacaactgtcaatctattatatatttgtacaatctggtattaaaatgctttccccaaaagatattctgcgaaaagatctgaagttggtccatggttatcccatgacctgtgcttttgcaagcaactgggaaaaaattgaacagttccatagcagaccagatgacattgtgatagccacttatcctaaatcaggtactacttgggttagtgaaattatagacatgattctaaatgatggagatattgaaaaatgtaagcgaggttttattactgaaaaagttccaatgttggaaatgactctccctggattaagaacatcaggtatagaacaattggagaagaatccatcaccccggattgtgaaaacacatctaccgactgatcttcttcctaaatctttctgggaaaacaattgcaagatgatttatctggctcgtaatgccaaggatgtttcagtctcatattaccattttgacttaatgaataatttacagccttttcctggtacctgggaagaatatctggagaaattcttaactggaaaagtggcctatggttcctggtttactcatgttaaaaactggtggaagaaaaaggaagaacacccaatactttttttgtactatgaagatatgaaagagaatccaaaggaggaaatcaagaagatcattagatttctagagaagaacctgaatgatgagatcttggataggatcatccatcacacctcatttgaagtgatgaaggacaatcctttggtaaattatacacatctaccaactacagtgatggatcatagcaaatccccttttatgcgtaaagggacggctggtgactggaagaattacttcaccgtggcccaaaatgagaaatttgatgctatttatgagacagaaatgtccaaaactgcacttcaattccgcacagagatttaaagtgtctaaatcacacatctgaagaaataagagattgtctgtagttgattgaaacgagggcagttatgaattgatttgggcaatcaaatgaatttataaaggagaataatatgcttttaaaaaaaaaaaaa

SEQ ID NO: 3727 - DNA, 2428 bp, Homo Sapiens
  NM_014468
acctggccgccatgcgcctctcctcctccccacctcgtggcccgcagcagctctccagctttggctccgtggactggctctcccagagcagctgctcagggccgacccacacccccaggcctgccgacttctccctggggagcctccctggcccaggccagacatccggcgcccgggagccccctcaggccgtcagcatcaaggaggccgccgggtcctcaaatctgcctgcgccggagaggaccatggccgggttgagtaaggagccaaataccttgcgggccccccgtgtccgcacagccttcaccatggagcaggtccgcaccttggagggcgtcttccagcaccaccagtacctgagccctctggagcggaagaggctggccagggagatgcagctctcagaggtccagataaaaacctggtttcagaatcgccgcatgaaacacaaacggcaaatgcaggacccccagctgcacagccccttctcggggtctctccatgcgcccccagctttctactcaacgtcttctggccttgccaatggcctgcagctgctgtgcccttgggcacccctgtccgggccccaggctctgatgctgccccctggctccttctggggtctctgccaagtggcacaagaggccctggcatctgcgggagcttcctgctgcgggcagcctctggcgtcccacccccctaccccaggccggccttcgctgggaccagccctgtccacggggccccggggcctgtgtgctatgccacagacgggggatgcattttgaggaggcacctctgactcccacactcgcggtcttgctgatcgcacctggctcctacctggaggactcagttgttctgtttacatcctggtggcacctctcaccctgacccacacaaaggttctggagattactggagaatatatataaatatatatatgtacgtatatatgtaaatacacatatacgtatatataaatatatatatacatatgtgtgtgtatatatatatatatttttttttttttttttttttttgagacggagtgttgctctgtcacccaggctggagtgcaatgacgcaatctcggctcactgcaacctccgcctcctgggttcaagcgattctccagcctcagcctcccgagtagctgggattacagacacccgccaccacgcccggctaattttttctatttttagtagaaatggggtttcaccatgttagccaggctggtctcaaactcctgaccctgtgatccgcccgcctcggcctcccaaagtgctgggattacaggcatgagccactgcacccggccctgagaatatatttattaaagccacctcttcactgaaagttaccgaaagagtcggtttaggaaggaaacgaagggtcagtgaacagagtcaaatgcagaagtgggcttgtcatgggtagggctttcggcgtacgataaaaggatcatttgttttttaaaaggggttggaaaaactggttttccagttggaaacagtaaaggttgtaagctttgtgtgtacaaaagaaaacagggaatgcaggtgtgtttatagcgttgtggttcaagtccctcttaacaagaactccaaagctggaaagcaggagggaacaaaggtgaacatgaaggcgaggatgctggggccctgcagtgcgctctaggctgtgcgtgagccgggactgtacccacagcttgctgagggctgctcttcttgggccagggaaagcagggcagccgggacctgcggctgtgcctggactgaagctgtcccgcaggtccccaccctccaacacgtgctcacctgtccccctcctcgcagcagcctcgggacaaaacaatgactcaaggacagcacttctcgcagaaggtctggaagtgcccagaatgggaggcacggaagcccctcccggggaggactcccgcgttgatggaccgttcttggtgcagactcctgactgcgtgcatgaaacctgagacaagtgcaattccttccatgtcgccccagagtgcccaggaggcaggcagtgcggggtgcccaggcagacgggttcagcctgcagaactggaggcgacctgtgaaacccacccgggcaccccaacaggaacagaagcgtggtcctgcggctgcgtccccagcgagtttcactttccccttgctcgtttctcccttgttgtaagtgtttacaactggcatgtgcttttaaacgtcaggtaagaggggaacagctgctgtacatcgtcctggcgagtgacaatgtgacagaagcctgggcgaggccctcggagggcagcagctggacaggggctactgggtttggcctggacagcactgatttgtggatgtggatgggggcacgttgtccgtgataaaagtacaagtgcccctcacaaaaaaaaaaaaaaaaa

SEQ ID NO: 3728 - DNA, 1557 bp, Homo Sapiens
  NM_014473
cccctccggcgcttgggccagagtggtgcgggcggcgcgtggcggcgatccccacgtggtggctttctcacgctagccctctttggtcctccttgacgtcccgggcctgtgggcccgctttctgccgagatgccgaaggtcaagtcgggggccatcggccgccgccgcgggcggcaggagcagcgccgggagctgaagagcgctggaggactcatgttcaacacggggattgggcagcacattttgaaaaatcctctcattattaacagcattatcgataaggctgccttaagaccaactgatgtagtgctggaagttggacctggaactggcaacatgactgtaaagttgttagaaaaggcaaaaaaggttgttgcttgtgaacttgacccaaggctagtagctgaacttcacaaaagagttcagggcacgcctgtggccagcaaacttcaagtactggtgggtgatgtgctgaaaacagatttgccattctttgatacttgtgtggcaaatttgccttatcagatctcttcaccttttgtcttcaagctgttgctacatcgaccttttttcaggtgtgctatacttatgtttcaaagagaatttgccctccgactggttgcaaaacctggagataagttatactgcagactctcaattaatacacagctgttggcacgtgtggaccatctaatgaaagtgggaaagaataacttcagaccaccgcccaaggtggaatccagtgttgtaaggatagaacctaagaatccaccaccacccatcaattttcaggaatgggatggtctagtaaggataacctttgttaggaaaaacaagacactctctgctgcatttaaatcaagtgcagtgcaacaactcttggaaaaaaactacagaattcactgttcagtccataatattataataccagaagatttcagcatagcagataaaatacagcaaatcctaaccagcacaggttttagtgacaaacgggcccgttccatggacatagatgacttcatcagattgctacatggattcaacgcagaaggtattcatttttcctaggtatttggaaaacagaaattttcaaggtcaagaaaagaaatgaattttgtattttttgtatttgagaagataatgcttttgctttactgagacattatttacttgactatttttggttcaatactactactgttgtcaccatttatgattctgaattttaaagttggaaagttctaagtatcaaagtttttaatatataatgctggtccaatctattcataataatcttcaagttcaggagccgcagagacgcacaactttacacttatcatttctaacagtttattgtataaagatgttactcttctatttactgttatatactgtaaggccttctttaggcctttagctctgttcctccagtaataaaaaagttaaaatatgcttcactagtcacacattccccataccatttcgtgttattcacattccccgtaccatttcttgttattcacatgtacagtaaaacaattgtttcttaaatta

SEQ ID NO: 3729 - DNA, 3512 bp, Homo Sapiens
  NM_014480
ggggaggggacaggcgctgcaaggagcagagccgcgggaagcaactccctaagccacaatgctagtcgcgaacacaggaaaaagctcatcccgccgccgcggggccccatgctcccgccggcaatgactatgcctgtgggagcaacggctaccggcgcgcggccttctgggagttgtttgttgcgcggagcgcgggcacgtccgccggccaccggaagcaccgccattggccggtgcgtgcaggtggcagccaagagcctcctggcacagcggcaccaggcaggtgacgcctattggaccccagaggtcatcccagctccagacgtggacacattttcttccaatgatgtctacggatgaggaaactgaggcctggagaggttaaagagacccgttcagagtcctacagtggcagactggtcttctgaggacctctgccctctacacagcggcctcttcaggtgcagggaggaaatggaagcacgttctatgctggttccaccccaggcatctgtgtgcttcgaggatgtggctatggcattcacacaggaggagtgggaacagctggacctggcccagaggacactgtaccgagaggtgacactggagacctgggagcatattgtctccctggggcttttcctttccaaatctgatgtgatctctcagctggagcaagaagaggacctgtgcagggcagagcaggaggccccccgagactggaaagctacccttgaggagaataggttgaattctgaaaaagatcgagctagggaagaactatcccaccacgtggaagtgtacaggagtggaccggaggagccaccctctttggtattaggaaaagtgcaagatcagagcaaccagttaagggaacaccaggagaactccttgaggttcatggtactcacctcagagagactgtttgctcaaagggaacattgtgagcttgaacttgggggaggttattctctaccttctactttaagccttctacctacaacattacctacaagtacaggtttccctaagcccaactcacaagttaaagagttgaaacaaaattcagctttcattaatcatgagaaaaatggagcagatgggaagcactgtgagagtcatcagtgtgctagagctttctgtcagagtatttacttgagtaaacttggaaacgttgaaacaggaaagaaaaacccttatgaatatattgtcagtggtgactctctcaactatggttcctccctttgttttcatggtagaactttttcagtgaagaaaagtgatgactgtaaggattatggaaacctcttcagtcacagtgtgtctctgaatgaacagaagccagtgcattttgggaaaagtcagtatgagtgtgatgagtgcagggaaacctgttctgagagtctgtgccttgtacaaacagaaagaagtggccctggagagacccccttcagatgtgaggaacgctgtgctgccttccccatggcctcatctttttctgactgtaacatcattcagactacagagaagccatctgtgtgtaatcagtgtggaaaatctttcagctgttgtaagctcatacaccagagaacacacactggagaaaagcccttcgaatgtactcagtgtgggaaatcttttagccagagctatgaccttgtcatacatcagaggacacacactggagagaagccctatgagtgtgacctgtgtgggaaatccttcacccagagatccaaacttattacacatcagcgaattcacactggagaaaaaccgtatcagtgtattgaatgcagaaaatccttcaggtggaactctaacctcattgtacatcagagaattcatactggagagaaaccgtatgagtgcactcactgtggaaagtccttcagccaaagctatgagttagttacacataaaagaacgcacactggagaaaaacccttcaaatgtactcagtgtgggaaatctttcagccagaagtatgaccttgttgtacatcagaggacacacactggagagaagccctatgagtgcaacctgtgtgggaaatccttctcccagagttccaaacttattacgcatcagcgaattcacactggagaaaaaccgtatcagtgtattgaatgtgggaaatccttcagatggaactctaacctcgtcatacatcagagaattcatactggagagaaaccgtacgattgcactcactgtggaaagtccttcagccaaagctatcagttagttgcacataaaagaactcacactggagaaaagccctatgaatgtaacgagtgtggaaaagccttcaatcgaagcactcagctcatcaggcatctgcaaattcacactggggagaagccgtacaaatgcaatcagtgcaataaagcctttgcaaggagctcctaccttgtgatgcatcagagaactcacactggtgagaaaccttttgagtgtagtcagtgtgggaaagccttttcagggagctctaaccttctttcccatcacagaattcattctggagagaaaccctatgaatgtagtgactgtgggaaatccttccggcagcaatctcaacttgtagtgcatcggcggacacatactggagagaaaccttaggagtgcagtcattgtgggaaagctttcatccagaggtctcccctcatcatgcaccagaggacgcatgtcggtgggaagagctatcagtgtgacgtgtattaagccagcggttgtgactcattgaacatcagaggacatatcctggagaaaagccctacgaatgcattgattgtgggaaagccttcaatgatcgctcaacccttagtaaacacgagaggacacacactggaggcaaaccctatgaatgtgaccattgcgagaaagcctttagccaacggtgtcaacttactaggcagcagagaattcatactggagagaagccctgtgaatgttaacaaatgtggaaaagcttccagttatgatactttccttattcaacatgagaaagctcatgggcaagaaactctatgaataaccaagatggagccgggtgcagttgccaacacttgtaatcccagcagtttgcgaggccgaggcaggtggatcacttgagcccaggagtttgaaaccagcctgggtaacatggcaaaatcctgtctttacaaaaaatacaaaaattagcctagcatggtggcgcatacctgtagtcctagctactcaggaggctgaggtgggaggatcacttgagcttgggaggcggtggttgcagtgagctgtgatcatgccatcacaccgctgccttgtgagagattgagacactctaaataaataataaccaagatgggaaatttccctgccagaccttgtttactagaaatcaggtggccaaaacatgactctcagagtggggcttcatgaccatgtgcatcagaattgcctggagtgtgcactgaaactgtgtattaccaagctcactctagccaactaaataaaaatctctggcagtaaaa

SEQ ID NO: 3730 - DNA, 1991 bp, Homo Sapiens
  NM_014481
tggccaacttctgaacaggaagcagttcgctcgcgcctaggttggcgcgggctgggaggtgttccagccctttaagatgttgcgcgtggtgagctggaacatcaatgggattcggagacccctgcaaggggtggcaaatcaggaacccagcaactgtgccgccgtggccgtggggcgcattttggacgagctggatgcggatatcgtctgtctccaggaaaccaaagtgaccagggatgcactgacagagcccctggctatcgttgagggttataactcctatttcagcttcagccgcaaccgtagcggctattctggtgtagccaccttctgtaaggacaatgctaccccagtggctgctgaagaaggcctgagtggcctgtttgccacccagaatggggatgttggttgctatggaaacatggatgagtttacccaagaggaactccgggctctggatagtgagggcagggccctcctcacacagcataagatccgcacatgggaaggtaaggagaagaccttgaccctaatcaacgtgtactgcccccatgcggaccctgggaggcctgagcggctagtctttaagatgcgcttctatcgtttgctgcaaatccgagcagaagccctcctggcggcaggcagccatgtgatcattctgggtgacctgaatacagcccaccgccccattgaccactgggatgcagtcaacctggaatgctttgaagaggacccagggcgcaagtggatggacagcttgctcagtaacttggggtgccagtctgcctctcatgtagggcccttcatcgatagctaccgctgcttccaaccaaagcaggagggggccttcacctgctggtcagcagtcactggcgcccgccatctcaactatggctcccggcttgactatgtgctgggggacaggaccctggtcatagacacctttcaggcctctttcctgctgcctgaggtgatgggctctgaccactgccctgtgggtgcagtcttgagtgtgtcctctgtgcctgcaaaacagtgcccacctctgtgcacccgcttcctccctgagtttgcaggcacccagctcaagatccttcgcttcctagttcctctcgaacaaagtcctgtgttggagcagtcgacgctgcagcacaacaatcaaacccgggtacagacatgccaaaacaaagcccaagtgcgctcaaccaggcctcagcccagtcaggttggctctagcagaggccagaaaaacctgaagagctactttcagccctcccctagctgtccccaagcctctcctgacatagagctgcctagcctaccactgatgagcgccctcatgaccccgaagactccagaagagaaggcagtggccaaagtggtgaaggggcaggccaagacttcagaagccaaagatgagaaggagttacggacctcattctggaagtctgtgctggcggggcccttgcgcacacccctctgtgggggccacagggagccatgtgtgatgcgtactgtgaagaagccaggacccaacttgggccgccgcttctacatgtgtgccaggccccggggtcctcccactgacccctcctcccggtgcaacttcttcctctggagcaggcccagctgaaccaatggaggcctggggacatctggcatggtcacccctgcacatgatctgaggccagctccccttccctgagctgcctcctgcttctccctcaaagtctcctacccttctcttcctcttttaagccctctcttcctcgctttccttcctacctagctccttgttggtgagcttcttgtgccttaatcctgtgacccagccccttacaccactttccaccttcctgtccgaagtacacggacactagctgccccaggaagttgtgtgattttaaatcacttctgtctttgctggaaagtgtatttgtgcataaataaagtctgtgtatttgtttcagggttgcaaaaaaaaaaaaaaa

SEQ ID NO: 3731 - DNA, 8438 bp, Homo Sapiens
  NM_014494
gtgtagaaaatggcgctggtgcagcggctcgggcctctccccgcggcgctgcggagggcttgaggctcgcgagcctccttcgccgcgccccacttgctcgtgcactttacacacatgagagaattggaagctaaagctaccaaagacgtagaaagaaatcttagcagggatttagtgcaagaagaagaacagttgatggaagaaaagaaaaagaaaaaagacgacaagaaaaagaaggaagctgctcaaaagaaggccactgaacaaaaaatcaaagtgccagaacagataaagcccagtgtaagccagcctcagcctgccaactctaataacggcacttccacagcaaccagcactaataataatgccaagcgagctacagccaacaatcagcagccacagcagcagcagcaacagcagcagccgcagcagcagcagccacagcagcagccacagccgcagccgcagcagcagcagccacagcagcagccacaggccttgcctcggtatcctcgtgaagtacctccacgatttcgccaccaggaacacaaacagcttctaaagaggggtcagcattttcctgttatagcagcaaaccttggatctgctgttaaggtgttaaacagccagtcagaaagcagtgctttaacaaatcaacagccacaaaataacggagaggtgcagaacagcaaaaaccagtcagatataaaccacagtacttcaggatcccattatgaaaattcccagcggggacctgtgtcttctacaagtgattctagcacaaactgtaagaatgctgttgtaagtgacttgtcggaaaaagaagcatggccctcagcccctggcagtgatccggagttggcttcagaatgtatggatgctgattctgcctccagttctgaatcagagagaaacatcactatcatggcttcagggaacacaggtggtgaaaaagatggccttcggaatagcactggacttggttcccaaaacaagtttgtagttggtagcagcagcaataatgtgggccatggaagtagtactgggccatggggtttttcccatggagccataataagcacatgtcaggtctctgtggatgctcctgaaagcaaatctgaaagtagcaacaatagaatgaatgcttggggcactgtaagttcttcatcaaatggagggttaaatccaagcactttgaattcagctagcaaccatggtgcctggccagtattagagaacaatggacttgccctaaaagggcctgtagggagtggtagttctggcattaatattcagtgcagtactataggccagatgcctaacaatcagagtattaactctaaagtgagtggtggttctacccatggtacctggggaagccttcaggaaacttgtgaatctgaagtaagtggtacacagaaggtttcattcagtggtcaacctcaaaatattaccactgaaatgactggaccaaataacactactaactttatgacctctagtttaccaaactccggttcagtgcagaataatgagctgcctagtagtaacacaggggcctggcgtgtgagcacaatgaatcatcctcagatgcaggctccatcaggtatgaatggcacttccctttctcaccttagcaatggagagtcaaaaagtggaggctcttatggtactacatggggtgcctatggttctaattactctggagacaaatgttcaggccctaatggccaagctaatggtgacactgtgaatgcaactctaatgcagcctggcgtaaatggtcctatgggcactaactttcaagttaacacaaacaaaggaggtggtgtgtgggaatctggtgcagcaaactcccagagtacatcatggggaagtggaaatggcgcaaattctggaggaagtcgaagaggatggggaacccctgcacaaaacactggcactaatttacccagcgttgagtggaacaaactgcctagcaatcagcattccaatgatagtgcaaatggcaatggtaagacgtttacaaatggatggaaatctactgaggaagaggatcagggttctgccacatctcagacaaatgagcaaagcagtgtgtgggccaaaacaggaggtacagtggagagcgatggtagtacagaaagcactggacgccttgaggaaaaaggaactggggaaagtcagagtagagacagaagaaaaattgatcagcacacattactccaaagcattgtaaacagaactgacttagatccacgtgtcctgtccaactctggttggggacagactcctattaagcagaatactgcctgggatacagaaacatcacctagaggggaacgaaagactgacaatgggacagaggcctggggaagctctgcaacacagacttttaactcaggggcatgtatagataagactagccctaatggtaatgatacctcatctgtatcagggtggggcgatcccaaacctgctctgaggtggggagattccaaaggctcaaactgccagggggggtgggaagatgattctgctgctacaggaatggtcaagagcaatcagtgggggaattgcaaagaggagaaggctgcatggaatgactcgcaaaagaataaacagggatggggtgatggacaaaaatcaagccaagggtggtctgtttctgccagtgataactggggagaaacttcaaggaataaccattggggtgaggccaataagaaatccagctcaggaggtagtgacagtgacaggtccgtttccggttggaacgaacttggtaaaactagttctttcacttggggaaacaacataaatccaaataattcatcaggatgggatgaatcttctaaacctactccttcccagggatggggagaccctccaaagtctaatcagtctctaggttggggagattcgtcaaagccagtcagctctccagactggaacaagcaacaagacattgttggatcttggggaatcccaccagctacaggcaaacctcctggtacaggctggctggggggacctataccagccccagcaaaagaagaagaacccacaggctgggaggaaccatccccagaatctatacgtcgcaaaatggagattgatgatggaacttcagcttggggagatccaagcaaatacaactacaaaaatgtgaacatgtggaacaaaaacgtcccaaatggcaacagccgttcagaccagcaagcacaggtacatcagctgctaacgcctgcaagtgccatctcaaacaaagaggcaagcagtggctctggctggggtgagccctggggggagccttctactccagccacaactgtggataatggtacttcagcatggggtaagcccatagacagtggtcccagctggggggaacccattgctgcggcatccagcacatccacgtggggctccagctctgttggtccacaagcattaagcaaatctgggccaaaatctatgcaagatggctggtgtggtgatgatatgccattgcctggaaatcgccccactggctgggaagaggaagaggatgtggagattggaatgtggaatagtaattcatctcaagagcttaactcatctttaaattggccaccatatacaaagaaaatgtcatcgaagggtctgagtggcaaaaaaaggagaagggaaaggggaatgatgaaaggtggaaacaaacaagaagaagcgtggataaatccatttgttaaacagttttcaaacatcagtttttcgagagactcaccagaggaaaatgtacaaagcaataagatggacctttctggaggaatgttacaagacaaacgaatggagatagataaacatagcctaaatattggtgattacaatcgaacggtcgggaaaggccctggttctcggcctcagatttccaaagagtcttccatggagcgcaatccttattttgataaggatggcattgtagcagatgaatcccaaaacatgcagtttatgtccagtcaaagcatgaagcttcccccttcaaatagtgcactacctaaccaggcccttggctccatagcagggctgggtatgcaaaacttgaattctgttagacagaatggcaatcccagtatgtttggtgttggaaacacagcagcacaaccccggggcatgcagcagcctccagcacaacctcttagttcatctcagcctaatctccgtgctcaagtgcctcctccattactctcccctcaggttccagtttcattgctgaagtatgcaccaaacaacggtggcctgaatccactctttggccctcaacaggtagccatgctgaaccagctatcccagctaaaccagctttctcagatctcccagttacagcgattgttagcgcagcagcaaagggcgcagagtcagagaagcgtgccttctgggaaccggccgcagcaagaccagcagggtcgacctcttagtgtgcagcagcaaatgatgcaacaatctcgtcaacttgatccaaacctgttggtgaagcagcagactccaccatctcagcagcagccactccatcagccagccatgaagtctttccttgacaatgtcatgccccacactacacctgagctgcaaaaagggccatcaccaataaatgctttcagcaacttccctataggcttgaactcaaacttgaatgtaaatatggatatgaacagtattaaagagccacagtcaagactaaggaagtggacgacagtggacagcatttctgtgaacacatctttggatcaaaactccagcaaacatggtgctatttcaagtggtttcaggctggaagagtctccatttgttccctatgactttatgaacagcagtacttcaccagccagtcctccaggttcaataggagatggctggccacgtgccaaatcgcctaacggctctagcagtgttaattggccaccagaatttcgtcctggtgagccatggaaaggttatccaaacattgaccctgaaactgacccttacgtcactcctggcagtgtcataaacaatctttcaattaatactgtgcgggaagttgaccacctcagggacaggaacagtgggtcatcctcatccttgaacaccacgctgccttcaactagtgcctggtcatccattcgtgcctccaactacaacgttcccctcagcagtacagcacaaagcacttcagccagaaatagtgattccaaattgacatggtctcctggttcagttacaaacacctctctggctcatgagctgtggaaggtccctttgccacctaaaaacatcactgctccgtcccgcccacctccgggactgactggtcagaagccacccttgtctacgtgggataattctccccttcgtataggtggaggatggggaaattctgacgccagatataccccaggttccagctggggtgagagcagctcagggagaataacaaattggcttgttctaaaaaaccttacacctcagatcgatggctcaactctgcgcactctgtgcatgcagcacggcccgctgatcacattccacctgaacctccctcacggaaatgctctggtccgctacagttcaaaagaagaggtagtgaaggcacaaaagtctctgcacatgtgtgtactggggaacactactattcttgctgagtttgccagtgaagaggagatcagtcgtttctttgcacaaagccagtctctgaccccttctcccggctggcagtctctcgggtccagccagagccggctgggctccctcgactgttcccactcattctccagccggaccgatctcaatcactggaatggtgctgggctgtcgggaactaactgtggagaccttcacggcacttcactctgggggaccccgcattattccacaagcctgtggggtcccccaagcagcagcgacccccgaggaattagcagcccatctcccattaacgcttttctttctgttgaccacctgggtgggggtggagagtccatgtaacagtgtagatgcagactcaccgaccgggacctcagacgcgagggaaaggagcactaagtggggctcgccgcctgcagccaggggccgcctgtgggaacagctattctctgcacattttccactttgttttccccaaaacatatcagtttgaatacttgaatcatgcaggccaatattataatgtgaaaaggtatctactctatttacactcccaaatagcgccatacatgctaaaccgtagagaatgagctcgcttgtgtctattcatcatgtttagcctttggattctttttttttttttccttctattcctccccaacccccccccccgcccctttttttctctcttgcaaaaccattttttgggctgataacgtatgagcttttccctttgcactgaatgatgttctctccgtctcatcggcagtatggggggcagctgtcccagtgtcaatgtttactcaagggtgttcttaggaggcgtgcgctctctactatgccttgatgttgcctaccttattgtggtatcgtggagtttaaaagatcaagttaggatgctgacttaggattattaatgaaagtgttgcaccagttttttcatgttgtaaaactaaagaatttcgctctgcagtttgaaaaactgtggccacagctgtgacttgcagcccacctgccacccaggacgggccctgcactttgaataggctttccattttgttttggaggttctcactttgaaccttcttgtttacagatttttttgtttgttttttgagaaaaaaaaatgtttactcttccatcatttaaaaaaaatgtaaaagacaaaaaaaaaatggaggatgatttaaaagatgctttctatctctgggaaaaaggagcagcatttggccatgttcttttgtttttctattcctgtcccaaatcaaagagcatggttctcaggaaaaccagttccccagtttaaaaaaaaaaaaaaaaattccttgtagtttcttagaggaaaaaaagaaaaaccccaacttttagcactgatactacatattgctctgttaaagaattttctctgccaaaaaaaaagaaaaaacaaaaaaacgcttaaagctggagtttgacattctgctttcagatgctgtctttttattagtgagtgatgatggtttgctaataatcaataggtaataattttttgtaatcccatcaagtggctccatatgtttctgctctctcgtgactgtgttaatgtttaactgttgtaccttaaagccgaaatcagtaactatgcatactgtaaccaaggtattgggcttacagagttgtttgttgtataaagaaaattttaaatgttgttgcaaactaacgagttacaccattttaaactttctttcctcccccctttttttgcccacaaatggtattataatgcttgcttagtcaaagaagagagactaaacaagggtaaaaattttaacagtacagaatttgccatcatatcattgccttgattctaactgtttgtgtcctaagatgcaaaagaagtcagtggcttttaactgtttacaaatagaatgtgattgtaaaatgtacagtttggttgtgtttgaattatgaaatttcttcagatataataaaccatgactttttggctgctcaacattaattgtctcctttttgtgaatttatttgtaggctcttttttataatgaaagtttcaaagttgctatgtatgagggttctcatagagcaaccgattaaaaatctaagcaaatatttgaacattttatctgaactcatcacaatttcaccctgaaataatgtgagaacaatgggaaactgtagcttgctccttcccaccctctctgagcatctttgggatcttgttgctcaaaactcttctgtgacttcatcttccccaccatttgtgcccatctcaagcctcagcaagaaaccatgtggaacatgaagcttaatgacttgacagtgtactagtgttaaactctcatacctctgttacaaagcgagaaacgccacacccggactggccttttcttcccccttcacggccctcgcttctccctgcaggagctcgggggcgaaacctgtgtatggatttcagtgtatgacttcagatcatgctccaacttgccaggtgtgagctaatgttgtcggacaccttactataagcaaatgttattcagtgcgttcaatgtatattgacttccatactggtttttccaaaaaccaaaggtagctttgaaaaaccatgtctggaaatgtttggagcgttaagctgattgaccttctgaccttggggctttgagtagtatataattcataactgcgttaattgtattgttaaagtgtttgggagttttttgcgcttgttatgtggaaataaagtgtttgatttaaaattttttaaaaaaaaaaaaaaaaaa

SEQ ID NO: 3732 - DNA, 1871 bp, Homo Sapiens
  NM_014499
tttgtgcaaataaggtttctgtggtgagacaccagataaactcaacttcctctttcaacaacaaatgtgtcagttatcagcaggatccatgccgccagagtaaagctttctaccctttactccctgcaaagaaacaagagtgcttatcccagctaagctccagggtaatgttatcatgacagcttcaacttttagaccacaggcaaatgctttgttaaaactctatgctggtcattcccttcaggatttggcactcaccaacatacccttctttcaagtgaaaaggcatctcttttaatggtcctgacctttggaataggaagcatgtaccctggacagagcacttcaaactagaggaaccataaatccatggctaaccttgacaaatacactgaaacattcaagatgggtagcaacagtaccagcactgctgagatttactgtaatgtcactaatgtgaaatttcaatactccctctatgcaaccacctatatcctcatattcattcctggtcttctggctaacagtgcagccttgtgggttctgtgccgcttcatcagcaagaaaaataaagccatcattttcatgatcaacctctctgtggctgaccttgctcatgtattatctttacccctccggatttactattacatcagccaccactggcctttccagagagccctttgcctgctctgcttctacctgaagtatctcaacatgtatgccagcatttgtttcctgacgtgcatcagtcttcaaaggtgcttttttctcctcaagcccttcagggccagagactggaagcgtaggtacgatgtgggcatcagtgctgccatctggatcgttgtggggactgcctgtttgccatttcccatcctgagaagcacagacttaaacaacaacaagtcctgctttgctgatcttggatacaagcaaatgaatgcagttgcgttggtcgggatgattacagttgctgagcttgcaggatttgtgatcccagtgatcatcatcgcatggtgtacctggaaaactactatatccttgagacagccaccaatggctttccaagggatcagtgagaggcagaaagcactgcggatggtgttcatgtgtgctgcagtcttcttcatctgcttcactccctatcatattaactttattttttacaccatggtaaaggaaaccatcattagcagttgtcccgttgtccgaatcgcactgtatttccaccctttttgcctgtgccttgcaagtctctgctgccttttggatccaattctttattactttatggcttcagagtttcgtgaccaactatcccgccatggcagttctgtgacccgctcccgcctcatgagcaaggagagtggttcatcaatgattggctaaaattaagatatctctttaattacgcctttgtttacctacgttccttgtctttttccaaaggccagaattgtcaaccaatttctttaattgaacattgtaaaaaacaggaataagtacttttgtgtaatattcacagtcaacaggggtgtgatggtgaaggcagagtgtgaaaaacgtgagagaggaagagaaaatagatttacctgattcctctttaaaattcaagccactttcttatttaagaaacctagatcaagtttttacagatgtaaataaaagttgaatagtttaccttaaatttttttcaataagtaagttattgttaataatgcacagtaaatatgtgaatttttcctagatgtaaaaaaaaaaatctttcatataaagaccttaaattctgaaaaaaaaaaaaaaaaaaaaaaaaaaaaaaaaaaaaaaaaaaaaaaaaaaaaaaaaaaaaaaaaaaaaaaaaaaaaaaaaaa

SEQ ID NO: 3733 - DNA, 2342 bp, Homo Sapiens
  NM_014502
gggcaatttccgttaggtgctgaaggctgtggcgcgcggctgtccccattcccacgtgaagcgctacgctagcatcgctcggctggcggctcccagctcgccgcggagcagtcccggcagcagcgggggaccggaagtggctcgcggaggctcagaagctagtcccggagcccggcgtgtggcgcctcggagcacggtgacggcgccatgtccctaatctgctccatctctaacgaagtgccggagcacccatgtgtatcccctgtctctaatcatgtttatgagcggcggctcatcgagaagtacattgcggagaatggtaccgaccccatcaacaaccagcctctctccgaggagcagctcatcgacatcaaagttgctcacccaatccggcccaagcctccctcagccaccagcatcccggccattctgaaagctttgcaggatgagtgggatgcagtcatgctgcacagcttcactctgcgccagcagctgcagacaacccgccaagagctgtcacacgctctgtaccagcacgatgccgcctgccgtgtcattgcccgtctcaccaaggaagtcactgctgcccgagaagctctggctaccctgaaaccacaggctggcctcattgtgccccaggctgtgccaagttcccaaccaagtgttgtgggtgcgggtgagccaatggatttgggtgagctggtgggaatgaccccagagattattcagaagcttcaagacaaagccactgtgctaaccacggagcgcaagaagagagggaagactgtgcctgaggagctggtgaagccagaagagctcagcaaataccggcaggtggcatcccacgtggggttgcacagtgccagcattcctgggatcctggccctggacctctgcccgtccgacaccaacaagatcctcactggtggggcggataaaaatgtcgttgtgtttgacaaaagttctgaacaaatcctggctaccctcaaaggccataccaagaaggtcaccagcgtggtgtttcacccttcccaggacctggtgttttctgcttcccccgatgccactatcaggatttggtcggtccccaatgcctcttgtgtacaggtggttcgggcccatgagagtgctgtgacaggcctcagccttcatgccactggcgactatctcctgagctcctccgatgatcagtactgggctttctctgacatccagacagggcgtgtgctcaccaaggtgacagatgagacctccggctgctctctcacctgtgcacagttccaccctgacggactcatctttggaacaggaaccatggactctcagatcaagatctgggacttgaaggaacgtactaatgtggccaacttccctggccactcgggccccatcactagcatcgccttctctgagaatggttactacctggctacagcggctgatgactcctctgtcaagctctgggatctgcgcaagcttaagaactttaagactttgcagctggataacaactttgaggtaaagtcactgatctttgaccagagtggtacctacctggctcttgggggcacggatgtccagatctacatctgcaaacaatggacggagattcttcactttacagagcatagcggcctgaccacaggggtggccttcgggcatcacgccaagttcatcgcttcaacaggcatggacagaagcctcaagttctacagcctgtaggccctggcccttctgatggaagctgggcctcatctcagtagaggggtagaattagggtttgggggggggggtggggggaatctatggggggagggggctctgtggggtgggacattcacatcatttcactctggtctgagtggtggcctgagaaccatggtggcatggaccaccctcatccatgcaactccaggccccatgggaacggatgtggaaggaagaactgtcaccctcttaaggcccagggtcggagcccagggcctctcccttcctgtcgttcaatggacgtggtggtggctgttccacacccattttgttgcagttcctgtgagacaggagaggctgagccaagggaactgtgaaggggatgggcaggagggcttgtgcagggttttgtaagcagtgatctagtttcattaaaaaaagaaaacaataaccataaccacctccccgtgtctgtctgcaccaggagcacctgggactgggaaggtcaaggggagggagcacacactgggacactggcttccgggaagcccatcttcctttcctttcacagctcttaccctttttttttttttttaattgcacagcagaaataaaaacaaatctgcagatgaaaa

SEQ ID NO: 3734 - DNA, 3832 bp, Homo Sapiens
  NM_014504
aacgtgcgttcgctggcggtgccgggggcggggcgagcaggagggtgggtgtgaggcgggagctggccgcggagcccagacctacccgggcgaagcgggcgagcggtggtttggacgccggcggagacgcgggcgagtggttagcaggaagaagatgagccttaagtctgaacgccgaggaattcatgtggatcaatcggatctcctgtgcaagaaaggatgtggttactacggcaaccctgcctggcagggtttctgctccaagtgctggagggaagagtaccacaaagccaggcagaagcagattcaggaggactgggagctggcggagcgactccagcgggaggaagaagaggcctttgccagcagtcagagcagccaaggggcccaatccctcacattctccaagtttgaagaaaagaaaaccaacgagaagacccgcaaggttaccacagtgaagaaattcttcagtgcatcttccagggtcggatcaaagaaggaaattcaggaagcaaaagctcccagtccttccataaaccggcaaaccagcattgaaacggatagagtgtctaaggagttcatagaatttctcaagaccttccacaagacaggccaagaaatctataaacagaccaagctgtttttggaaggaatgcattacaaaagggatctaagcattgaagaacagtcagagtgtgctcaggatttctaccacaatgtggccgaaaggatgcaaactcgtgggaaagtgcctccagaaagagtcgagaagataatggatcagattgaaaagtacatcatgactcgtctctataaatatgtattctgtccagaaactactgatgatgagaagaaagatcttgccattcaaaagagaatcagagccctgcgctgggttacgcctcagatgctgtgtgtccctgttaatgaagacatcccagaagtgtctgatatggtggtgaaggcgatcacagatatcattgaaatggattccaagcgtgtgcctcgagacaagctggcctgcatcaccaagtgcagcaagcacatcttcaatgccatcaagatcaccaagaatgagccggcgtcagcggatgacttcctccccaccctcatctacattgttttgaagggcaaccccccacgccttcagtctaatatccagtatatcacgcgcttctgcaatccaagccgactgatgactggagaggatggctactatttcaccaatctgtgctgtgctgtggctttcattgagaagctagacgcccagtctttgaatctaagtcaggaggattttgatcgctacatgtctggccagacctctcccaggaagcaagaagctgagagttggtctcctgatgcttgcttaggcgtcaagcaaatgtataagaacttggatctcttgtctcagttgaatgaacgacaagaaaggatcatgaatgaagccaagaaactggaaaaagacctcatagattggacagatggaattgcaagagaagttcaagacatcgttgagaaatacccactggaaattaagcctccgaatcaaccgttagcagctattgactctgaaaacgttgaaaatgataaacttcctccaccactgcaacctcaagtttatgcaggatgatcacaatttagtggagagtatttatttgagcctaaattgtaggtagcccttactacactcaactgattgggatctagaatgtaactaaattgcttataaatgtcagagcattttttaaaggtacagtatatggggattgtttcgtttttcctagcaggggaaccttagttaataataaaatactacttatttgagttactgatacagattcatttaaggcttgtgtgcaaattttgtctcaatcttttttccctccatgattttcctatgtgcttcctctggcattcactgtggttttggtaaataattgccttttaaaggattaaacaaatgaatgctacaaagtgtatgttcaagaaaattaaatggtaccactcttccacagtttggaataattttataattgtaaagatagaaattatattgataagtaaatatgtaaaattgtaaatatgtaaaaaaaagaatggtgtctgctgtgcatggcattttatatgttaattttttagtttaaaatgaagtatattgaatgtttgcctttagcaccattttatttggtttgtcccactaaaatgactcgagaagtgtttagacaaactccccttaagatgtgcactccatctttaagaacgtgttagccttaactttgaggttctatatagtcagagactatgacaccactaaggttcagaataaagtttaggccacataaaattgctgtttaatgtagtcgatggaagactttaaactatgcttctagcttatttttccctcattcattcagcaaatctctattgagttcttcagtgagaaggagcaggcactgggcctggaatggaaggcgggaatgaatgggcctctgatggtgagaggtgacggggtccctcagctgtgagatgcaaggggcgccttgcagcctccataatatacatttgactttgcaaacgtctagacatgttttctgaacctttttcaggacatttcaacctcgggactattcatattagtggcctgagaggtgtttgttgtggggccaccctgtgcatggtagaatgttcagcagcattcctgccatccatatccattaggtgccagtagcacccccgctagagctgtgaaaaattctctccagacatagtcagatgtctcctggggccatatcacccctccgttaagaaccactgatgtcttttacaaaccaggagttatcctcctggtggttaatatggtgtaaccaaagaatcttgcactcaatgcacagtgtgatgttaactaaaacgagttaaatatttaggaggcttgacagctacctgcattgtagaaccttttcttatctcagtggaaccttctataacctaaatataccattgatgattcttcttccattcagtgacatccacagattatgcagctatacttgtgaaatcgtgcatgaggccccagggcaccgttctagaacaacgtcacttcacacaggcagctgagaaaggttctcttgcttttccagtatcttcctaaggatggagcccaaaattgcagagcagtaactttggaataaaaccagggtgggtataaaacttcttattcttaaatttacatataagatctattaagcttgacacatctgtgtcatcacgcactgaagacaggaagcagttcactgagtcagctggttcccaagctcgcacagaaggtgataagttactatcaaatgccagtgagaatcttcttatagaataacctgggcccaagtgattttagtacaaaacttgcccttctttggtttaattttctatgtgcttttaggtgtgaatccagatatgcggtcttaattcctttggaaatacacagttcgtttagttactgtacactctgtttgttcaataaactgcatatcaacttcccacaaaagctgacttttttgggtctcttacatataaagtaggttattgagttgatttttttggaggtatctcatattggtcgaattcttctggtatggactcttgccttatatagaggcttctatttctcttaagtcagcatcaatacaacggccggagtttctgtttttgcaataagaagatgttggtattttatgtagggtaaatgtgactggaatacacctttggaacggaattctttatcaataaagtttcacaatccgtccctcttccaaaaaaaaaaaaaaaaaaaaaaaaa

SEQ ID NO: 3735 - DNA, 1631 bp, Homo Sapiens
  NM_014505
cccagctcagacactcctagccttggggcagctgccgggcgagtcagcggagtagcggccagcgggcgatggagacagagagacacccgacgagaggaggcggggtgggggaggcggggagagtgcgggggcggaggctggcagggggcgctggaagctggagcggtccgtgcgctccccgcgcccgagggtgcaggaggctctgaagcggctgctgcaccgcggggcccaggcggcggctggggggctggggggcgctgccgccgccgccgccgggggcgtcgctggcctcggcccctttgttctcgcgcgctccccctcgccgcccactcccctgctgtcgcgcggcggcggcggtggcggcggcggctcctcccgcccgaggcagtcgggctcggcgccgggggcgggagggggcggggggagcacgccagccgccgagagtggggggcgatggcgaagctccgggtggcttacgagtacacggaagccgaggacaagagcatccggctcggcttgtttctcatcatctccggcgtcgtgtcgctcttcatcttcggcttctgctggctgagtcccgcgctgcaggatctgcaagccacggaggccaattgcacggtgctgtcggtgcagcagatcggcgaggtgttcgagtgcaccttcacctgtggcgccgactgcaggggcacctcgcagtacccctgcgtccaggtctacgtgaacaactctgagtccaactctagggcgctgctgcacagcgacgagcaccagctcctgaccaaccccaagtgctcctatatccctccctgtaagagagaaaatcagaagaatttggaaagtgtcatgaattggcaacagtactggaaagatgagattggttcccagccatttacttgctattttaatcaacatcaaagaccagatgatgtgcttctgcatcgcactcatgatgagattgtcctcctgcattgcttcctctggcccctggtgacatttgtggtgggcgttctcattgtggtcctgaccatctgtgccaagagcttggcggtcaaggcggaagccatgaagaagcgcaagttctcttaaaggggaaggaggcttgtagaaagcaaagtacagaagctgtactcatcggcacgcgtccacctgcggaacctgtgtttcctggcgcaggagatggacagggccacgacagggctctgagaggctcatccctcagtggcaacagaaacaggcacaactggaagacttggaacctcaaagcttgtattccatctgctgtagcaatggctaaagggtcaagatcttagctgtatggagtaactatttcagaaaaccctataagaagttcattttctttcaaaagtaacagtatattatttgtacagtgtagtatacaaaccattatgatttatgctacttaaaaatattaaaatagagtggtctgtgttattttctatttccttttttatgcttagaacaccagggtttaaaaaaaaaaaaaaggtgaggacatctgggtctcatttgcttctgctaggttaaacttttacttgacaacaaggattcctgctgaagtctgaaccttactgtgtaaccctcagtttccactattaaagagtatcttttga

SEQ ID NO: 3736 - DNA, 2774 bp, Homo Sapiens
  NM_014506
tcctgccgcttggccgcggggcgcctggctcagtggcttctgcgggcttcgaggagcgggatgttgcgggctgggtggctccggggcgcggcggcgctggcgctgctgctggcggcccgagtggtggcggcgttcgagcccatcaccgtgggcctagccatcggggccgcgtcggccatcaccggctacctgtcctacaatgacatctactgccgcttcgccgagtgctgccgcgaggagcggccgctcaacgcttcggctctcaagctggatttggaggagaagctgtttggacagcatctagccacggaagtgattttcaaggcgctgactggcttcaggaacaacaaaaatcccaagaaaccactgaccctttccttacacggctgggctggcacaggcaagaattttgtcagtcaaattgtggctgaaaatcttcacccaaaaggtctgaagagtaactttgtccacctgtttgtatcgactctgcacttccctcatgagcagaagataaaactgtaccaggaccagttacagaagtggatccgcggtaatgtgagtgcatgtgcgaactctgttttcatatttgacgagatggataaattgcaccccgggatcattgacgcaatcaagccgtttctagactactacgagcaggttgacggagtgtcttaccgcaaagccatcttcatctttctcagcaatgcaggcggggaccttataactaagacggctcttgacttttggcgggccggaagaaagagggaagacattcagctgaaggacctggaacctgtactgtctgtcggagtcttcaataataaacacagtggcctgtggcacagtggactgatcgacaaaaacctcattgattactttatccccttcctgcctttggagtacagacatgtgaaaatgtgtgtgagggccgagatgagggcccgtggttctgccatagatgaagacattgtcacaagagtggcagaggaaatgacgtttttccccagagacgagaaaatctactcagacaagggctgcaagactgtgcagtcgcggctggatttccactgagctcctatccagatggggtaggagacagctgggaggctccgcacgccagaggccttgcctttcagaagaaccctgaagaccgctttggggttttgcctgtttgcaccttagacttttgggtatagaatcttttttttgagaagaggtctcactccgtcatccaagctggagtgcagtggtgcaatcctcaactcactgcaacctccgctcccggtttgagtgattctcatgcctcagcctcccgagtagctgggattacaggcatgagccactgtgcccagctgggatatagaatctaagagttgattgtggaaaacacgtgaatctattgcgcgcatttgtcatttagcaagatggcagcagtccagctgttctttgcagctggagatgaacttttaaaaatccccttcacacttaatgtactgaccgagacagaagtacctgaaaacagctgtgcatggcaggcccggcaatagcttctgacccacagcacccgcgcctcagaagctacggtcacaactaaaggagtccagggacttgctgcaggctggggggcactgggtggttctcaccagcaggctgcggggcactgtgttctcattggccaaaaacatccttttgctctgtctcgttctttacacagagttcactgacttgaagtatactcagttaaaatcggggctggaggtgcagacggtgtctgaccggaggatgtggccgtgcccgccgagcactcttgatctgagctgacctgtgtgtgtgtgtgggggggggtggggccttcacctaagacctctgcagcagacctggacagacaggcccctcccgcctgtccatcgctctagctgctaatacagccctggctgtggaatccttcaccgtctcagctggtatcagccccagcctgccttgtgccatatctcagcttggatctctgctagagtccccccaaccatatatcatagagttgaatcacaatgagaccgttggctttgaatttgagtcgttggttcccatggtgagatgcttgttaagactttatacttgggtcaatctctcactttattttgtagaaccatttgaaatcctaggatgtgcttgttctggaaggatgacatgggcccagactgaacaagtcagcttgatgatcttaaatgatggaagtataggacgttgcttattttaaaacaagggaaggacacaaaatggaatgactgcttagtcctttctcagatactcttaaaacaattttttattgttaaatttgtggtaatacatggtcacaaccgtggatcaaacaaggtcagtctaaagtggcaggtcctaggtgtgacctgataccaccaccctttgtggcagcaccgggctggactgccctgatccctgggacgtgagacttagcttccagccagtgtgaatcattgtatctgtctcataatcacagcacagctgcagacacaacaacgtgcagcattttttacataaaaatatggtagaattaatttatgacatggaaatgccttacgtggtatcacacttagtcttgaaaaaaacaccaaggtgacgtttaaaatttttagtacatatcctcaaattggagctaagttatacttcttttataaccttttgggcatctggtcgagagaagacaagattttctctatttacagtgaggcaataaatatgtttgccacctttaaaaa

SEQ ID NO: 3737 - DNA, 1302 bp, Homo Sapiens
  NM_014511
agctggggcgcggccgcctgtctgcacagacagcaccatgtcgctcatggtcgtcagcatggtgtgtgttgggttcttcttgctgcagggggcctggccacatgagggagtccacagaaaaccttccctcctggcccacccaggtcccctggtgaaatcagaagagacagtcatcctgcaatgttggtcagatgtcaggtttcagcacttccttctgcacagagaagggaagtttaaggacactttgcacctcattggagagcaccatgatggggtctccaaggccaacttctccatcggtcccatgatgcaagaccttgcagggacctacagatgctacggttctgttactcactccccctatcagttgtcagctccgagtgacccactgcttgtttctgtcacaggaaacccttcaaatagttggccttcacccactgaaccaagctccgaaaccggtaaccccagacacctgcatgttctgattgggacctcagtggtcatcatcctcttcatcctcctcctcttctttctccttcatcgctggtgctgcaacaaaaaaaatgctgttgtaatggaccaagagcctgcagggaacagaacagtgaacagggaggactctgatgaacaagaccctcaggaggtgacatatgcacagttgaatcactgcgttttcacacagagaaaaatcactcgcccttctcagaggcccaagacacccccaacagatatcatcgtgtacacggaacttccaaatgctgagccctgatccaaagttgtctcctgcccatgagcaccacagtcaggccttgaggggatcttctagggagacaacagccctgtctcaaaactgggttgccagctccaatgtaccagcagctggaatctgaaggcgtgagtctgcatcttagggcatcgctcttcctcacaccacaaatctgaacgtgcctctcccttgcttacaaatgtctaaggtccccactgcctgctggagagaaaacacactcctttgcttagcccacaattctccatttcacttgacccctgcccacctctccaacctaactggcttacttcctagtctacttgaggctgcaatcacactgaggaactcacaattccaaacatacaagaggctccctcttaacacggcacttagacacgtgctgttccaccttccctcatgctgttccacctcccctcagactagctttcagccttctgtcagcagtaaaacttatatattttttaaaataatttcaatgtagttttccctccttcaaataaacatgtctgccctca

SEQ ID NO: 3738 - DNA, 1602 bp, Homo Sapiens
  NM_014513
aggggtgcggccgcctgtctgcaccggcagcaccatgtcgctcatggtcatcagcatggcgtgtgttgcgttcttcttgctgcagggggcctggccacatgagggattccgcagaaaaccttccctcctggcccacccaggtcccctggtgaaatcagaagagacagtcatcctgcaatgttggtcagatgtcatgtttgagcacttccttctgcacagagaggggacgtttaaccacactttgcgcctcattggagagcacattgatggggtctccaagggcaacttctccatcggtcgcatgacacaagacctggcagggacctacagatgctacggttctgttactcactccccctatcagttgtcagcgcccagtgaccctctggacatcgtgatcacaggtctatatgagaaaccttctctctcagcccagccgggccccacggttctggcaggagagagcgtgaccttgtcctgcagctcccggagctcctatgacatgtaccatctatccagggaaggggaggcccatgaacgtaggctccctgcagggcccaaggtcaacagaacattccaggccgactttcctctggaccctgccacccacggagggacctacagatgcttcggctctttccgtgactctccatacgagtggtcaaagtcaagtgacccactgcttgtttctgtcacaggaaactcttcaaatagttggccttcacccactgaaccaagctccgaaaccggtaaccccagacacctacacgttctgattgggacctcagtggtcaaactccctttcaccatcctcctcttctttctccttcatcgctggtgctccaacaaaaaaaatgcatctgtaatggaccaagggcctgcggggaacagaacagtgaacagggaggattctgatgaacaggaccatcaggaggtgtcatacgcataattggatcactgtgttttcacacagagaaaaatcactcccccttctcagaggcccaagacacccccaacagataccagcatgtacatagaacttccaaatgctgagtccagatccaaagctgtcttctgtccacgagcaccacagtcaggccttgaggggatcttctagggagacaacagccctgtctcaaaaccgggttgccagctcccatgtaccagcagctggaatctgaaggcatcagtcttcatcttaggggatcgctcttcctcaaaccacgaatctgaacatgcctctctcttgcttacaaatgtctaaggtccccactgcctgctggagagaaaacacactcctttgcttagcccacaattctccatttcacttgacccctgcccacctctccaacctaactggcttacttcctagtctacttgaggctgcaatcacactgaggaactcacaattccaaacatacaagaggctccctcttaacacagcacttagacacgtgctgttccaccttctctcatgcagttccacctcccctcagactatctttcagccttctgtcagcagtaaaacttataaattgtttttagtaatttcaatgtagttttccctccttcaaataaacatgtctgccctcatggtttcga

SEQ ID NO: 3739 - DNA, 3293 bp, Homo Sapiens
  NM_014515
acaaacacaaacacaaacacgaacacgaacacgctcagcgtccccggggagggcggactgaagccacctcaccattcatcgcccctggaccccgcagtccccctcggactcagggccagagccttctgcgaagcaacctagccccagggaaacggtagcggccgcagaagccccgctctctgtaacggccgcggaggagcagcaagcctccctgtgagtcggtgggagacaagacggagcggcggtaagggcggtagggaagtgaagcgcctctctccaccttgttagaagcgcgctgaaagcggcctgcctacccaccccatcgctgccgttttgcagtcgtcgctcccaccttccgctgccgcctggagggaagccggagcgacgggggtcacggcggcggtcagagggtaaaggtcttgctcccagcagcctccgcggtggatacgtcgccatcttggatccgcgggacaagaaaattcatgcgagggagacgtggtgggcggtccttcctgtgacacgacccttgagtgacagttctatttgattgcctccggtactgtgaggaaaggacacgactctatggtgaggactgatggacatacattatctgagaaaagaaactaccaggtgacaaacagcatgtttggtgcttcaagaaagaagtttgtagagggggtcgacagtgactaccatgacgaaaacatgtactacagccagtcttctatgtttccacatcggtcagaaaaagatatgctggcatcaccatctacatcaggtcagctgtctcagtttggggcaagtttatacgggcaacaaagtgcactaggccttccaatgagggggatgagcaacaatacccctcagttaaatcgcagcttatcacaaggcactcagttaccgagccacgtcacgccaacaacaggggtaccaacaatgtcacttcacacgcctccatctccaagcaggggtattttgcctatgaatcctaggaatatgatgaaccactcccaggttggtcagggcattggaattcctagcaggacaaatagcatgagcagttcagggttaggtagccccaacagaagctcgccaagcataatatgtatgccaaagcagcagccttctcgacagccttttactgtgaacagtatgtctggatttggaatgaacaggaatcaggcatttggaatgaataactccttatcaagtaacatttttaatggaacagacggaagtgaaaatgtgacaggattggacctttcagatttcccagcattagcagaccgaaacaggagggaaggaagtggtaacccaactccattaataaaccccttggctggaagagctccttatgttggaatggtaacaaaaccagcaaatgaacaatcccaggacttctcaatacacaatgaagattttccagcattaccaggctccagctataaagatccaacatcaagtaatgatgacagtaaatctaatttgaatacatctggcaagacaacttcaagtacagatggacccaaattccctggagataaaagttcaacaacacaaaataataaccagcagaaaaaagggatccaggtgttacctgatggtcgggttactaacattcctcaagggatggtgacggaccaatttggaatgattggcctgttaacatttatcagggcagcagagacagacccaggaatggtacatcttgcattaggaagtgacttaacaacattaggcctcaatctgaactctcctgaaaatctctaccccaaatttgcgtcaccctgggcatcttcaccttgtcgacctcaagacatagacttccatgttccatctgagtacttaacgaacattcacattagggataagctggctgcaataaaacttggccgatatggtgaagaccttctcttctatctctattacatgaatggaggagacgtattacaacttttagctgcagtggagctttttaaccgtgattggagataccacaaagaagaacgagtatggattaccagggcaccaggcatggagccaacaatgaaaaccaatacctatgagaggggaacatattacttctttgactgtcttaactggaggaaagtagctaaggagttccatctggaatatgacaaattagaagaacggcctcacctgccatccaccttcaactacaaccctgctcagcaagccttctaaaaaaaaaaaaaaaaaaaaaaaaagacttcccttttcttggggtatggctgtctcagcacaatactcaacataactgcagaactgatgtggctcaggcaccctggttttaattccttgaggatctggcaattggcttacgcaaaaggtcaccatttgaggtcctgccttactaattatgtgctgcccaacaactaaatttgtaatttgtttttctctagtttgagcagggtctgaattttttcatttatttccttttttgccagcagacagacttgagtctgtaaagacaagcaaatacactgacagaagtttaccatagtttctaaaatgtaaaaaagaaaacccccaaaagactcaagaaaattagaccacaaattttgcattgttcattgtagcactattggtaataaaataacaaatgtttgtgcatttttatgtgaagatccttctcgtatttcatttggaaagatgagcaagaggtctgcttccttcattttacttccccttctgtttttgaaaggcagtttcgccaagcttaatgcaagaatatctgactgtttagaagaaagatattgccacaatctctggatggttttccagggttgtgttattactgagcttcatctttccagaatgagcaaaacactgtccagtctttgttacgattttgtaataaatgtgtacattttttttaaatttttggacatcacatgaataaaggtatgtatgtacgaatgtgtatatattatatatatgacatctattttggaaaatgtttgccctgctgtacctcatttttaggaggtgtgcatggatgcaatatatgaaaatgggacattctggaactgctggtcaggggactttgtcgccctgtgcactaaaagggccagattttcagcagccaaggacatccatacccaagtgaatgtgatgggacttaaaagaagtgaactgagacaattcactctggctgtttgaacagcagcgtttcataggaagagaaaaaaagatcaatcttgtattttctgaccacataaaggcttcttctctttgtaataaagtagaaaagctctcctcaaaaaaaaaaa

SEQ ID NO: 3740 - DNA, 4162 bp, Homo Sapiens
  NM_014517
gtcgcgttgaagccagcgtccggccggcagagcggcgtcggcggggttggccggggcggtgtggcgctagagcctgggcgggccgggggcaaggagtcaaggcttgggggcgggtgacgggcgggcggagggcttgcccccgtgtggtcctcggagcggcccgaggtccagcctcccagcggtcccggaggaggatgcgaccggggggccccgggcggggcggtcggcggcggctgcagcgctagcggcgcgggggctgggcggcggcgccggcatgaggcgcagggccggtgtccgcgggagggtggcgctgccggcggcccggccgctcccgctgcaattgctcgctgggctcgtcgtgccctgccagtggggcccccgcagctctcgtcccggccgccgctggtgaccactcgccgcccctccggaggcttcacccgcgccctcccccaggacgcgccagcggagctccggctccttcgccctggacgcggaggccgcggtgtgcggggcgacggcgaggccggaagatggcctgggtgctcaagatggacgaggtgatcgagtccgggctggtgcacgacttcgacgccagcctctcgggcatcgggcaggaactgggcgccggcgcttacagcatgagtgatgtcttggcattgcccattttcaagcaggaagattccagccttccattggatggtgaaacagagcacccaccctttcagtatgtgatgtgtgctgcaacgtcaccagcagtaaaactgcatgatgaaacgcttacttatttgaaccaaggtcagtcatatgaaattcggatgctggataatcggaaaatgggtgatatgcctgagatcaatggaaaattagtaaagagcatcataagggttgtattccatgacagacggctacaatacacagagcatcagcaacttgaaggatggaagtggaatcgcccaggagacagacttcttgatttagatattccaatgtctgtgggaataattgacacaaggacgaatccaagccagttaaatgcggttgaatttctgtgggacccagcaaaacgcacctctgctttcattcaggtacactgcatcagcacagaatttactccacggaagcacggaggtgaaaagggagtgccctttaggatccaggttgacacctttaagcagaatgaaaatggagaatacacagatcatctacactcagctagctgccaaatcaaagtttttaagcctaaaggtgcagacaggaaacaaaaaactgaccgagagaagatggagaagagaacagctcatgaaaaagaaaagtatcagccgtcctatgataccacaatcctcacagagatgaggcttgagcctataattgaagatgcagttgaacatgagcagaaaaagtccagcaagcggactttgccagcagactacggtgattctctggcaaagcgaggcagttgttctccgtggcccgatgcccccacagcctatgtgaataacagcccttccccagcgcccactttcacctccccacagcagagcacttgcagtgtcccagacagcaattcttcttccccaaatcatcagggagatggagcttcacagacctctggtgaacaaattcagccttcagctacgatccaggaaacacagcaatggctgctcaaaaacagattctcttcctacacaagactgttctctaatttttcaggtgccgacttattaaaactgacaaaggaggatttagttcaaatttgtggtgcagccgatggaattcggctctataattcactgaagtcaaggtcggttagaccccgtttaaccatctatgtctgccgggagcagccaagcagcacagtgctgcaagggcagcagcaagctgcaagcagtgcaagcgagaatggcagtggggcaccctatgtttatcatgcaatctacttggaagaaatgattgcctcagaagttgctcgaaaacttgcgctggtgtttaatatccctctccaccaaattaatcaggtttacagacagggtcccaccggtattcacattcttgttagtgatcagatggttcagaattttcaagatgagagttgttttttattctccacagtaaaagctgaaagtagtgatggcatccacataattttgaagtgatgtcttatatagactgaactgtattcagtaccaaatagtcacgcttaaaagtgtgtgaagactgaatccaagaagtcttgggattggattttaccatatgaaatgtttcatattgaaaacacaagatgacctttctaatgagctgtatgagaggtgaatctcctcactgtcactgccatagccaagcatcctcatgagagtgagcacatcggcacagcatgcatccagctctggaggccacggtgcaggcatagctgcctgctgctctggcagaggccagtaaatacagttcctagaagcagcctttgctgtctttttacactgtatgcggtttggaaatgaatgtagaaacttactgtgggcatttacctttctgtgccagtttggcttttattgcctgaaccttatgctgacctggagaggagatgggggacagtgctgttgtggggccagcagtgaatctgtatgcggagagttgtgttgtgctgatgtggccgttggtggtcaggtaagaggctcggcaccttcttggaagaaatcatgtctgagggtgtacgtttgatatgatcatgccagattggagaagatccaagccaggaagatgggcttgaagcaaactgcattatcaggagtaccttggtgagaggatcagtgtaaatcctaataggtacaaagacttttgtgttttggctttgtcacagatttattgaaaaacttttttgcttctgcttccatttttagcattttagtttctggttttcatttttggagattccttgccttttaaactcgtggtttttctctcattttcttccctctctccctccatctctgaccacccccaccctaaccccccacccccaccatcctattaaacatttttaaagccctaccccagacattggaaataggtgacccaagtagggggagaaagtattattgttgatagcttctgactaggtgttaagggatcttcattatgaacaagatgaatttttttctggaaacactagatgttatcaatcaaacactaaaatgtaccatacaaatcccttaagcctctcaaatattgagctttagtacaatcatggatagacattctggtgatgatttaggggctttttatacaccacatactagcttctttctctataagagtgcctctttcataaaaccaaatgcttgtctgctagcatacttttcaaagggaatccactgttttctcactttcctcccatatctccgtccttcatccaaaaccttcccagaatccatcagcaagcatgtttgaggcctgtggtgtaggggactgaattttttttttaacttctattccattttaattgtaggatatctttgtccatatacccaggtgtcctgatttgaatgtactatttgatcctcattgtgttcaggcaaaaaataggaaatgagtaattttgagtttgaaatctctcccagaagacaaactacttcagtgagtaaaagctttgacattttatgttttattcataaagggggttaattatttgctacaaagaagcacgatctattttcatcatcgatttgaaaatatctgtaactcctatagatcctataggcagagagttttcctttctgactttttccctttgctttcgtgtgaccacatgttttctgtaccagtcactggggaaagaagtgagtttatctcgtttgttttaaaagttttgcttgtctatttagcattcctttttgggtctcaagatttatggaacaataaatgtcatttaatgctgtgtgcttattttgaattcctcatcaggttttagaagcggggtaaaaatacttagatgcttatcagacttgaaattatactgagtggcattgaacgtgagtttgtcccagtgaaacaggctaaataaattttggcaccagcaaatttgttactttgtttttttaatagtaggatgtacacatttcagtataataaatgttttctgattgttttgcaaaaaaaaaaaaaaaaa

SEQ ID NO: 3741 - DNA, 2125 bp, Homo Sapiens
  NM_014519
cgacgacaaggatggggcccatctcttcggagcctaaggatccagcccaggtccagccctgcgcagccgcccaccaagctgccagaagacgagccggacgcccaaggctacgagaggacgattgcagaattgtacaggctagtggttggggaatattttttcgtggaagggaccgtcttccttagctgtggccctctcatcaggtctgggaagaggtaattggaaaatagaactcatggagaagtgttaccacaggccatggacaaggccagaatttccctgacatctgtccgccagcaccgcccttcaggtacaattccacaagagaccccccaaacttgatgaagtcacccgcttacaagggctcactctccacctgcgcaaggactgcaattcccaggggcctccagggcacccggccgctccagtccagtcgtgcaggcggcgcgctctttctcgctccgctcaagtccaggaaccggttcccgggctcccagcctctcggcagcgcccacgcgcctgggccaaagtccgcgaacggaagccggcggcgaggaggattctgggagttggaggccgaggctgcgacctgcgcaggcgcaaacctgcccctggggtgagggctgtaagtggcgcgattcgcggcagcgccccgatggaacctcctggtcctgtgagggggcccttgcaagattccagctggtatgagccttctgcagagctagtgcagactaggatggctgtatcactaacagcagctgaaactctggcccttcagggtacacagggacaagagaagatgatgatgatgggaccaaaggaagaggaacagtcttgtgagtatgagaccaggctacctgggaaccactctaccagtcaagagatcttccgccaacgcttcaggcatctccgctaccaggagactcctggtccccgggaggccttgagccaactacgagtactctgctgtgagtggctgaggccagagaaacacacgaaggagcagatcctggagttcctggtgctggaacaattcttgaccatcctgcctgaggagctccaatcctgggtgcggggacatcaccctaagagtggagaggaggctgtgactgtgctggaggatttagagaaaggacttgaaccagagccgcaggtcccaggccctgcacatggacctgcacaggaagagccatgggagaagaaggaatctctgggagcagcccaggaagcactgagcatccagctccagcctaaggagacccagcctttcccaaagagtgaacaggtatatttacattttctgtcagttgttacagaagatggcccagagcccaaggacaaaggatcattgccacaaccacccattactgaagtggaatcacaggtgttctcagaaaaacttgctactgacacctctacatttgaagctacctctgagggtaccttagaactgcagcagagaaatcccaaagcggagagactgaggtggtcccctgcccaggaggaaagtttcaggcagatggttgtcatccataaggaaattcccacagggaagaaagaccatgaatgtagtgaatgtggtaaaaccttcatttataactcacatcttgttgtccaccagagagttcattctggagagaaaccctataagtgtagtgactgtgggaaaactttcaaacagagctcaaacctcggtcagcatcagagaattcatacaggagagaaacccttcgaatgtaatgaatgtgggaaggccttcagatggggtgctcatcttgttcagcatcagaggattcactcaggagagaagccctatgagtgtaatgagtgtgggaaggcctttagtcaaagctcatatctaagtcagcatcggagaattcacagtggagagaaaccttttatatgtaaagaatgtgggaaagcttatggatggtgctcagagctcattagacatcggagagttcatgccagaaaagagccttcccattgaattgaaggggagaacgtctccagacagaattctacatcggtctaatctactttaggactggatcccataaaagttataagttccttaaaaaaaaaaaaaaaaaaaaaaaaaaaaaaaaaaaaaaaaaaaaaaaaa

SEQ ID NO: 3742 - DNA, 4585 bp, Homo Sapiens
  NM_014520
ctgacctggaagcggctggggccggagcacacgtgtttcgtgtttcggtgagtgtggcggagatggagagccgggatcccgcccagccgatgtcgcctggagaagcgacgcagagtggcgcccggcctgccgaccgctatggcctattgaagcacagtcgcgagttcttggacttcttctgggacattgcgaagcctgagcaggagacgcgacttgcggccacggagaagctgctggagtatctgcgtggcaggccgaaggggtccgagatgaaatatgccctgaagcgtctaatcacgggactcggggtcgggcgagaaacagcccggccctgctacagtttggccctggcacagctgttacagtcttttgaagacctccccttgtgcagcatcctgcagcagatacaagaaaaatatgacctgcatcaggtgaagaaggcaatgctgagacctgctctctttgcaaacctgtttggagtgctcgccctctttcagtcaggtcggctggtgaaggaccaggaggcactgatgaagtcggtgaagctgctgcaggccctggcccagtaccaaaaccacttgcaggagcagccccggaaggccctggtggacatcctctccgaggtctcgaaggccacattgcaggagatcctgccggaggtcctcaaagccgacttgaatataatactcagctcccctgaacagctagagctcttcctcctggcccagcagaaggtgccctccaagctcaagaagctggtgggatccgtgaacctattctcagatgagaatgtccccaggctggtgaatgtgctgaagatggccgcctcctctgtgaagaaggaccgcaagctgcccgccattgctctggacctgctccgcctggcactcaaggaagacaagttcccacggttctggaaggaggtggtggaacaagggctgctgaagatgcagttctggccagccagctacctgtgtttccgcctgctgggcgcggccctgcccctgctgaccaaggagcagctgcacctggtgatgcagggagacgtgatccgccattacggggagcacgtgtgcactgctaagctcccaaagcagttcaagtttgccccagagatggacgattacgtgggcaccttcctagaggggtgccaggatgaccctgagcggcagctggccgtgctagtggccttctcatctgtcaccaaccaaggcctccctgtcacgcctactttctggcgggtcgtgcggttcctgagccctccggccctgcagggctatgtggcctggctgcgggccatgtttctccagccagacctggactccttggttgacttcagcaccaacaaccagaagaaagcccaggattcatcgctccacatgcctgagcgagctgtgttccggctgaggaaatggatcatctttcgattggtgagcattgtggacagcctgcacctggagatggaggaggccttgactgagcaggtggccaggttttgtttgttccactcgttctttgtcacaaagaagcccacatcccagatccctgagacaaagcacccgttctccttccctttggaaaaccaggcccgagaggctgtcagcagtgccttcttcagtctgttgcagaccctcagcacgcagttcaagcaggcaccgggccagacccagggtgggcagccctggacctaccacctggtgcagttcgcagacctcctgttgaatcacagccacaacgtgaccaccgtgacacccttcactgcgcagcagcgccaggcctgggaccggatgctgcagactctgaaggagctggaggcccactccgcagaggccagggctgctgccttccagcaccttctgctcctcgtgggcatccacctcctcaagtcccctgcagagagctgtgacctgctgggtgacatccagacctgcatcaggaaaagtctgggagagaagccccgccggagccgcaccaagaccatcgacccccaggaacccccgtgggtagaggtgctggtggagatcttgctggccctgttggcccagcccagccacctcatgcgccaggtggcccggagcgtgtttggccacatctgctcccacctgaccccgcgtgccctgcagctaattctggatgtgctgaaccccgagaccagtgaggatgagaatgaccgtgtggtggtgacggacgattctgatgagcggcggctgaagggtgcagaggacaagagcgaggaaggtgaggacaacagaagctcagagagtgaagaggagagcgagggggaggagagcgaggaggaggagcgcgacggggacgtggatcagggcttccgggaacagctgatgaccgtgctgcaggctgggaaggcgctgggtggagaggacagtgagaacgaggaggagctgggggatgaggccatgatggccctggaccagagcctcgccagcctctttgccgagcagaagctgcgtatccaggcccggcgagacgagaagaacaagctgcagaaggagaaggctctgcggcgcgacttccagatccgggtgctggacctggtggaggtgctagtgaccaagcagcccgagaatgccctggtcctggagctgctggagccgctgctgagcatcatccggcgcagcctgcgcagcagcagctccaaacaggagcaggaccttctgcacaagacggcgcgcatcttcacgcaccacctgtgccgtgcccggcgctactgccacgacttgggtgagcgcgcaggggccctgcacgcccaggtggagcggttggtgcagcaggctggccgccagcccgactcccccaccgccctctaccacttcaacgcctctctctacctgctccgggtcttgaagggcaacactgctgagggctgcgtgcatgagacacaggagaagcagaaagctggcactgaccccagccacatgcccacgggcccgcaggctgccagctgcttggacttgaacctggtgacccgggtgtactcgacagcactgagctccttcctgaccaagcgcaacagccccctcacagttcccatgttcctcagcctcttctcccggcacccggtgctctgtcagagcctgctccccatcctggtccagcatatcacgggcccggtgcggccccgtcatcaggcctgcctgctgctccagaagaccctgtccatgcgggaggtgaggtcgtgctttgaggaccccgagtggaagcagctgatgggccaggtcctagcaaaggtcaccgagaacttgcgcgtgctgggggaggcgcagaccaaggcgcagcatcagcaggcactgtcctccctggagctgctcaacgttctcttcaggacctgcaaacatgagaagctgaccttggacctgacggtgctcctgggtgtgctgcaggggcaacagcagagcctacagcagggggcacactccaccggctccagccgcctgcacgacctctactggcaggccatgaaaaccctgggagtccagcgccccaagttggagaagaaggatgccaaggagatccccagtgccacccagagccccatcagtaagaagcggaagaaaaagggattcttgccagagacgaagaagcgcaagaaacgcaagtcagaggatggcacgccagcggaggatggcacacctgcagccaccggcgggagccagccccccagcatgggcaggaagaagaggaacaggacaaaggctaaggtcccagcccaggcaaacgggacgccaaccaccaagagtccagcccctggcgcccccacccggagccccagcacccctgccaaatccccaaaactgcagaagaaaaaccagaagccgtcccaggtgaatggagctcccgggtcccccacggaacctgcaggccaaaagcagcatcagaaggctcttcccaaaaagggggtcttgggcaaatcaccactgtccgcgctggcacggaaaaaggcaaggctgtctttggtcatcaggagtcccagcctgcttcagagtggggccaagaagaaagcacaggtgaggaaggcagggaagccctgagcacaggtacgggcccccctcagcccctgcctccatctgcctgagacgcctattttttttttttttttttaaaccatgattttaatacgcaagctgtttctaaggcgctgccactggggagggtggctgttgccgcctgcccgggcatcctgctctggcaagcacagcctgagccattcctgcaggggtcccagggtgcagagacctccccacccccggttctgggctgggaccctggctccagggccatgtccagggctctggtgtttgcctgggttggtgcaggttgatgtgctggctgcaggcaggtgtgaccatctctcgtgcctgccacctctttgcccccaggcttttttgctgtgagggagccaccagggggtgatttaaataggtttatttcttcatttacaagaggaatatatttggcttctctcttaagactctgagattcacaatcagcagctctaaaaaataaaggagcagtttggcttccggaaggaagaggaggcaacactcggaaaaaaaaaaaaaaaaaa

SEQ ID NO: 3743 - DNA, 4682 bp, Homo Sapiens
  NM_014547
gggagtgcgcacgcgcgtcggaggcgaaggaggaacccaccgcacctacagggcggtcgagtgagggagctgctggcgggtgggtctggcaactctttgggaggccgacgcgggcggaccggcgggtgctgggaaccgagcctcggcttgcggccggcagtttccgtgggtctgtgaagaggtcggcggcccctgcgggcgccagtcagctttaagaaaaagtagagatcacttctgactgtactgaacagcaaaaattaagtgacttgctgccctgcacatcatggcactgccattccgtaaggacttagaaaagtacaaagaccttgatgaagatgagctccttgggaatctgtcagaaacagaactgaaacaactggaaactgttttggatgatcttgaccccgagaatgcccttctgcctgcagggttccggcagaagaaccagacatcaaagtccaccacagggccatttgatagagagcatctcctttcatatctggagaaagaagcattggagcataaagacagggaagactatgtgccctacactggagaaaaaaaagggaaaatatttatccccaaacagaaacctgtacagacttttacagaagaaaaagtgtctcttgatccagaattagaagaagctttgacaagtgcttctgatacagaattgtgtgacctcgcagcaattcttgggatgcacaatttgataacgaatacaaagttctgtaatataatgggaagtagtaatggtgttgaccaagaacatttttcaaatgtggtcaaaggtgaaaagattcttccggtatttgatgagccaccaaatccaaccaatgtagaagagagtttgaagagaactaaagaaaacgatgctcatcttgttgaagttaatttgaataatataaagaatatcccaattccaaccctaaaagattttgcaaaggctttggaaaccaacacacatgtgaaatgtttcagtcttgcagccacccggagcaatgaccctgttgctactgcttttgcagaaatgctgaaagtgaacaaaactttgaagagcttaaatgtggagtccaactttatcacgggagttgggattctggcactgattgatgcgttaagagataatgaaaccctggcagagctcaagattgacaatcagaggcagcagttggggacagctgtagaattggaaatggccaagatgcttgaggaaaatacaaatatccttaaatttggatatcagtttacacagcagggaccacgaaccagagcagctaatgctataacaaaaaacaatgacttagtgcgtaagagacgagttgaaggagatcaccagtaagtctgcaaaggtgtaatctttggaagacttcagaagatcaccaagggctcatgttggtgacatcatgtaaaattttcctgggtagaagggaaaagactggaaaaatttttttagtgacatgcattttttttttagttgttatcaaattgtaaaatcagtaatgtgatattttatattctgaaacatttctactttctgctaaaatcaattttaatttagtttaattgaatgatttatgatgaatcttgggcaaaaaaatacaactgtaaaaaatttcacaggtcatttgtgtagaataatttgaacattgtgaggaccaatcttttttaaatcaaaagggatgttgctggtatcagaattgttattgcttcatttagacataaaacacttaagtgttttcttcactccgtgacctggagagttttccattttttaaaatacatgaacttggcaagggtgtgatttttctttatcaagagaacaaaatgccagaatgttaaaacagttaactcaaaatctagtcatctgtgtaggagctaaagcaggtctccagggagagagggtggtcgtctgtgcattccaggttactgcacttgtctgatgtgacgtagcaacacccaggtcttcttaaaacaaagtcatcagctttgccaggttacatactttatttaaaagtatagtgaggtcgaagttcattccagtgtttcattttaataatgtgggcattattaaatttttgtggaagctaatagtaaaaaataaaagctgttttcaccacctccctccccaccccccaaaaaaggcgtacagccaactcttagttatttagggtaagagaaaaaagaaaactgttaaacaatgaaatcaaagataataaatatgatagatttccagtatgaggcacttgcaaaacagtcatttaaactgatggttactgtaagtcagttggaagctggcatgtatgtaaattacttggtgttacaccatatccgaagaagttcctatgtgcagtgcagaattgcataaacagtatttaatcactgctacaaatcttccaaccaagaaggaaaactgctattcttcataaatctaatttttagtatatgcttcctttcatcttatacttttatcaatatttataaaagtcatttctataataaaagcagtctttcttgctcaaagtattaaggtgaacaattgaatagagtactgtggtcgggagactgatttgagactgcagagctgatgctgggtagagggtctggacttgtattcatgttctgtctcagggcagcccctggagcaggagatggcagaggcatttacagctgcagaaaacagggaggaatggaatctgaggtagccctggcctcaaaattcaggcctggctgtatcatttacagagatttttctggagggaaaagtctcatttctgaggaaggcaaggtggctaatcattattaattttttttaaactttttgggccgggcgcagtggctcacgcctgtaatcccagcacttttgggaagccaaagtgggtggatcacttaaggtcaggagttcaagaccagcctggccaacatggtgaaaccctgtctctactaaaaatcaaaaaagtagccgggtgtggtggtgcacacctgtaatcccagctactcaggaggctgaggcaggagaattgcttgaacctgggagatggagattgcagtgagctgagatcgtaccactgcactgcagtctgggtgacaaagcaagactctgtctcaaaaaacaaacaaacaaacaaactttttgaaattgaattgcaatatgtctgctactttggcttgggctggacagtttatctaataagcaaggcagcttcttgtgtgctatggtaataagccttcttaacaggctaagcttccctcataagaactgtggtgtttctctttttttttttttgttttggtttgttttggttttttggttttgttttgttttgttttttaaatcagtatccaatgttttataggggccaaaggttaactttgcactattccctgtcagttaaaggccactgatatttttctaagttagcaaggctcacttgcttgctttcttgcctcccttgcctccatccctctcccttcctaccttctctatttacctatttctctccctccctctcttctcctctctttttttttccccgcatatgcagctttttgattgtacttgattttatagagactgcacagttccagcaagattgggagtcaggcatggagcaggcatctcaggctaccagaaagaattggtcacctagactttcagtcaggcatcctcgtttgcattgtcctgtaagtcaattagttgataaatagttcccccttcatcccttaagttttgtttttgtttttgtttttaatataggtaagtgggactctacctaaaattttgcatcatacttatgggtaatatctttttcatatattatttatcaaagtatgaagttgagtattttgcttgtaccatttcaattctgcattatagtagttcattgtataactgaaagaaatgatttcttcataagtgacattaaatatgaacattcatccaattgaatttacaaaatctttccaaaattataagggagaaaaatcgggtttacttcaatctttaaaaatctggcacctcttagtaactttcagtatttctaaattgctctaaaattttataataaatagattagggttttgcaatagtcttaatttttaagccaaaggttttctgagaccttaggttttgtagtctaaccagcttatgtggttatttaaaagaatattctttgtgtttttaaattgctatttttaaaaaagctttttattacccattttataaaatgttatactcatatttgtctgaatttttccagtattcctacatgaaattgtatgtattaaaaactcaatattagtggcaaatattaatactattaaaatggattttggtgctatattcttgtagctaaagcctagtagaattctcaagaataggtgaaatacactttcaaagttgcctgtcatttaaaagaccaaataagcattttgtattaaataaattagcagatggttagagacttcaaggagagttagcttggtcatttaattgcgacttcatgttatttgattgaaataacccacatccttgctttgtataagatattcgctctggagaagttacatgtaaatagaattctataaattgttttccagttgaccgagtatctgttgtgtttttgtttaaaaagaggattccatgacataataaaaattattttaaaaaaaaaaaaaaaaaa

SEQ ID NO: 3744 - DNA, 2727 bp, Homo Sapiens
  NM_014563
acatcccagggtatcgcgagaactgcttcggcgttctggctacaggttcggggcgcgggtctcttccgcggaaactgacattgcgtttccgttgtcggcctcccactgcaggagccatatattgaagaccatgtctgggagcttctactttgtaattgttggccaccatgataatccagtttttgaaatggagtttttgccagctgggaaggcagaatccaaagacgaccatcgtcatctgaaccagttcatagctcatgctgctctcgacctcgtagatgagaacatgtggctatcgaacaacatgtacttgaaaactgtggacaagttcaacgagtggtttgtgtcggcatttgtcactgcggggcatatgaggtttattatgcttcatgacataagacaagaagatggaataaagaacttctttactgatgtttatgatttatatataaagttttcaatgaatccattttatgaacccaattctcctattcgatcaagtgcatttgacagaaaagttcagtttcttgggaagaaacaccttttaagctgaatgcagaaaattccaaaataaatgatgtcaccacaatggtgtatactcaggaatgtgtacattgtaagttacttgattaaatagcctggaaaacttttgtgtattctcagcttatctaaacctaatgaaattccttttatatttaaaaatagtacattctgtctcatgtcacgtatcaatagatcaattggtatttccttgtgaacagtgttatttataaagagttcattatcaataatcatgttttttttttttttttttttctgatacagagtctcactctgttgccaggctggagtgcagtggcgcaatcttggctcactgcaacctccgcctcccaggttcaggcgattctcctgcctcagcctccaagtagctgggactacaggcgcgtgccaccacgcccggctaatttttgtatttttagtagagacagggtttcaccatattggtcaggctggtcttgaactcctgacctcgtgatctgcccgccttggcctcccaaagtactgggattacaggcgtgagccaccgtgcccaaccatgaaatatttttacttaaaaattgggaataagctcgctttttttttttttgagatggagtcttgctcctgttgtgcaggctgtagtgcagtggcacgatcttggctcactgcaacctccacctcccgggttcaagcaattctccttcttcagcctcccgagtagctgagattataggcgtgcaccaccacacctggctaatttttgtatttttagtagagacagggtttcaccatattggtcaggctggtcttgaactcctgacctcgtgatccacccacctcaggaagtgctgggattacaggcgtgtgagccaccacgcccggccatgaaatatttttacttaaaaattgggaataagctttttggttttttgtgggtttttgtttttgttttttgttttttgtttttttgagatggagtcttgctcctgttgtgcaggctggagtgcagtggcacagtcttggctcactgcaacctccacctcctgggttcaagcaattctccttcttcagcctcccgagtagctgggattacaggcatgcaccaccacacctggctaatttttgtgtttttagtagagacggggtttcgctattttggccgggctggtttcaaactcctgacctcagttgatccacccgcctcagcctcccaaagtgctaggattacaggcatgaaccaccgtgcccggccaggaataagcttttgacttacccaattcagataggttgatctttggggttttttttttttttttgagatggagtttcgctctgttgtccaggctggagtgcaatggcagttgtttcaccgtaacctctgcctcctgacttcaagcaattctcctgcctcagcctcccaaagtgctgggattacaggtgtgagccaccgtgcccggcccagataggttgatcttaatgtaacaacccaaaaataaatgtcatagtcaagatttggtagataaatttaaaattaaaatattctgcagttgggagtgaaatgtgatagcacatacgttgacattatgcatttagagatgttataaaaatgtataggcagtatacacagcactactcaagaagccaaagaaacacttgtgcagtgctaagtgtcacatgtctgcttccaccagaggctaggaatagtgatcctgctataatgtgagaacccaaatcatgtttataaaataggacgctgggagcagttgcaggccacagtgaagtgtgttgcttctgtcactttatattcttatatttcctttccctcagacagtaaactgttgatactcgtacttgtaaaaaattgtaaggcaatttttagtattgttgtcaaagaaaagcttggattacattaacatttgtattcagtcttttaggtgatacaccagagggggctgggaattgtctctttgttcctataagtagatcttaatgtaaaatagtaaatgtccattgaaaagcaagtaatacagcctgtgctaattgggagcacttgaacaattttgttccattctgagtaacttttgagcaagtaattctaagctttgtcttgtatccttgtgtgaaattgcataatttttaccctatttgatttcttaaataaagatgtttgctcaagataaaaaaaaa

SEQ ID NO: 3745 - DNA, 2851 bp, Homo Sapiens
  NM_014570
gggccagcggcgcggctgaagcgagggcggggagggaaagcgagcggcgcctgcgccccggcggtggacgggcccggtcgtgggcggggattggggcggagcctgaccgttacgcgcagccccgcccccgcggcctcgtcgctcctgctgaggcggtagccgcttttcgtcgactcttaccggttggctgggccagctgcgccgcggctcacagctgacgatgggggaccccagcaagcaggacatcttgaccatcttcaagcgcctccgctcggtgcccactaacaaggtgtgttttgattgtggtgccaaaaatcccagctgggcaagcataacctatggagtgttcctttgcattgattgctcagggtcccaccggtcacttggtgttcacttgagttttattcgatctacagagttggattccaactggtcatggtttcagttgcgatgcatgcaagtcggaggaaacgctagtgcatcttccttttttcatcaacatgggtgttccaccaatgacaccaatgccaagtacaacagtcgtgctgctcagctctatagggagaaaatcaaatcgctcgcctctcaagcaacacggaagcatggcactgatctgtggcttgatagttgtgtggttccacctttgtcccctccaccaaaggaggaagatttttttgcctctcacgtttctcctgaggtgagtgacacagcgtgggcatcagcaatagcagaaccatcttctttaacatcaaggcctgtggaaaccactttggaaaataatgaaggtggacaagagcaaggaccaagtgtggaaggtcttaatgtaccaacaaaggctactttagaggtatcctctatcataaaaaagaaaccaaatcaagctaaaaaaggccttggggccaaaaaaggaagtttgggagctcagaaactggcaaacacatgctttaatgaaattgaaaaacaagctcaagctgcggataaaatgaaggagcaggaagacctggccaaggtggtatctaaagaagaatcaattgtttcatcattacgattagcctataaggatcttgaaattcaaatgaagaaagacgaaaagatgaacattagtggcaaaaaaaatgttgactcagacagactcggcatgggatttggaaattgcagaagtgttatttcacattcagtgacttcagatatgcagaccatagagcaggaatcacccattatggcaaaaccaagaaaaaagtataatgatgacagtgacgattcatattttacttccagctcaagttactttgacgagccagtggagttaaggagcagttctttctctagctgggatgacagttcagattcctattggaaaaaagagaccagcaaagatactgaaacagttctgaaaaccacaggctattcagacagacctactgctcgccgcaagccagattatgagccagttgaaaatacagatgaggcccagaagaagtttggcaatgtcaaggccatttcatcagatatgtattttggaagacaatcccaggctgattatgagaccagggcccgcctagagaggctgtcggcaagttcctccataagctcggctgatctgttcgaggagccgaggaagcagccagcagggaactacagcctgtccagtgtgctgcccaacgcccccgacatggcgcagttcaagcagggagtgagatcggttgctggaaaactctccgtctttgctaatggagtcgtgacttcaattcaggatcgctacggttcttaatactgaagtcatgatgtgtatttcctggagaaattcctctttaaatgaacaagtaaccacatctcaggcggcagtgaagtccagatagttttgcagattgttttgctactttttcatatggtatatgtttctgatttttaatatttcttttgagaaattctgagttctgatgtaggagctttcctgtgatttctgtttcacgttccttcctgtcacaccctcctttggcgtctctgtgtatatccttgctttattttcttggaacctttgatttcaacactgagggcctggagacctcggctcctcctgctcctgaaccaggaggcttcatgtgggggaggaggagaggtctccatgtgacacatgggctcagggctgccagaatcagcggatgctggatgggcctgcagaaacaacactcaccacacacacttccttcaaaagaccaaaagtgactggtgtctcgtgtgacagattgcttcatttatgtttctacatagtaaggtgactgccaaataatatttgaagtcatctgtctctttgtaaattattttatatgacctataaatttaaaaatgtttttcagtgagtgcttttaacaaacttaagcttctgccctgccaagggaattaatgttatcttgtgaaaggtgttgctgtttgaattgatgagaaatggaagatgagaactccctaagagttctcataataaatcatctcatcacaaatcaatacggtatacagagttaaagtggaatgaggtaagaagatacagctacagaaaatagttgcgtgtatgggagaacagtcattgtaattgggtagttttgttaataaatatttttaaatcttgcttttcagaaattaccgaatgtgtataaacaaataaagaaaaataatttagctgtgttttagacagcattagaatatattgttcagcacagtaaaatatatttgaaatttgataagccaaaaatgtggttttgaatgaatattttgtgaatctttcttaaaagctcaaatttgtagacttctaaatagaataaacacttgcagcagatggaaaaaaaaaaaaaaaaaa

SEQ ID NO: 3746 - DNA, 5558 bp, Homo Sapiens
  NM_014572
gcccgtggaatgccaacaatgtagcgaatgtcccacttgggtctgcgctttggaaccgcggcgtgagcgccccgggaagatggagcagtcgccgtccacgccaccgccgccgcccggggctcccccgtccctgcggggccagcagcagctccagccaccagtgcccggtctcccggcgcgagaggcccgggagccgccggccaggacgcccccgagggtgtagaccgcgcccctggagagagtgataatcttcaaaatgaagactttggaaaattttaggttctctataggaactacaaaaatggaaggaaagaacattttcaaaaggaaattattttgaaagtatgtttacaacaaactgatactattgacagtttttttttttaaataataaaacactttaagaagattgtatttatggtaaaaggaaactggactaacaatgaggccaaagacttttcctgccacgacttattctggaaatagccggcagcgactgcaagagattcgtgaggggttaaaacagccatccaagtcttcggttcaggggctacccgcaggaccaaacagtgacacttccctggatgccaaagtcctggggagcaaagatgccaccaggcagcagcagcagatgagagccaccccaaagttcggaccttatcagaaagccttgagggaaatcagatattccttgttgccttttgctaatgaatcgggcacctctgcagctgcagaagtgaaccggcaaatgctgcaggaactggtgaacgcaggatgcgaccaggagatggctggccgagctctcaagcagactggcagcaggagcatcgaggccgccctggagtacatcagcaagatgggctacctggacccgaggaatgagcagattgtgcgggtcattaagcagacctccccaggaaaggggctcatgccaaccccagtgacgcggaggcccagcttcgaaggaaccggcgattcgtttgcgtcctaccaccagctgagcggtaccccctacgagggcccaagcttcggcgctgacggccccacggcgctggaggagatgccgcggccgtacgtggactaccttttccccggagtcggcccccacgggcccggccaccagcaccagcacccacccaagggctacggtgccagcgtagaggcagcaggggcacacttcccgctgcagggcgcgcactacgggcggccgcacctgctggtgcctggggaacccctgggctacggagtgcagcgcagcccctccttccagagcaagacgccgccggagaccgggggttacgccagcctgcccacgaagggccagggaggaccgccaggcgccggcctcgctttcccaccccctgccgccgggctctacgtgccgcacccacaccacaagcaggccggtcccgcggcccaccagctgcatgtgctgggctcccgcagccaggtgttcgccagcgacagccccccgcagagcctgctcactccctcgcggaacagcctcaacgtggacctgtatgaattgggcagcacctccgtccagcagtggccggctgccaccctggcccgccgggactccctgcagaagccgggcctggaggcgccgccgcgcgcgcacgtggccttccggcctgactgcccagtgcccagcaggaccaactccttcaacagccaccagccgcggcccggtccgcctggcaaggccgagccctccctgcccgcccccaacaccgtgacggctgtcacggccgcgcacatcttgcacccggtgaagagcgtgcgtgtgctgaggccggagccgcagacggctgtggggccctcgcaccccgcctgggtgcccgcgcctgccccggcccccgcccccgcccccgccccggctgcggagggcttggacgccaaggaggagcatgccctggcgctgggcggcgcaggcgccttcccgctggacgtggagtacggaggcccagaccggaggtgcccgcctccgccctacccgaagcacctgctgctgcgcagcaagtcggagcagtacgacctggacagcctgtgcgcaggcatggagcagagcctccgtgcgggccccaacgagcccgagggcggcgacaagagccgcaaaagcgccaagggggacaaaggcggaaaggataaaaagcagattcagacctctcccgttcccgtccgcaaaaacagcagagacgaagagaagagagagtcacgcatcaagagctactcgccatacgcctttaagttcttcatggagcagcacgtggagaatgtcatcaaaacctaccagcagaaggttaaccggaggctgcagctggagcaagaaatggccaaagctggactctgtgaagctgagcaggagcagatgcggaagatcctctaccagaaagagtctaattacaacaggttaaagagggccaagatggacaagtctatgtttgtcaagatcaaaaccctggggatcggtgcctttggagaagtgtgccttgcttgtaaggtggacactcacgccctgtacgccatgaagaccctaaggaaaaaggatgtcctgaaccggaatcaggtggcccacgtcaaggccgagagggacatcctggccgaggcagacaatgagtgggtggtcaaactctactactccttccaagacaaagacagcctgtactttgtgatggactacatccctggtggggacatgatgagcctgctgatccggatggaggtcttccctgagcacctggcccggttctacatcgcagagctgactttggccattgagagtgtccacaagatgggcttcatccaccgagacatcaagcctgataacattttgatagatctggatggtcacattaaactcacagatttcggcctctgcactgggttcaggtggactcacaattccaaatattaccagaaagggagccatgtcagacaggacagcatggagcccagcgacctctgggatgatgtgtctaactgtcggtgtggggacaggctgaagaccctagagcagagggcgcggaagcagcaccagaggtgcctggcacattcactggtggggactccaaactacatcgcacccgaggtgctcctccgcaaagggtacactcaactctgtgactggtggagtgttggagtgattctcttcgagatgctggtggggcagccgccctttttggcacctactcccacagaaacccagctgaaggtgatcaactgggagaacacgctccacattccagcccaggtgaagctgagccctgaggccagggacctcatcaccaagctgtgctgctccgcagaccaccgcctggggcggaatggggccgatgacctgaaggcccaccccttcttcagcgccattgacttctccagtgacatccggaagcagccagccccctacgttcccaccatcagccaccccatggacacctcgaatttcgaccccgtagatgaagaaagcccttggaacgatgccagcgaaggtagcaccaaggcctgggacacactcacctcgcccaataacaagcatcctgagcacgcattttacgaattcaccttccgaaggttctttgatgacaatggctacccctttcgatgcccaaagccttcaggagcagaagcttcacaggctgagagctcagatttagaaagctctgatctggtggatcagactgaaggctgccagcctgtgtacgtgtagatgggggccaggcacccccaccactcgctgcctcccaggtcagggtcccggagccggtgccctcacaggccaatagggaagccgagggctgttttgttttaaattagtccgtcgattacttcacttgaaattctgctcttcaccaagaaaacccaaacaggacacttttgaaaacaggactcagcatcgctttcaataggcttttcaggaccttcactgcattaaaacaatatttttgaaaatttagtacagtttagaaagagcacttattttgtttatatccattttttcttactaaattatagggattaactttgacaaatcatgctgctgttattttctacatttgtattttatccatagcacttattcacatttaggaaaagacataaaaactgaagaacattgatgagaaatctctgtgcaataatgtaaaaaaaaaaaaagataacactctgctcaatgtcacggagaccattttatccacacaatggtttttgttttttattttttcccatgtttcaaaattgtgatataatgatataatgttaaaagctgctttttttggctttttgcatatctagtataataggaagtgtgagcaaggtgatgatgtggctgtgatttccgacgtctggtgtgtggagagtactgcatgagcagagttcttctattataaaattaccatatcttgccattcacagcaggtcctgtgaatacgtttttactgagtgtctttaaatgaggtgttctagacagtgtgctgataatgtattgtgcgggtgacctcttcgctatgattgtatctcttactgttttgttaaagaaatgcagatgtgtaactgagaagtgatttgtgtgtgtgtcttggttgtgattggattctttggggggggggaactgaaacatttgtcatatactgaacttatatacatcaaaagggattaatacagcgatgccaaaaagtttaatcacggacacatgtccgtttctgtagtccgtatgctctttcattcttggtagagctggtatgtggaatgccatacctctgaccctactacttacctttttactgacagactgcccacactgaaagcttcagtgaatgttcttagtcctgttttcttctgttactgtcaggaaactgagtgatctaatggttctctcactttttttttgttcttttagtgtactttgaagtatcaaatcttaacttggtttaaacaatacatattcctaacctttgtaaaaaagcaaagattcttcaaaatgacattgaaataaaaagtaagccatacgtattttcttagaagtatagatgtatgtgcgtgtatacacacacacacacacacacagagataaacacaatattccttatttcaaattagtatgattcctatttaaagtgatttatatttgagtaaaaagttcaattcttttttgctttttaaaaaatctgatgcttcataattttcattatattattccacatatttttccttgaagttcttagcataatgtatccattacttagtatatatctaggcaacaacacttagaagtttatcagtgtttaaactaaaaaaataaagattcctgtgtactggtttacatttgtgtgagtggcatactcaagtctgctgtgcctgtcgtcgtgactgtcagtattctcgctattttatagtcgtgccatgttgttactcacagcgctctgacatactttcatgtggtaggttctttctcaggaactcagtttaactattatttattgatatatcattacctttgaaaagcttctactggcacaatttattattaaaattttgaatccaaaaaaaaaaaaaaaaaa

SEQ ID NO: 3747 - DNA, 2585 bp, Homo Sapiens
  NM_014573
gagcctcctcttctcgccagccaatggaagcggtctgcctagccctcgcgggggcaaggcggcgaccgaggcgcgtgggtctgggaaggcgcgcggatttggcccctcttctcacatcagcgggtccaggcccaaccgacagactatgggggctccggcaaccaggcgctgcgtggagtggctgctgggcctctacttcctcagccacatccccatcaccctgttcatggacctgcaggcggtgctgccgcgcgagctctacccagtcgagtttagaaacctgctgaagtggtatgctaaggagttcaaagacccactgctacaggagcccccagcctggtttaagtcctttctgttttgcgagcttgtgtttcagctgcctttctttcccattgcaacgtatgccttcctcaaaggaagctgcaagtggattcgaactcctgcaatcatctactctgttcacaccatgacaaccttaattccgatactctccacatttctgtttgaggatttctccaaagccagtggtttcaagggacaaagacctgagactttgcatgaacggttaacccttgtgtctgtctatgccccctacttactcatcccattcatacttttaattttcatgttgcggagcccctactacaagtatgaagagaaaagaaaaaaaaaatgaaggaaacaaccactggcccagggtagagatgcctacagggtggttgcttgttggatacaatacaaggaacactgctcagaacccacgtcttcagcagcatttgaaacactggcagcaatgcacaagagcaagatggtgtcaggaaccatgtcaaaccctcaccttcttccattttttttttttttttaagacagtctcactctgttgcccaggctggagtaaagggcagtggcatgatctcggctcactgcaacctccgcctcctgggctcaagccatcttccttagcctcccaagtagctagaactacaggtgtgtaccaacacgtatggctaatttgttttgttttttttgtgtgtgtggagacagggttttgccatgttgcccaggttggtctcgaacgcctaggctcaagtgatctgcccacctcagtctccctaagtgctgggattacagacgtgaaccactgggcccagcccaaaccttcaccttctaagggcactgggatgaacagaccgatcggcttgagggtgggcaaaggggtgtgggctaggttataaggaagtggtaccaaataactgtgtgcctgagttccaccgcaagattactaaaagcaggaccagaccagaaactgctaaagaacatggcctgtttgacatgttcatgagtcacctgacccacagcatatatgcttatgactaaaccctccactcctgattctcaagagtgtatcacctgtcagcaaaatgaatagtgggatattttgggccattttaaatgtgaaattttgcctctttaatgttaattcaaaactatatcaatgttttcttgttcccacctctaacccaaggaaaaaagagaaaacatactatgcaaaggaagtttaaacttaagttttccttaagggtcagcccaacaatgactttcagtcaaatggattaaactggaaaatgtttttgtttctgttgtaaacagatcatcctaggcgaaagttttttttgtttgtttgcttttaaattagtttatttctaaatcttagtcttccacatttctagaggccacctgacacaagtccctgtatctgaagtctagcatctcaaggctgatctggaagtgtgctagtatgctccctagtggataacttaatcttttaatacagttccgtcattcccatcttgttttcagaagagaaggtggctacagccaggcataacatatccactgtgtgcatagagggtctcttcacgttgatgcttggcattccatcagctttctctaagtctttgctcaagttcaaccttaaaatgatgttagacaacaggtcccagtcagttccctctattttcacccattttgctcacaagccatattggcccgattagtggtactgtctgactcacgtgtgtgatccaaataaaggtagctgctgaccactgcctggtttgttttgtggactaggggatagagaatccagggttctctcatgaggagttaaacatatttcaagagcaacaggaaaaaaggtacatcaagccatttgaaaacaaaaatttattgcttctccttccaaagctttgtgaatttacaaaaaaaaggatgaaagtttacaaactgcttagttccaactaagcataagaggtgagaacgtacactgcagggccaccagcagcagctgtgcactgatgttaaaactggctcccccagacttgtagtgctgtcttcagggggctgcattccttacacgccacctcttgtgacataggtcattggtcaagccgctggaatgctacagaggtttttttggttttgagaggcttttttttgttttgccttcctactataaaagcgaaattttcagttcatttctgaaaaataaattggtcaataaattcaaaaaaaaaaaaaaaaaa

SEQ ID NO: 3748 - DNA, 3981 bp, Homo Sapiens
  NM_014574
aaagtgagtgagtgagacgggcagatggaggagggattgtaatggcggcagccggcagctccctgctctgacccacggcaggcacacagcaacgaccccttccccgcccctctcccggccggcctccgccccgcagccagcgcggggccaccctctccggcccttcccccagctgtcggcgtctcgccctgcgccccggccggggccccacacacaatggacgagcttgccggaggcggtggtggcggcccggggatggcggcccctccccggcagcagcagggacctggggggaacctgggcctttcgcccggggggaacggagcggcgggcggcgggggtcctccggcctccgagggagcgggtcccgcggcaggccccgagctgtcccggccgcagcagtacactatcccggggatactgcactacatccagcacgagtgggctcggttcgagatggagcgggcgcactgggaggtggaacgggccgaactgcaggcccggattgcatttctacaaggcgaaagaaaaggtcaagagaacctgaagaaggacttagtaagaagaataaagatgttagagtatgcattaaaacaagaaagggcaaaatatcacaaattaaaatatggcacggaactgaaccaaggtgacttgaaaatgccaacctttgagtcagaagaaaccaaagacacagaggctcccacagcacctcagaatagccagttaacgtggaagcaaggcagacagcttttaagacagtatcttcaggaagtaggttatacagatacaatattagatgtacggtctcagcgggtaaggtcattacttggactatctaattcagaaccaaatggatcagtagaaacaaagaatttagaacagatcctgaatggaggtgaatctcctaagcaaaagggacaagaaataaaaaggtcctctggtgatgttcttgagacgttcaatttcttagaaaatgccgatgacagtgatgaagatgaggaaaatgacatgatcgaaggcatcccagaaggaaaagacaaacatcggatgaataaacataaaataggtaatgaaggtttagctgctgacctaactgacgatcctgatactgaggaagcactgaaagaatttgattttttagtgactgctgaagatggtgaaggagctggagaagcacggagttcgggggatggcacagaatgggctgaaccaataacgtttccatctggaggaggcaagtcatttattatgggttctgatgatgttttgttaagtgtactgggccttggagaccttgcagacttgacggtaacaaatgatgcagactatagttatgatttgcctgctaataaagatgcctttcgaaagacatggaatcccaagtatacactacgtagccattttgatggagtacgggcattagcttttcatcctgtagaacctgtgctggttactgcttctgaggaccataccctgaaactttggaacctgcaaaaaacagttcctgccaaaaagagtgcctctttagatgtagagcctatctacacatttagggcccacatcggccctgttctgtcattagctattagttctaatggagaacagtgttttagtggtggtattgatgcaaccatccagtggtggaatatgccgagtcccagtgtagatccatatgatacatatgagccaaatgttctagctggcactttagttggtcatacagatgcagtttggggtcttgcttatagtggcataaaaaatcaattactgtcttgttcagcagatggcactgttaggttatggaatccacaagaaaaattgccatgtatttgcacttacaatggagataaaaagcatggaatacctacatcagttgactttataggctgtgatccagctcatatggtaacctctttcaacactggtagtgcagtaatttatgatttagaaacatcacagtcattggtgatactttcatcacaggtagattctggtttacaatctaataatcatatcaacagagtagtaagtcatcccacacttcctgttacaataactgctcatgaagatagacacatcaaattttttgacaataaaacgggtaaaatgatccattctatggtagctcacttggatgctgttacaagtctagcagtagatcctaatggaatctatttgatgtctggaagccatgactgttccatcagattatggaatttagacagcaagacatgtgtgcaagaaataacagctcacagaaagaaattggatgaatcaatttatgatgttgctttccactcgtcaaaagcatatatagctagtgcaggagctgatgctcttgccaaagtatttgtatgaatcaacaaaaacttgcatcgtaacaagatttgcttggacagaaagagggtctgcatcactgccatcagaaaggttactgatatgacactacatgtgatctgcctggtgaaggctatctggggcaggcacaaattggtggaaatcacatcttaatgtcaagctcattaagttaactgtaattactgtattttgtgggacaaagaaaaaaggactccagtatttgtggcctgtactggatgtgaactgagcgtatatctgtttttaggtgtctttaagccaatgtggagtctgatctttcaaaaaagtttttttttttctcttcttcttcttcttttttttttttttttttttttttttggactctgtgtgctgccttaggggttaggaatgtggtgctcttgttgggggaagtgagctccaagagtagctttttttcatctcttagtgatcttctgtttatcggttgaatgccacagattcccttttaaacttattttgctttaaaaaaaaaaaaaaagaaaaagaaaatttaacttaaaatattttagcattagttgcacaaaatgtttggataaaattctagtttttataagtctttttatatatttagcctgtcacaacagtgctcaagattgtattgaagtttttctgcattatacaaccctaaaacacagagatctcactgacccgttgccctgtaaccactttctttccttcttttgcctaatacagctcagctaagtccttccataaagatgctaaataactttcatcatcacataaatgtcttcataaaccaaggactattaagtgtattaaaatgaaacagtggggtttagtactccaaatgaactcttaaagaaaaaaactaatcttggcatcctatcactatgtgatattttgtacatcttactgtatttacaagtttatttatcaaggattatccatcttgctaatggcctattatttatttcactttttgttggtctttatatccttttattaatgtgctaaaggaacctgtatatctattttggaactctttgaatagtctaaaatagactaaaaatggagtattttatagtttaaattacaaaccaaggtggttccccctaagatatatatcttggtttaccatgattccaaacaaaactaacttgtttaaaaatatttggagtaaagttttatttgcattacaaataggatacaaaaatagttgaatcaggatacagaaatctgctgtgttttgactagttatccctgttttatttttttagatgtgcttaattttatggtgtaactaaagattttgtttgtgtaatgcatgattaagacaataaagtattttttctagtcttccgagaaacttttctgatcagtttgcgagttttgatgagttttgtaaggtttttgttttacaaactatgaatcagcaaatttttaagattgtaccacatagcaaacatacagctgttgaaaaataatgtatataaaatgcatataataaatattaaattgtgtacctgtatgttactgttggctacatcattttgtgttgaataataaagtgcaatactttattctccataattaaactaggaaatggagatttaaaaaaaaaaa

SEQ ID NO: 3749 - DNA, 2145 bp, Homo Sapiens
  NM_014580
ggcggttcaggcgccagagctggccgatcggcgttggccgccgacatgacgcccgaggacccagaggaaacccagccgcttctggggcctcctggcggcagcgcgccccgcggccgccgcgtcttcctcgccgccttcgccgctgccctgggcccactcagcttcggcttcgcgctcggctacagctccccggccatccctagcctgcagcgcgccgcgcccccggccccgcgcctggacgacgccgccgcctcctggttcggggctgtcgtgaccctgggtgccgcggcggggggagtgctgggcggctggctggtggaccgcgccgggcgcaagctgagcctcttgctgtgctccgtgcccttcgtggccggctttgccgtcatcaccgcggcccaggacgtgtggatgctgctggggggccgcctcctcaccggcctggcctgcggtgttgcctccctagtggccccggtctacatctccgaaatcgcctacccagcagtccgggggttgctcggctcctgtgtgcagctaatggtcgtcgtcggcatcctcctggcctacctggcaggctgggtgctggagtggcgctggctggctgtgctgggctgcgtgcccccctccctcatgctgcttctcatgtgcttcatgcccgagaccccgcgcttcctgctgactcagcacaggcgccaggaggccatggccgccctgcggttcctgtggggctccgagcagggctgggaagacccccccatcggggctgagcagagctttcacctggccctgctgcggcagcccggcatctacaagcccttcatcatcggcgtctccctgatggccttccagcagctgtcgggggtcaacgccgtcatgttctatgcagagaccatctttgaagaggccaagttcaaggacagcagcctggcctcggtcgtcgtgggtgtcatccaggtgctgttcacagctgtggcggctctcatcatggacagagcagggcggaggctgctcctggtcttgtcaggtgtggtcatggtgttcagcacgagtgccttcggcgcctacttcaagctgacccagggtggccctggcaactcctcgcacgtggccatctcggcgcctgtctctgcacagcctgttgatgccagcgtggggctggcctggctggccgtgggcagcatgtgcctcttcatcgccggctttgcggtgggctgggggcccatcccctggctcctcatgtcagagatcttccctctgcatgtcaagggcgtggcgacaggcatctgcgtcctcaccaactggctcatggcctttctcgtgaccaaggagttcagcagcctcatggaggtcctcaggccctatggagccttctggcttgcctccgctttctgcatcttcagtgtccttttcactttgttctgtgtccctgaaactaaaggaaagactctggaacaaatcacagcccattttgaggggcgatgacagccactcactaggggatggagcaagcctgtgactccaagctgggcccaagcccagagcccctgcctgccccaggggagccagaatccagccccttggagccttggtctgcagggtccctccttcctgtcatgctccctccagcccatgacccggggctaggaggctcactgcctcctgttccagctcctgctgctgctctgaggactcaggaacaccttcgagctttgcagacctgcggtcagccctccatgcgcaagactaaagcagcggaagaggaggtgggcctctaggatctttgtcttctggctggaggtgcttttggaggttgggtgctgggcattcagtcgctcctctcacgcggctgccttatcgggaaggaaatttgtttgccaaataaagactgacacagaaaatcaggtcagtgtctctgggctttgtgcaagctcagtttgaaaagggtttattcccatcactgcccaggacaccctgtggctttacttgctcatggtcagccaagcttacccttcacactgagaagtcatttctggctacttccttgggctcagttccctgggtcatcagccatcaaatcttgttgagtttaaaaaataaacagcaaaaaaaaacaaaccaaaaaaaaaaaaaaaaaaaaaaaaaaaaaaa

SEQ ID NO: 3750 - DNA, 3334 bp, Homo Sapiens
  NM_014584
gcacgagccccgggctgccggcgcgggcgccgcggcacgtccacaggctgggtcgcgaggtggcgatcgctgagaggcaggagggccgaggcgggcctgggaggcggcccggaggtggggcgccgctggggccggcccgcacgggcttcatctgagggcgcacggcccgcgaccgagcgtgcggactggcctcccaagcgtggggcgacaagctgccggagctgcaatgggccgcggctggggattcttgtttggcctcctgggcgccgtgtggctgctcagctcgggccacggagaggagcagcccccggagacagcggcacagaggtgcttctgccaggttagtggttacttggatgattgtacctgtgatgttgaaaccattgatagatttaataactacaggcttttcccaagactacaaaaacttcttgaaagtgactactttaggtattacaaggtaaacctgaagaggccgtgtcctttctggaatgacatcagccagtgtggaagaagggactgtgctgtcaaaccatgtcaatctgatgaagttcctgatggaattaaatctgcgagctacaagtattctgaagaagccaataatctcattgaagaatgtgaacaagctgaacgacttggagcagtggatgaatctctgagtgaggaaacacagaaggctgttcttcagtggaccaagcatgatgattcttcagataacttctgtgaagctgatgacattcagtcccctgaagctgaatatgtagatttgcttcttaatcctgagcgctacactggttacaagggaccagatgcttggaaaatatggaatgtcatctacgaagaaaactgttttaagccacagacaattaaaagacctttaaatcctttggcttctggtcaagggacaagtgaagagaacactttttacagttggctagaaggtctctgtgtagaaaaaagagcattctacagacttatatctggcctacatgcaagcattaatgtgcatttgagtgcaagatatcttttacaagagacctggttagaaaagaaatggggacacaacattacagaatttcaacagcgatttgatggaattttgactgaaggagaaggtccaagaaggcttaagaacttgtattttctctacttaatagaactaagggctttatccaaagtgttaccattcttcgagcgcccagattttcaactctttactggaaataaaattcaggatgaggaaaacaaaatgttacttctggaaatacttcatgaaatcaagtcatttcctttgcattttgatgagaattcattttttgctggggataaaaaagaagcacacaaactaaaggaggactttcgactgcattttagaaatatttcaagaattatggattgtgttggttgttttaaatgtcgtctgtggggaaagcttcagactcagggtttgggcactgctctgaagatcttattttctgagaaattgatagcaaatatgccagaaagtggacctagttatgaattccatctaaccagacaagaaatagtatcattattcaacgcatttggaagaatttctacaagtgtgaaagaattagaaaacttcaggaacttgttacagaatattcattaaagaaaacaagctgatatgtgcctgtttctggacaatggaggcgaaagagtggaatttcattcaaaggcataatagcaatgacagtcttaagccaaacattttatataaagttgcttttgtaaaggagaattatattgttttaagtaaacacatttttaaaaattgtgttaagtctatgtataatactactgtgagtaaaagtaatactttaataatgtggtacaaattttaaagtttaatattgaataaaaggaggattatcaaattcatatatgataaaagtgaatgttctaagtctctcaaactagcgttttatgtaataatatgtaatataaataaaactatggtaaatgtgacaagcatttaataggaaaatgctaaggaggcctcataaatgacccataattaccaacgtagaatttttcagtacatttagggttgctggatttagcaaataaaaataaagattgcccagttagatttgaatttcagataaacaattagttttttaatattttacatggaatatttggaaaatacttatactaaaaaattatttgtttgaaattcacatttaactgggagtcttgtattttatctggcaatcctaaaatacattggtatgaaacaaatcacttttagaagtatattgctattttgattgggttgtttttgtgtgtagaaacgtacaataacaactcaaaggcacaggagatttctaaacattgtgaaaagttgaatagattatatatttattctcataatactttcactaatactaaataaaatttggggaacactttttatttttatataatttccaatttacagaaaagtttcaaaaatagtacaaagagctctcttacccagattcactaattgttcatacgtgctttatctttcatgctttctctgtacacacacacacacacacaaatttttcctcaatcatttgaaagtcagttataggcatcatgccccttaaaccctaaatacttcagtgtgtaatactgaataattactaaaaatgattttctcagaaaaaaaaactcccacaattctggaactataatactgtaagccttagaataaataatactttcaagttccaatctaaagttctttttgagttttgttgcccgttttatgcttgatgtgtatagtaatagggtaggctatttattttattaaaattttttttagagacaaggttttgctgtgttgcccaagctggaacttgaacgactgggctgaagtgatcttcccacctcagcctcccaagtagctgggaatacaggtgtctgccaccatacccagtttcatttttgttttttatacccgaagttcatttcctttgtctccctaaaactgaactgtaattttgggaggttttcattagtggaagctcttcatttataaagctatttgaaggggtttaggaatttatatcacatggtaattgtagagaaaaagaagctatatacctcaaaatcgtgccctctttacatatgtcttatcaggtataacatgttgaaatgtcacattagtagtaaagtggggtttatttatatagtggttaagaaatgtcagtttacactgctgtatacttcttcttctgtgtccctaaggcctggtacagtgccaagcacatacttggtatccaataaatatttgttggatgaaaaaaaaaaaaaaaaaaaa

SEQ ID NO: 3751 - DNA, 3381 bp, Homo Sapiens
  NM_014585
ataagagctgggcccggcccacggcggcggcggcggcggcggagagagctggctcagggcgtccgctaggctcggacgacctgctgagcctcccaaaccgcttccataaggctttgcctttccaacttcagctacagtgttagctaagtttggaaagaaggaaaaaagaaaatccctgggccccttttcttttgttctttgccaaagtcgtcgttgtagtctttttgcccaaggctgttgtgtttttagaggtgctatctccagttccttgcactcctgttaacaagcacctcagcgagagcagcagcagcgatagcagccgcagaagagccagcggggtcgcctagtgtcatgaccagggcgggagatcacaaccgccagagaggatgctgtggatccttggccgactacctgacctctgcaaaattccttctctaccttggtcattctctctctacttggggagatcggatgtggcactttgcggtgtctgtgtttctggtagagctctatggaaacagcctccttttgacagcagtctacgggctggtggtggcagggtctgttctggtcctgggagccatcatcggtgactgggtggacaagaatgctagacttaaagtggcccagacctcgctggtggtacagaatgtttcagtcatcctgtgtggaatcatcctgatgatggttttcttacataaacatgagcttctgaccatgtaccatggatgggttctcacttcctgctatatcctgatcatcactattgcaaatattgcaaatttggccagtactgctactgcaatcacaatccaaagggattggattgttgttgttgcaggagaagacagaagcaaactagcaaatatgaatgccacaatacgaaggattgaccagttaaccaacatcttagcccccatggctgttggccagattatgacatttggctccccagtcatcggctgtggctttatttcgggatggaacttggtatccatgtgcgtggagtacgttctgctctggaaggtttaccagaaaaccccagctctagctgtgaaagctggtcttaaagaagaggaaactgaattgaaacagctgaatttacacaaagatactgagccaaaacccctggagggaactcatctaatgggtgtgaaagactctaacatccatgagcttgaacatgagcaagagcctacttgtgcctcccagatggctgagcccttccgtaccttccgagatggatgggtctcctactacaaccagcctgtgtttctggctggcatgggtcttgctttcctttatatgactgtcctgggctttgactgcatcaccacagggtacgcctacactcagggactgagtggttccatcctcagtattttgatgggagcatcagctataactggaataatgggaactgtagcttttacttggctacgtcgaaaatgtggtttggttcggacaggtctgatctcaggattggcacagctttcctgtttgatcttgtgtgtgatctctgtattcatgcctggaagccccctggacttgtccgtttctccttttgaagatatccgatcaaggttcattcaaggagagtcaattacacctaccaagatacctgaaattacaactgaaatatacatgtctaatgggtctaattctgctaatattgtcccggagacaagtcctgaatctgtgcccataatctctgtcagtctgctgtttgcaggcgtcattgctgctagaatcggtctttggtcctttgatttaactgtgacacagttgctgcaagaaaatgtaattgaatctgaaagaggcattataaatggtgtacagaactccatgaactatcttcttgatcttctgcatttcatcatggtcatcctggctccaaatcctgaagcttttggcttgctcgtattgatttcagtctcctttgtggcaatgggccacattatgtatttccgatttgcccaaaatactctgggaaacaagctctttgcttgcggtcctgatgcaaaagaagttaggaaggaaaatcaagcaaatacatctgttgtttgagacagtttaactgttgctatcctgttactagattatatagagcacatgtgcttattttgtactgcagaattccaataaatggctgggtgttttgctctgtttttaccacagctgtgccttgagaactaaaagctgtttaggaaacctaagtcagcagaaattaactgattaatttcccttatgttgaggcatggaaaaaaaattggaaaagaaaaactcagtttaaatacggagactataatgataacactgaattcccctatttctcatgagtagatacaatcttacgtaaaagagtggttagtcacgtgaattcagttatcatttgacagattcttatctgtactagaattcagatatgtcagttttctgcaaaactcactcttgttcaagactagctaatttatttttttgcatcttagttatttttaaaaacaaattcttcaagtatgaagactaaattttgataactaatattatccttattgatcctattgatcttaaggtatttacatgtatgtggaaaaacaaaacacttaactagaattctctaataaggtttatggtttagcttaaagagcacctttgtatttttattatcagatggggcaacatattgtatgaagcatatgtagcacttcacagcatggttatcatgtaagctgcaggtagaagcaaagctgtaaagtagatttatcacacaatgactgcatacagacttcaaatatgtcaatagtttggtcatagaacctagaagccaaaagccacacagaagggcaagaatcccaatttaactcatgttatcatcattagtgatctgtgttgtagaacatgagggtgtaagccttcagcctggcaagttacatgtagaaagcccacacttgtgaaggttttgttttacaaatcacttgatttaacacactcaggtagaatatttttatttttactgttttatacccagaagttatttctacattgttctacagcaagaatattcataaaagtatccctttcaaatgcctttgagaagaatagaagaaaaaaagtttgtatatattttaaaaaattgttttaaaagtcagtttgcaacatgtctgtaccaagatggtactttgccttaaccgtttatatgcactttcatggagactgcaatacgttgctatgagcactttctttatccttggagtttaatcctttgcttcatctttctacagtatgacataatgatttgctatgttgtaaaatctttgtaaaaaatttctatataaaaatattttgaaaatcttaaaaaaaaaaaaaaaaaaaaaaaaaaaa

SEQ ID NO: 3752 - DNA, 3049 bp, Homo Sapiens
  NM_014587
ggcgagggtcggggccaccgcgcggcgacctcgggtcccggagcgaccgcagggcagccccgggcgccggccccggtgcgcgtctcctgtgcgcgcccctccgcgcgcggccccgatgctggacatgagcgaggcccgctcccagccgccctgcagcccgtccggcaccgccagctccatgtcgcacgtggaggactcggactcggacgcgccgccgtctcccgccggctccgagggcctgggccgcgcgggggtcgcggtggggggcgcccggggcgacccggcggaggcggcggacgagcgcttcccggcctgcatccgcgacgccgtgtcgcaggtgctcaagggctacgactggagtctggtgcccatgccggtgcgcggcggcggcggcggcgcgctcaaagccaagccgcatgtgaagcggcccatgaacgcattcatggtgtgggcgcaggcggcgcgccgcaagctggccgaccagtacccgcacctgcacaacgccgagctcagcaagacgctgggcaagctgtggcgcttgctgagcgagagcgagaagcggcccttcgtggaggaggcagagcgccttcgcgtgcagcacaagaaggaccaccccgactacaagtaccagccacggcgcaggaagagcgccaaagccggccacagcgactccgactcgggcgcggagctgggaccccaccctggcggcggtgccgtgtacaaggctgaagcagggcttggagatgggcaccaccatggcgaccacacagggcagacccacgggccgcccaccccgcccaccacccccaagacggagctgcagcaggcgggcgccaagccggagctgaagctggagggacgccggccggtggacagcgggcgccagaacatcgacttcagcaatgtggacatctcggagctcagcagcgaggtcatgggcaccatggacgccttcgacgtccacgagttcgaccagtacctgcccctgggcggccccgccccacccgagccgggccaggcctatgggggcgcctacttccacgccggggcgtcccccgtgtgggcccacaagagtgccccgtcggcctccgcgtcgcccaccgagacgggtcccccacggccgcacatcaagacggagcagccgagccccggccactacggcgaccagccccgaggctcgcccgactacggttcctgcagcggccagtccagcgccaccccggccgcccccgccggccccttcgccggctcacagggcgactatggcgacctgcaggcctccagctactatggtgcctaccctggctacgcacccggcctctaccagtacccctgcttccactcgccgcgccggccctacgcctcacccctgctcaacggcctggccctgccgcccgcccacagccccaccagtcactgggaccagccggtgtacaccaccctgaccaggccctgagggcccagccgcggggagggactcgcaggcgtcagggggcagccttgtcccggcccagtgtgtgtgaccagggcgggaggggccccagtggctgagctccaagtgcctgctgaagtctgcagggaaacacgcttgctgcccgtggccctcggcctccagatggccacacctctgccgacgacggaccagctccctctcccttctatctttctttttgaggtggtgggattattccacaaagaagggctgccgtttggtccctcttccgtgaggactggcggcaccagcaccttcgctttgcatctcggtagaggagaaacggcagcacagcccaaggaccaaaggagggggtggcaggggccttgcagggcgctgtgaggtccaggccggtcttggcgccgagagcccctgcactcaaggccacattccctcgacaacggctgcacgggctgtccgggatccggggtgtctgtccgcagactgggatgagtctactcgagcatctccgggacctgcctgtcagatctgaggtgtctccttgctggcagagtgcgctcacgcgagggctggctgtgatgaacacatctctcttttatttttatgtttttgataatttttatttttgaagcttaaatgtgtttcttctgaaagctgttaaagatgtatttatgttctgtgttattttatctttaattaatgaggtaattcgggcaaagagtagaatttaagacaaaacggaagctgggaagcttcccttgagggcaggcaggaggtggagttgcagctgttggccggcatcacgttgctcgttgctcggcttatgggaggccgccctggagggcccggaggtcccaaggtccctgggaggactgggcccctcatgcctcgagcttggcaaccgaaaacccgagggaggagaagggacctgccttgtgacatctctgatcaggttggggtgccccagcacccagtaccagtttggggtttgggaagcaggactccgtccctgtccccgactgtgccacgtggtaggacacataggacacaggaattcctgggtccttgcccatgactgtgccatgtggtaggacacaggacacaggaattcctggaaagtggtggcttcagaagtgatcttggctcgcaggcaccagtgccacctaccaagctgtgaaactaaaccttctccactaaacgtcgttagggcctcagttctagacgagtcatacctgattcacctgcactgcttcccctgtgtgctgagcatagagcatacaatagcgcctacttcacggaaacttgtgcctttaaactttgtaaacttaaacacagccgagaagttgcttctttgtactttttctacttttcctacttttttgtagaaaaaaaagataatgcctctgcttctatttctctgggggtgggggtgggggccgggagccgtcgcagacccgtttcatgcagcgtctcccttggcaccgcgttcggaggacgcaccctcactcccctgctgccttcactcctttctgaccaagcaacgctaacttttgtacagatcgatttgataaaattaaacaaagtgctttttatgga

SEQ ID NO: 3753 - DNA, 2964 bp, Homo Sapiens
  NM_014593
ggaaagagtggtggcaggtgaagtcggagacgacagaggaactggtttcctccgccccgcaaggcacacagcctgccgacgccccattaatacatgtggaaggggaaagagactgaatggaggaatgaatacaacttgatccaggtcgtgcttcggaagcggtcactttacctgtgaacctctctgcctgacaaacgggcaatgtacggaatcaaccaccaagatggcggcgcccgtgaagaatccgcaattaggtcgccgtcatatgtcgcctaggaacgtacggaattcgacccacgtacggaatcggattccaagatgacggcatctatgaggaagtcacgcagtaggtgcagccatgttgcctgtacgtcgaggccgtacaagcagccgccgtacggactctactgacaaggtggcggcgccctcgggaaagccacattagagcgcggccatgttcccggcgaacatatggattcggccaccatacggatacgataagcaagatggcggcgcctgaggggtcttgggggctctaggccggccacctactggtttgcagcggagacgacgcatggggcctgcgcaataggagtacgctgcctgggaggcgtgactagaagcggaagtagttgtgggcgcctttgcaaccgcctgggacgccgccgagtggtctgtgcaggttcgcgggtcgctggcgggggtcgtgagggagtgcgccgggagcggagatatggagggagatggttcagacccagagcctccagatgccggggaggacagcaagtccgagaatggggagaatgcgcccatctactgcatctgccgcaaaccggacatcaactgcttcatgatcgggtgtgacaactgcaatgagtggttccatggggactgcatccggatcactgagaagatggccaaggccatccgggagtggtactgtcgggagtgcagagagaaagaccccaagctagagattcgctatcggcacaagaagtcacgggagcgggatggcaatgagcgggacagcagtgagccccgggatgagggtggagggcgcaagaggcctgtccctgatccagacctgcagcgccgggcagggtcagggacaggggttggggccatgcttgctcggggctctgcttcgccccacaaatcctctccgcagcccttggtggccacacccagccagcatcaccagcagcagcagcagcagatcaaacggtcagcccgcatgtgtggtgagtgtgaggcatgtcggcgcactgaggactgtggtcactgtgatttctgtcgggacatgaagaagttcgggggccccaacaagatccggcagaagtgccggctgcgccagtgccagctgcgggcccgggaatcgtacaagtacttcccttcctcgctctcaccagtgacgccctcagagtccctgccaaggccccgccggccactgcccacccaacagcagccacagccatcacagaagttagggcgcatccgtgaagatgagggggcagtggcgtcatcaacagtcaaggagcctcctgaggctacagccacacctgagccactctcagatgaggacctacctctggatcctgacctgtatcaggacttctgtgcaggggcctttgatgaccatggcctgccctggatgagcgacacagaagagtccccattcctggaccccgcgctgcggaagagggcagtgaaagtgaagcatgtgaagcgtcgggagaagaagtctgagaagaagaaggaggagcgatacaagcggcatcggcagaagcagaagcacaaggataaatggaaacacccagagagggctgatgccaaggaccctgcgtcactgccccagtgcctggggcccggctgtgtgcgccccgcccagcccagctccaagtattgctcagatgactgtggcatgaagctggcagccaaccgcatctacgagatcctcccccagcgcatccagcagtggcagcagagcccttgcattgctgaagagcacggcaagaagctgctcgaacgcattcgccgagagcagcagagtgcccgcactcgccttcaggaaatggaacgccgattccatgagcttgaggccatcattctacgtgccaagcagcaggctgtgcgcgaggatgaggagagcaacgagggtgacagtgatgacacagacctgcagatcttctgtgtttcctgtgggcaccccatcaacccacgtgttgccttgcgccacatggagcgctgctacgccaagtatgagagccagacgtcctttgggtccatgtaccccacacgcattgaaggggccacacgactcttctgtgatgtgtataatcctcagagcaaaacatactgtaagcggctccaggtgctgtgccccgagcactcacgggaccccaaagtgccagctgacgaggtatgcgggtgcccccttgtacgtgatgtctttgagctcacgggtgacttctgccgcctgcccaagcgccagtgcaatcgccattactgctgggagaagctgcggcgtgcggaagtggacttggagcgcgtgcgtgtgtggtacaagctggacgagctgtttgagcaggagcgcaatgtgcgcacagccatgacaaaccgcgcgggattgctggccctgatgctgcaccagacgatccagcacgatcccctcactaccgacctgcgctccagtgccgaccgctgagcctcctggcccggaccccttacaccctgcattccagatgggggagccgcccggtgcccgtgtgtccgttcctccactcatctgtttctccggttctccctgtgcccatccaccggttgaccgcccatctgcctttatcagagggactgtccccgtcgacatgttcagtgcctggtggggctgcggagtccactcatccttgcctcctctccctgggttttgttaataaaattttgaagaaaccaaggaaaaaaaaaaaa

SEQ ID NO: 3754 - DNA, 970 bp, Homo Sapiens
  NM_014595
agcagcgctccctccgcttccggccgagcccgcgccccccagaccccgagagctcgcagctccggcccggcggcgatggcgcggagcgtgcgcgtgctggtggacatggacggcgtcctggccgacttcgaggccggcctcctgcggggcttccgccgccgcttccctgaggagccgcacgtgccgctggagcaacgccgcggcttcctggcccgcgagcagtaccgcgccctgcggcccgacctggcggataaagtggccagtgtgtacgaagccccgggctttttcctggacctggagcccatcccgggagccttggacgctgtgcgggagatgaacgacctaccggacacgcaggtcttcatctgcaccagccccctgctgaagtaccaccactgtgtgggtgagaagtaccgctgggtggagcagcacctggggccccagttcgtagaacgaattatcctgacaagggacaagacggtggtcttgggggacctgctcattgatgacaaggacacagttcgaggccaggaggagaccccaagctgggagcacatcttgttcacctgctgccacaatcggcacctggtcctgcccccgacaaggagacggctgctctcctggagtgacaactggagggagatcttagatagcaagcgcggagctgcgcagcgggaatgagcggggatgccgcgggcagcagctggagctaaaggaagggcaggcccacaggggccaccgcagagccgagtcggggcggcatcgtgctggtgcctctggccccgtggagtggagcaggcagacaccgttaagcgctgtgctaccgggccccaggcccagccacccggtacctcccgagaggctgtccctggaccctggctggcatggaaatacagtgggaaaaccagtcgggacctttaataaaagaccttggctttctaaaaaaaaaaaaaaaaaaaaaaaaaaaaaa

SEQ ID NO: 3755 - DNA, 5078 bp, Homo Sapiens
  NM_014602
acttccgctcggcgacaggaagtgaggtcagaccggttgctttcccgggagttcggcgtttgctggggctgcagcagctgaagtgtagtgttttcttgggactggcggtctgcacttctctcccgggttccatctccccccgcccggtggtgaggccctcgaggagggctcggacgggtgtagcgatccgcgctagaggaagacgaggcccgggaacgcatgtcccccagggcaggttagggggctggaggggtcaaatcccggggtacttgtggagactctttagcgtggcttcttctctctgctgagaccccgagagctttcccagttctcctcccaggaccaccggggttcctgaagatcgggacttttctgcgcccctccaccaacagcccatctcctgtctatgaagaaagacccttcgtagaaacaacttccccgctgctgacgcgttttcccgtcccgtccccgaagtagtctactatgacctcgttgtgagcctctgaacgattttgacactttcccgaggcctagggtattatatcctaaccttactaaagaccacagaggtgcttgccattatgggaaatcagcttgctggcattgctccctcccagatcctttctgtagagagttatttttcagatattcatgactttgaatatgataaaagcctggggagtactcggttttttaaagttgctcgagccaagcaccgagaaggcctggtcgttgtgaaggtttttgcaattcaggatcccacattgcctttaaccagctataaacaagagctggaggaactgaaaatcaggcttaattctgcacagaattgtctacctttccagaaagcatcagaaaaagcatctgagaaagcagctatgctctttaggcagtatgtgcgagacaatctctatgatcgcatcagtacccgtccattcttgaataacattgagaagcgctggattgctttccagatcctgacagctgtggaccaagcacacaaatctggagttcgtcatggggacatcaagactgagaatgtgatggtcaccagttggaattgggttcttctaactgattttgccagttttaagcccacttatcttccagaagacaacccggcagatttcaattatttctttgacacatcacggaggagaacttgctatattgctcctgaacgttttgttgatggtgggatgtttgccactgagttagaatatatgagagatccttcaactccgcttgtagacttaaatagcaatcagagaacaagaggagagttgaagagagcaatggacatcttttcagcaggttgtgtgatagctgagctttttacagaaggtgtaccattatttgatctctctcaacttttggcttatagaaatggacattttttccctgaacaagtgctaaataaaattgaagatcacagtatcagagaattggtaactcagatgattcaccgtgagccagataaacgtttagaggcagaagattacttaaaacagcagcgtggcaatgcctttcctgaaatattttacacttttcttcagccctacatggcccagtttgccaaggaaacgtttctttctgcagatgagcgtattctggttatacggaaggatttgggcaacattattcacaatctctgtggacatgatctgccagaaaaagccgaaggagagcctaaggaaaatgggctggttatcttggtatctgttataacatcctgcctacagacccttaaatactgtgattccaaactagctgctttggaactgattcttcatttggctccaagattaagtgttgaaatccttttggatcgtattactccatatcttttgcatttcagcaatgactctgttcctagggtgagggctgaagccttgaggacgttgaccaaagttcttgctctcgtcaaagaggttcctcgtaatgatatcaatatttatccggaatacattctgccaggcatagcccacttagcccaagatgatgctactatcgttagactagcctatgctgaaaacatagctctgctggcagaaacagctctgagattcctggaattagtacagttaaaaaatcttaatatggaaaatgaccccaataatgaagaaatagatgaggttacacatccaaatggaaattatgacacagagctccaagccttacatgaaatggtccagcagaaagttgttactttgctaagtgaccctgaaaatattgtaaaacaaaccttgatggaaaatggaataacacggctgtgtgtattctttggacgtcagaaagccaacgatgttttgttgtcccacatgattactttcctaaatgataagaatgattggcatctacgtggagcattttttgatagtatagttggtgttgctgcctatgttggctggcaaagctcctcaattctcaagcctctgctgcaacaaggtcttagtgatgctgaggaatttgtcattgtgaaagctctttatgcccttacttgtatgtgccagttaggactgctacaaaaaccccatgtttacgaatttgccagtgatattgcccccttcctgtgtcatcccaatttatggatacgttatggtgccgtgggatttatcacagtggtagctcgtcaaataagtacagctgatgtctactgtaaactgatgccttatcttgacccatatattacccaaccaataatacagattgaaagaaaacttgttctgctcagtgttttaaaggaaccagtaagtcgttctatatttgattatgctttgaggtctaaagatattactagcttgttcagacatcttcacatgcgtcagaagaaacgaaatggttctcttcccgactgccctccgccagaggatcctgccatagcacagcttctgaagaagttgctctcacagggaatgacagaggaagaggaagacaaacttctggcactgaaagacttcatgatgaaatctaataaagcaaaggccaatatagtggaccagagccatcttcatgatagtagtcagaaaggtgtaattgacttggcagctttaggcataactgggagacaagttgatcttgttaaaaccaaacaagaaccagatgacaaacgggccagaaaacatgtaaaacaagactcaaatgtaaatgaagaatggaaaagcatgtttgggtcactggacccaccaaacatgccacaggccctacctaaagggagtgatcaggaggtgattcagactgggaaacctcctcgttccgagtcctctgctggcatttgtgtccctttgtcaacttcttcacaggttccagaagtgacaactgtccaaaataaaaaaccagtaataccggttttaagtagtacaatcttaccatccacctatcagattcgaattacaacttgtaaaactgaacttcagcaactcatccagcaaaagcgggagcagtgcaatgctgagagaatagctaagcagatgatggaaaatgctgaatgggagagtaaaccaccaccacctggatggcgtcctaaagggctgttagttgcccatcttcatgagcataaatctgctgtgaatcgaattagagtctctgatgaacactcactttttgcaacatgttcaaatgatggcacagtgaaaatctggaacagtcaaaagatggaggggaagaccaccactaccagatctattcttacatacagccgaattggaggacgagtcaagacgctcacattctgccaaggctcccactatttagccatagcatctgataatggtgctgtccagcttcttggaattgaggcttctaagctgcccaagtctcctaaaatccatcctctacaaagcagaattctagatcagaaggaggacggttgtgttgtggatatgcatcacttcaactctggagcacagtctgttcttgcctatgccactgtgaatggctctctggttggctgggaccttaggtcttcaagcaatgcgtggactttaaagcatgatttaaagtcgggcctcatcacttcctttgctgtggacatccaccaatgctggctctgcattggtacaagcagtggtaccatggcttgttgggacatgaggttccagttgccaatttcaagtcactgtcatccttccagggctcgaatcagacgcctctcaatgcaccctctgtatcagtcctgggtgattgcagctgttcagggcaacaacgaagtgtccatgtgggacatggagactggtgacagaagatttactctctgggccagcagtgcaccaccactttctgaattacagccttctcctcatagcgtccatggtatctactgtagtcctgcagatggaaatcctatcctactaacagctggctcagatatgaaaataaggttttgggacttggcttacccagaaaggtcctatgttgttgcaggaagtactagttccccatctgtgtcctactacaggaaaataattgaaggcactgaagttgtccaggaaattcagaataagcagaaagtaggaccaagtgatgacacccctcgaaggggcccagagtccctgcccgtgggacatcatgacatcatcactgatgtcgccacattccagaccacacagggcttcatcgtaactgcttctagagatgggattgtgaaggtgtggaaataaaacctactgatttgtataaattttaatagttataaatataatactataactcgagaaaaggcatttctagagaacagattcatttgcttaattttcaaaattatgtctccatattactgtttcatgactgactgactaaatgacacccaaaatggttaagatgtacttgactagtttacttatgcatctctttgcaagaatcagccagccaacaatgtctgggatttttattgtatatgttatagaggtgagaaatgtaaaatatgaaaatgaatatgtttattttgtattgaaaaagatggttgaaaagatggttgtaagctattatagtataaacacatttttgctattaaaaatgctattcaaagcagttaaactgtaaaaaaaaaaaaaaaaaaaaaaaaaaaaaaaaaaaaaaaa

SEQ ID NO: 3756 - DNA, 17400 bp, Homo Sapiens
  NM_014611
cgcctttcctgcgggcgtagttgctggctgctcgggcactgggacctcggcggcttggggacgctggccgcgaagtagggagcgcaggtggccgctcggggtgagggccctgggtcatggagcacttcttgctggaggtggcagccgcgccgctgcggttaatcgcagccaagaacgagaagagccgcagtgagttgggcaggttcttggccaagcaggtgtggacacctcaagatcgccagtgtgtcctgagtaccttagcacagttgcttttggataaggactgtactgtgctggttggtcgccagcttcgccctctccttttggatttgctggaaaggaatgccgaagccattaaagctggaggccaaatcaaccatgatctgcatgaacggctatgtgtgtcgatgagcaaactcattggtaaccatcctgatgtcctcccgtttgccctgagatatttcaaggacacatccccagtctttcaaagacttttcctagagagttcagatgctaatccagtacgctatggacgtaggaggatgaagctccgggacctaatggaagcagccttcaagtttctgcagcaggagcagtctgtgttccgggagctctgggactggagtgtgtgtgtccctctcctcagaagccatgacaccttggttcgctggtatacagccaattgtcttgctttggttacctgtatgaatgaagagcacaagttatcatttcttaagaagatatttaatagtgatgaattgatccatttcaggttgaggttattagaagaggcccagttgcaggacttggagaaggccttggttttggccaatccagaagtctccctttggcgtaagcagaaggagctgcagtacttacagggacatcttgtttcgtctgacctctcccctagggtgacagctgtttgtggtgtggtgctgcctgggcagctgccagcccctggagagctgggtggtaataggagttcttcacgtgaacaggagctggcccttaggtcttatgtgctggttgagtctgtctgcaaaagtcttcagaccctggctatggcggttgcttctcagaatgctgtgttgttggaaggaccaataggatgtggcaaaacttccttagttgaatatttagctgcagtgacaggtagaacaaagcctcctcagcttctcaaagtccagcttggagatcagactgacagtaagatgcttttggggatgtatcgctgcacagatgttcctggagagtttgtgtggcagcctggcaccctgacacaggcagccacaatgggccactggatccttctggaggatattgactatgcccccttagacgtggtttctgtgctgatccctctcttggagaatggagagctcttgattcctggccgaggtgactgtctgaaagtggcacctggatttcagttttttgcaaccaggagactcttgagctgtggaggaaattggtatcgaccgctaaacagtcatgctactttgctagacaaatattggaccaaaattcacctggataacctggataagagagaactgaatgaggttcttcagagcagatatcctagcctattggcagtggttgatcacctgcttgacatttatatccaacttactggagagaaacatcactcttggagtgatagttctgttggatgtgaacaggcacctgaagaagtttcagaagccagaagagaaaacaaaagaccaacccttgagggaagagaattatctctaagggatctgctgaattggtgtaataggattgcccatagctttgacagttcatctttatcagcatcattaaatatttttcaagaggctctagactgtttcacagcaatgctttctgagcatacaagcaaactgaaaatggcagaagttattggaagcaaattgaacatttctagaaaaaaggctgaattcttttgtcaactttataaaccagaaattgtgatcaatgagctagatttgcaagtgggtcgagtgcggcttctacggaaacaaagtgaggctgttcacctacagagggagaagttcactttcgctgctacacggccgtcctctgttctcatcgagcagcttgcagtgtgtgtcagcaaaggggagcctgtgttgctggtgggagagaccgggactggcaaaacctctaccatccaatacttggctcacattacaggccaccgtttgagggttgtcaatatgaatcaacaaagtgatactgcagacttgcttggaggttataaaccggtggaccataagcttatttggctacccttacgggaggcatttgaggaactctttgctcagacattttccaagaaacaaaactttacgttcttggggcacattcagacctgttacagacagaaacggtggcatgatctcctgagactaatgcagcatgtacacaagtctgctgttaacaaggatggaaaagacagtgaaactgggttactcataaaagagaaatgggaagcatttggtcttagactcaaccatgcccaacaacagatgaaaatgactgaaaataccttattgttcgcatttgtagagggtacattagctcaggctgtaaagaaaggagagtggatcttgttggatgagattaacttggctgctccagaaatactagaatgtctgagtggtttgcttgaaggatcttctggatccctggtgttgctggatcgaggagacacagagccactggttcggcatcctgacttccgtttatttgcctgtatgaatccagcaactgatgtaggcaaaagaaatctcccaccaggaataagaaacaggttcacagaactttatgtagaagaattagaaagcaaagaagacttacaggttcttattgtagattatctgaaaggattgagtgtgaacaagaatacagtgcaaggaatcataaacttctacacagctttgcggaaagagtctgggaccaaactggtggatggcactggccatagacctcactacagccttcggactctgtgccgggccctgcgatttgcagcctccaatccatgtggcaacattcagcgctcactctatgagggtttttgtttgggtttcttaacacagcttgacagggcatcacacccaatagttcagaagctcatctgtcaacacattgtccctggcaatgtcaagagtctgctgaagcagcctattccagagccaaaaggaggtcggcttatccaggttgaaggctactggattgcggtgggagacaaggagcctacaatagatgagacgtacattctgacatcttctgtgaagctgaacctgagagatatagtccgagttgtctctgcaggaacctatccagtgctgattcagggagagacatcagttggtaaaacaagcctgatccagtggctggctgcagctactggcaaccactgtgtgcgtattaataatcacgaacacacggatattcaggagtacattggttgttacacgtctgactcctcagggaagcttgtctttaaggaaggtgttcttattgatgccatgagaaaaggctattggattattttagatgaattaaatttggcccctactgatgtgttagaggcgctgaataggctgttggatgataaccgtgaattgctagtaacagaaacacaggaagttgttaaagcacaccctcggtttatgctttttgccacccaaaatcccccaggactttatggaggcagaaaggtcctttctagagccttcaggaatcggtttgtggaattgcactttgatgagttacctagctccgagttggaaacaatcttgcacaagcggtgtagtttgccaccctcctattgcagcaagttggttaaagtcatgctggatcttcagtcctatcgcagaagttcttcagtgtttgctggaaagcagggcttcatcacccttcgtgatctgttccgatgggctgaaagatacagattggctgagccgaccgagaaggagtatgactggctacagcatttagccaatgatggttatatgcttctggcaggtcgagtcaggaagcaggaggaaattgatgtgattcaagaagtccttgagaaacatttcaagaaaaaattgtgtcctcaatctcttttctccaaagaaaatgttctaaaattgctgggtaaattgtctactcagatatccacattggagtgtaactttggccatatcgtgtggactgagggcatgcggagactcgcgatgctagtgggaagggcattggaatttggtgaacctgtgctgctggttggagacactgggtgtgggaaaactactatctgtcaggtatttgcagccttggcaaatcagaaattatactctgtcagctgccacttacacatggagacatcagacttcctgggtggcctgcggccagtgagacaaaagccaaacgacaaggaagaaattgacacatcaagactctttgagtggcatgatgggcctctggttcaggccatgaaggaggacggctttttcctcttggatgagatctcattggccgatgactctgtcttggaaagactcaacagtgtccttgaagtagaaaagtctctggtattagctgaaaaaggcagtccagaggacaaggatagtgaaatagagctgttgactgctgggaaaaaatttcgtattctagcaaccatgaaccctgggggtgactttggaaaaaaggagctgtctcctgccttaagaaaccggtttacagaaatatggtgccctcaaagcacaagccgtgaagatttaattcagatcatcagtcataatcttcgtccaggattgtgtctgggcagaatagatcctaaagggtctgacatacctgaagtgatgctggatttcattgactggctgacccaccaagagtttggcagaaagtgtgtggtcagtatcagagatatcctgtcctgggttaacttcatgaacaaaatgggggaggaagctgctttgaaaaggccagagatcatctccactgtgacatcttttgtccatgctgcatgcctggtgtacatagatggaataggttcaggggtaacttcctctgggtttggtacagcccttttggcacgaaaagaatgtctgaaatttctaatcaagaggcttgccaagatagtacgacttacagaatatcagaaaaatgagttgaagatttatgacagaatgaaggccaaagaattcactggaatagataacctttggggaattcatccattttttataccaaggggacctgtcctacacaggaataatattgcagactatgcactcagtgcagggaccactgctatgaatgcacagaggctcttaagagctaccaaactgaagaagcccattctcctggagggttcccctggtgttggcaagacaagtttggtgggagcattagcaaaggcttcaggaaatacccttgttagaatcaacttatcagagcaaacggacatcacagacctgtttggagcagatctacctgttgaaggtggcaagggaggagagtttgcctggcgtgatggccccttactggcagctttgaaggcaggccattgggtggtgttggatgagcttaacctggcttctcagtctgtattggaaggactcaatgcttgttttgaccaccgaggagaaatctatgtgcctgagttaggaatgagctttcaagtgcagcatgaaaagacgaagatttttgggtgtcagaatccctttagacaaggaggtgggaggaaaggcttgcccaggtctttccttaacagattcactcaggtcttcgttgatccccttacagtaattgacatggagttcattgccagtactttgtttccagccattgagaaaaatattgttaagaaaatggttgctttcaataaccaaattgatcatgaagtgactgttgagaagaaatgggggcaaaaaggaggaccctgggaattcaacctccgggaccttttccgctggtgtcagttgatgctggttgaccagtcccctgggtgttatgatcctggtcagcatgtgtttttggtctatggtgaaagaatgagaaccgaagaggacaaaaaaaaggtcattgctgtattcaaggatgtgtttggttcaaattccaacccatacatgggaaccagactatttcgtatcactccctatgatgttcagttgggctactcagtcctttcccgtgggagctgtgttcctcacccgtcccgccatcccctgttgctcctgcaccagtcattccaacccctggagtcaatcatgaagtgtgtgcagatgagctggatggtcatcctggtcgggccagcctctgtgggcaagaccagcctggtccagcttctggcacaccttactggccacacattaaagatcatggctatgaacagtgcaatggatactactgagctgctgggtggatttgagcaggttgatcttatacgaccttggaggaggctgctagagaaggtggagggaactgtaagggcactgttaagggatagcctccttatcagtgctgatgatgcagaagtagtgctgcgagcctggagtcattttcttctgacatataagcctaagtgtcttggagaaggtggtaaagctatcacgatggagattgtcaacaaactagaagcagtgttattgcttatgcagcgactcaacaataaaatcaactcatactgcaaggcagagtttgccaaacttgttgaagagttccgaagctttggtgtgaagcttacgcagttggccagtggccatagccatggcacatttgaatgggttgacagcatgttggttcaggccctgaagtctggagactggcttctgatggacaatgttaacttctgcaacccatcagtgttggatcgtttgaatgctttgcttgaacccggaggtgtcctcactattagtgagagaggaatgatagatggatccactcccacgataacaccaaatcccaatttcagacttttcctctcgatggatcctgttcatggagatatatcccgagctatgaggaatcgtggacttgaaatctacatttcaggggaaggggatgcaagcaccccagacaacctggatttgaaagttctgctgcacagccttggattggtggggaacagtgtatgtgacatcctcttggctttacacacagagacccggagcactgttgtaggttctccaacatcttctgtatcaactctaatccagacagccatactaattgtccagtacctgcagcgagggctgagtttagacagagccttttctgaagcatgctgggaagtatatgtctgttcccagcattcaccagcaaaccggaagcttgtacaggctttactggagaaacatgtttcttctttgcgagcacatgaaacctggggagactccattcttggcatgggactgtggccagattctgtgccctcagctctctttgctactgaagattcacacctgtctacagtccgaagagatggacagatcttagtatattgtctcaacaggatgagcatgaaaaccagcagctggacaaggagtcagccttttaccttgcaagacttagagaaaattatgcagtcccccagccctgagaacctgaaattcaatgcagtcgaagtgaatacttactggatcgatgaaccagatgttttggtcatggctgttaaattgctcatagaaagagcaaccaatcaggattggatgctcagagttaaatggctttatcatttagccaagaatataccgcaggggcttgagtccatacaaattcatttggaagccagtgctgcatctctcaggaatttttactcacattccctctcaggtgcagtcagtaatgttttcaaaatattacaaccaaatacaacagatgaatttgtgatccctctggatccccgatggaatatgcaggctctggacatgattagaaatttgatggactttgacccacaaacagaccagcctgaccagctctttgcccttttagaatcagctgcaaacaagacaatcatatatcttgaccgggaaaaacgggtttttactgaagcaaatttggtttctgttggtagcaaaaagctaagagagagtgttttgagaatgtcctttgaattccatcaagatccagaaagctatcacactctgccccatgaaattgtggtcaatcttgctgctttttttgaactttgtgatgcactagtcctgctctgggtacagtcctcccagggaatggtgtctgatgccagtgccaatgagatcttaggttctctgcggtggcgggaccggttctggactgtggccgacacagtaaaagtagatgccccaggtctggcccttcttgccctccattggcactgggttttaaaacatctggtccaccagatcccccgacttctgatgaattatgaagacaaatattacaaagaagttcagactgtctcagaacatattcagaattgtctggggagccagactggtggcttcgctggtataaagaagttgcagaagttcctgggacgaccgtttccttttaaggacaagctggtggtggagtgtttttcacaactgaaggtccttaacaaagtccttgccatcagggagcagatgtctgcccttggggagagtggatggcaggaagacattaaccgtctccaagtggttgcttctcagtggacattaaagaaaagtctcctgcaagcctggggactgatcctcagagcaaatattttggaagatgtcagcctagatgaattgaagaattttgtgcatgctcagtgtttagaactgaaagccaaaggactctcacttggttttctggagaaaaagcatgatgaagcttcctccctgtcccatccagacttgacctccgtaatccacctcaccaggagtgttcagttgtggcctgcaatggagtacctggctatgctttggcggtacaaagtgacagctgattttatggcacaagcttgtctcagaagatgcagcaaaaatcaacaaccccagataaatgaggagataagtcacctcatctcattttgtctttatcacacacctgttacacctcaagagcttcgagatctgtggtccttgctgcatcatcagaaggtgtctcctgaagaaattacatctttgtggtccgagttatttaattccatgtttatgtctttctggagcagtactgtgaccacaaatccagagtactggctaatgtggaaccctttgcctggtatgcagcagagggaggcacccaagtctgttttggactccacattgaagggccccggcaatctcaatagacccatattctctaagtgctgctttgaagtcttaaccagcagctggagagcaagtccctgggatgtgagtggcctccccattctttcctcctctcacgtgaccctaggagagtgggttgagagaactcagcagctccaggacatcagttcgatgctttggactaacatggctatctcttcagtagcagaattcagacgcacggattcccaactccaggggcaggtgctgttccggcacctggcaggcctagcagagctgctcccagagtcccggcggcaggagtacatgcagaactgtgagcagctgctgcttgggagcagccaggccttccagcatgtgggccagacacttggggacatggctggtcaggaggtgctgcccaaggaactgctctgccagttgctcacctccctgcaccactttgttggtgaaggggagagtaagaggagcctgcctgagccagcccagcgtgggagcctctgggtgagcctcggcttgctccagattcagacatggcttccccaggcacgctttgaccctgcggtgaagagggagtacaagctcaattacgtcaaggaagagttacaccaactgcagtgtgaatggaagacccggaacctgtcatcccagctgcagactggaagagacctggaagatgaagtcgttgtcagctactctcatcctcacgttaggctgcttcgccaaaggatggatcggctggataatttaacctgtcacctgttgaagaaacaggcctttagaccccagctgcctgcctacgagtccctggttcaggagatccaccactacgtcaccagcatcgccaaggcccctgctgttcaggatctgctcacacggcttctgcaggccctccacatagatgggccacggtctgcccaagtagcccagagccttctaaaggaggaggcctcttggcagcagtcacaccaccagttccggaagcggctgtcagaggagtacaccttctatccagatgccgtgagcccactgcaggcatccatattgcagttacaacatggcatgaggctggtggcctctgagctccacacctcactccacagcagtatggttggtgcagacaggctggggaccctggccacagccttgctggctttcccatcggtgggccccaccttcccgacttactatgctcatgcagacactttgtgctcggtgaagtctgaggaggttctacgaggccttgggaagctaatcctcaagcgctcaggaggaaaggagctggaaggcaagggccagaaagcctgtcccactcgggagcagctgctgatgaatgctctcctttacctgcgctcccacgtgttatgcaagggagagttggaccagagggccctgcagctcttcagacatgtgtgtcaggaaatcatcagtgagtgggatgagcaggaacgcatagcccaagagaaggctgagcaggaaagcggcctgtatagatacaggagcaggaactctaggacagccctgagtgaagaggaggaggaagaacgggagttcagaaaacagttccccctgcatgaaaaggactttgcagatattttggtgcagccaacgttggaggagaacaaaggaacttcagatgggcaagaagaggaagcaggcacaaacccagctctcctctcccagaattcaatgcaggcagtaatgctgatacaccagcaattgtgtctcaactttgctcgatccctctggtatcaacagactctgccgccacatgaagcaaagcattacctcagcctgtttctgtcttgctatcagactggggcatcgcttgtgacacacttctaccccctgatgggagttgaactgaatgaccgactcttgggcagccaacttttggcctgtaccctctcccataacactctttttggggaggcaccctcagacctgatggtgaaacctgatgggccctatgacttctaccagcatcccaatgttccagaagcacggcagtgtcaacctgtgcttcaaggtttctcagaggctgtcagtcacttgctacaggactggccagaacacccagcgcttgaacagctcctggttgtaatggacagaattcgtagtttcccactttccagtcccatctcaaagttcctgaatggcttagagatccttctggcaaaggcacaggattgggaggaaaatgcaagtcgagctttgtctttgcggaaacatcttgatttgatcagtcagatgatcattcggtggcgtaaactggagctgaactgctggtccatgagtttggataatactatgaagcgccacaccgagaaatccaccaagcactggttctccatctatcagatgcttgagaagcacatgcaggaacaaacagaagaacaggaagatgacaaacagatgaccttgatgttgctggtcagcacattacaagcatttattgaaggatcctcgctgggagagttccatgtgcgacttcagatgttactggttttccattgtcatgtcttgctgatgccacaggttgaaggaaaggattcactttgcagtgttctatggaatttgtaccattattacaagcaattctttgaccgggtccaggccaaaattgtggaacttcgttcccccctagaaaaagaacttaaagaatttgttaagatttccaagtggaatgatgtcagcttctggtccattaagcaatctgtagaaaagacacacaggacactctttaaattcatgaagaaatttgaagcagtcctgagtgaaccctgccggtcatccctggtggagagtgacaaggaagaacagcctgactttttgcccaggccaacagatggagctgcaagtgaactgtcttccattcagaatctgaacagggcactgagggagaccctgttagcccaaccagcagctgggcaggccacaattccagagtggtgtcagggcgctgctccttccggcttggaaggggagcttctgcgtcgcttgccaaagctcaggaaacgcatgaggaagatgtgcctgacgttcatgaaggagagccccctgcctcgccttgtggagggccttgatcagttcacaggtgaagtgatttcctctgtgagtgagctgcagagcttaaaggtggaaccctctgcagagaaggagaagcagcggtcagaagccaagcacattctcatgcaaaaacagcgagctttgtcagacctctttaaacaccttgcaaaaattggtttgtcgtatcgcaaaggtcttgcttgggcccgttcaaaaaaccctcaagagatgcttcatcttcacccattagatctccagagcgcattgtccatcgtcagcagcactcaggaggctgattctaggctgcttacagaaatctcgtcttcatgggatggatgccagaagtatttttatcgctctcttgcacggcatgccaggcttaacgcagcactagcaactcctgccaaggaaatgggcatgggcaacgtggagaggtgcagagggttctcagcacatttgatgaagatgctcgtccgacagcggcgctccctgaccacgctcagtgagcagtggatcatcctcaggaacctcctcagctgtgtgcaagagattcacagcaggctgatggggccccaggcctaccccgtggccttcccccctcaggatggcgtgcagcagtggacagagcgcctgcagcacctggccatgcagtgccagatcctgcttgagcagctctcctggctcctccagtgctgccccagtgtagggccagctccaggccatggcaatgtccaggtactggggcagcctcctggcccctgcctggaaggaccagaacttagcaagggacaactttgtggagtagtgctggacctaattccttccaatctgagctacccatctccaatacctggaagtcagctgccctctggttgccggatgcggaaacaggatcacctttggcaacagtcaactacgagattaacagagatgctaaaaaccattaaaacagtgaaagctgacgtcgacaaaattagacagcagtcttgtgagactctctttcattcttggaaagattttgaagtttgctcttctgcgctgagttgcttgtcccaggtgtcagttcatttgcagggcctagagtccttgttcattcttccagggatggaggttgagcaaagagactcacaaatggcactagttgaaagtctggaatatgtaagaggagaaattagtaaagccatggctgactttactacctggaagacccatctgcttacttcagatagccaaggaggaaatcaaatgttggacgaaggatttgtggaagatttttcagagcaaatggaaattgccatccgagccatcctctgtgccatccagaacttagaagaaagaaagaatgaaaaagcagaggagaacactgaccaagcaagcccacaagaagattatgcaggctttgagagactgcaatcaggacatctaacaaaactcttagaggatgacttctgggccgatgtgagcactttgcacgtgcagaaaataatttctgccatctccgagctgttggagaggctgaaatcgtacggtgaggatggcacagcagcaaagcacctgttcttcagccaatcctgttccttgctggtgcgcctggtgccggtcctctccagctactcagacctcgtcctcttcttcctgaccatgtctttagcaactcaccgtagtactgcaaagctgctctctgtgcttgcccaggtctttacagagcttgcccagaagggattttgcttgcccaaagaatttatggaagattcagctggagagggagcaactgagttccatgactatgagggaggtggaattggagaaggcgagggcatgaaggatgtgagtgaccagatcggaaatgaagaacaggtggaagatacatttcagaagggtcaagaaaaagacaaagaggatcctgattcaaaatctgatattaagggcgaggataatgccattgagatgtcggaagattttgatgggaaaatgcatgatggggagcttgaagaacaagaagaggatgatgagaaatcagatagtgagggcggagacctggataaacacatgggcgatctcaatggtgaggaagctgacaaactagatgagaggctttggggtgatgatgatgaggaggaagatgaggaggaagaagacaataaaactgaagaaacaggaccaggaatggatgaggaagattctgaacttgttgctaaagatgacaacttggatagtggcaattcaaacaaagataaaagccagcaagataagaaggaagaaaaggaagaagcagaagctgatgatggtggacaaggtgaagacaaaattaatgaacaaatagatgagagggactatgatgaaaatgaggtggacccttaccatggcaatcaggaaaaggtgccagaacccgaggctttggaccttccagatgacttgaacctcgacagtgaagacaagaatggtggtgaggacaccgacaatgaagaaggagaagaagagaatcctttggagataaaagaaaaaccagaagaagcaggtcatgaagctgaggaaagaggagagaccgagaccgaccagaacgaaagtcagagtccacaggagcctgaggaaggccccagtgaagatgacaaggcagaaggggaagaggaaatggacacaggagctgatgaccaagatggagatgctgctcagcatcctgaagaacactctgaggagcagcagcagtctgtggaggaaaaagacaaggaagccgatgaagaaggtggagagaatggccctgctgaccaaggtttccagccccaggaggaagaagaacgggaggactctgatacagaggagcaggtgccagaggctttggagaggaaggagcatgcctcctgtgggcagactggtgtggagaacatgcagaacacacaggccatggagctggctggggccgcacctgagaaggagcaggggaaagaggaacacggaagtggagctgcagatgcaaaccaggcagaaggccatgaatcgaatttcattgcccagttggcctcccagaagcacaccaggaaaaacacacagagttttaagaggaaacctgggcaggctgacaatgaacgttccatgggtgatcacaatgagcgtgtgcacaagaggctgaggactgtggatacggacagccatgccgagcaggggccagctcagcagccccaggcccaggtggaggatgcagatgcattcgagcacattaaacaaggcagtgacgcatacgatgcacagacctatgatgtggccagcaaagaacagcaacagtctgcaaaagactctggcaaagatcaggaagaggaggagatagaggacacccttatggacacagaggagcaggaggagttcaaagcagcagacgtggagcagctgaagccagaggaaatcaagtcgggcaccacagcacccttgggctttgatgagatggaagtggagatccaaactgttaaaacagaggaagaccaagaccccagaacagacaaagcccataaggagacagaaaatgagaaaccagaaagaagccgagagtctaccattcatacagctcatcaattcctcatggacacgatcttccagccctttttaaaagatgtcaatgagctaagacaggagctggagagacagctggaaatgtggcagccacgtgaatctggaaacccagaggaggagaaggttgcagctgagatgtggcagagttacctgatcttaacagcgcctctttcacaacggttatgtgaagagcttcgtctcatattagagcctacccaggcagccaagctgaaaggagactatcgaactgggaaacgactaaacatacggaaagtcattccatacattgctagtcaatttcggaaagacaagatttggcttcgaaggaccaagcccagtaaacgccagtatcagatttgtttggctatcgatgactcttctagtatggtagacaatcataccaagcagcttgcatttgaatctttggctgtgattggaaatgctctaaccctcctggaagtgggtcagattgcagtgtgtagttttggagaatctgtaaagctgttacacccatttcatgagcagttcagtgattactctgggtcccagattctacgtctctgcaaattccaacaaaagaaaaccaagattgctcagtttctagagtctgttgccaacatgtttgcagctgctcagcagctctcgcagaacatcagttcagaaactgcacaactcctcctggtagtctctgatgggcgaggccttttccttgagggcaaagaaagagtcctggcagcagttcaggctgcccggaatgcaaatatctttgtcatctttgttgtattggacaatcccagttcacgggattctatcttggacattaaagtaccgatatttaaaggacctggagagatgcctgaaatccgatcctacatggaagagttcccattcccatactatatcattcttcgagatgtaaacgcacttcctgagacactcagcgatgccctcagacagtggtttgagttggtgacagcctctgaccacccatagaacagaaagaagagtccaaagtgagacttaactgtggtcagaaggtcacattgcttacccaggtgctcccttttggacaactacaaaaaattttattgtaatatttttattttacaacgtgatcttacagcctacagaatgctctctggctcccggctttgcctgggctgaggtttttataccaaacctggaagcagcagcaggtgcctgaactcgtaactagagaagagttatccttcttccctgccttggaagccctggcctgggaggaggtcataccccaccgttggagcccagctgcctgttttcttttgcaggggatctgggcacctgtgccttgaggagatgctgccaggagcatgggactctgacagtcctttgtataaaggactaaagggagctgcccttttgaccctgttctaagctctgccttgccaagcccatagtgtgtgcccaaaagctgtcaagtggccaagacagctcgtttctggag

SEQ ID NO: 3757 - DNA, 7101 bp, Homo Sapiens
  NM_014614
ggtgggggccggggagggttcgggtgggagggggtggggggggtgtccctgggctcatggagccggccgagcgggcgggagtcggagagcccccggagccgggcgggcgtcccgagccgggcccgcggggcttcgtcccgcagaaggagatcgtctacaacaagctgctgccctacgcggagcggctagacgccgagtccgacttgcagctggcccagatcaaatgcaacctgggccgggccgtgcagctccaagagctgtggcccgggggcctcttctggaccaggaaactctccacatatattcgactttatgggagaaaatttagcaaagaagatcatgttctttttattaagttattgtatgagctggtatcaattccaaaactggaaatcagcatgatgcagggatttgcccgccttttgatcaacttgttaaagaaaaaggaacttctttcaagagctgatttggagttaccctggagaccactttatgacatggtagaaagaatattatattccaagacagagcacctaggattaaattggtttcctaattctgtagaaaatattctcaaaacactcgtgaaaagctgccgaccatattttccagcagatgccaccgctgagatgctagaagaatggcgacctttaatgtgcccttttgatgtaaccatgcaaaaggccatcacttattttgaaatatttcttcctacctcccttcctccagaacttcatcataaaggttttaaactttggtttgatgaattaattggcctttgggtttcagtgcaaaatctcccacaatgggaggggcaactagtaaatctctttgctcgattggctacagataatatagggtacatagattgggatccatatgtaccaaagatatttacaagaattctgagaagcttgaacctcccagtgggaagcagtcaagtgttagtcccaagatttttaacaaatgcttatgatataggacatgctgtaatatggatcaccgccatgatgggtggaccaagtaagctagtgcaaaaacacttagctggtttgtttaacagcatcacatctttttaccatccttcaaataatgggcgctggctgaacaagttaatgaaactacttcagcggttgccaaacagtgttgttagaagattgcatcgtgaaagatacaagaagccctcttggttaactcctgtgcctgatagccacaagcttactgatcaagatgttacagactttgtacaatgcattattcagcctgtcctcttggctatgtttagcaaaaccggtagtctagaagcagcccaggctttgcagaatcttgcactcatgagacctgaattggtaataccccctgtacttgaaagaacatatcctgcattagagacattaacagaacctcaccagctcacagctactttaagttgtgtaattggagtagcccgcagtttggtatcaggaggcagatggtttcctgaaggtcctacacatatgctacctctgttgatgagagcattgcctggggtggatccaaatgactttagtaaatgcatgatcacattccagttcatagcaacattttctactctggtgcctttagtagattgttcatctgtactacaagaaagaaatgacctcacagaagtggaacgagaactttgttcagccacagctgaatttgaggatttcgtcttacagtttatggacagatgttttggacttatagaaagtagcacattggagcaaacaagagaagagacagaaactgagaaaatgacacacttggagagtttggtcgaattaggtctgtcttctacgtttagtacaatcctcacccaatgttccaaagaaatatttatggtggcccttcagaaggtttttaatttttctacttcacatatatttgaaacaagagtagcaggtcgcatggtggcagacatgtgccgcgctgctgtaaagtgctgcccagaagaatctttgaagctctttgttccccactgctgcagtgttataactcagcttacaatgaatgatgatgtattaaatgatgaagagctagacaaggaattactatggaatcttcaacttttgtctgagattactcgagtggatggaaggaagttgcttctttatagggagcagcttgtaaagattctccaaagaaccctacatttaacctgtaagcagggttacactctgtcttgtaaccttttgcatcatcttctccgttctaccacacttatctaccctacagaatactgcagtgtgccaggtggctttgacaagcctccttctgaatactttcctatcaaggactggggcaaacccggggacttgtggaatctgggaatccagtggcatgttccttcttcagaagaagtgtcttttgccttttatcttttggactcctttcttcagcctgagctcgtcaaactccagcattgtggggatggaaaacttgaaatgtctagagatgatattctacagagtctgactatagtgcacaactgtttaattggctctggaaacctcctacctccgttgaaaggagagccagttactaacttagtaccaagtatggtgtccttggaagagacaaagttgtatactggacttgaatatgatctgtctcgagagaaccaccgagaagtaattgctacagttataaggaaacttcttaaccacatacttgataattcagaagatgatactaagtcattgtttcttattataaagattattggagaccttttacaattccaaggatctcacaagcatgaatttgactcccgatggaaaagcttcaacttagtaaagaaatcaatggaaaatcggctccatgggaaaaaacaacatatcagagcactgttgattgatagagtaatgttacagcatgagctacggacactaactgttgagggttgtgaatacaaaaagatacatcaagatatgatcagagatcttcttcgtttatctacaagttcatacagtcaggtgagaaataaggctcagcaaacattttttgctgccttgggagcatataacttctgttgcagagatatcattcccttggttttggagttcttaaggcctgatagacaaggtgttacacagcaacaattcaagggtgccttgtactgtctccttggaaatcacagtggtgtgtgcttggcaaaccttcatgattgggactgtattgtacagacgtggccagcgattgtttcttcagggcttagccaagcaatgtccctggaaaagccatcaatagtgagattgtttgatgatcttgcagaaaagattcataggcagtatgaaacaattggcttggacttcacaattccaaagtcatgtgttgaaatagcggaattacttcaacagtcaaaaaacccctctatcaaccagatattgcttagcccagaaaaaattaaggaaggaattaaacgccaacaggaaaagaatgccgatgccctaaggaactatgaaaatttggtagacaccttgctagatggtgtggagcaaagaaacctgccctggaaatttgaacatataggcattgggcttctgtctctactgctgagagatgaccgagtgttgcctcttcgtgccatacggttttttgttgagaatctcaaccatgatgcaattgtagttcgaaagatggctatctcagctgttgctggtatccttaaacagctaaaaagaacccacaaaaagctgaccattaacccctgtgaaatcagtggatgccctaaacccacccaaattattgctggtgataggcctgataatcattggttgcattatgacagcaaaactataccaagaactaaaaaagaatgggagtcaagttgctttgtggaaaaaactcactggggatactacacctggccaaagaatatggttgtttatgctggtgtggaagagcagcctaagcttggcagaagcagggaggatatgacagaggcagaacagattatatttgatcatttttctgatcctaaatttgttgagcagttaattacttttctatcattagaagacagaaaaggaaaagataagtttaatccacgacgtttttgcctctttaagggtatattcaggaattttgatgatgccttcctgccagttctgaagccccatttagaacatttggttgcagattcacatgaaagcacccagcgatgtgttgcagaaattatagctggtttaatcagaggttctaagcactggacatttgaaaaggtggagaagctttgggagcttctgtgccctctgcttagaacagcactgtccaatattaccgtagaaacttataatgactggggagcttgtatagcaacatcctgtgaaagcagagatccccggaaacttcactggctttttgaactgctgttggaatcaccattgagtggtgaaggaggatcctttgtagatgcatgtcgactttatgtactacaaggtggccttgcccagcaagaatggagagtgcctgaactattgcacagactactgaagtacttggaacccaaactcacccaggtttacaaaaatgtcagagaaagaataggaagtgtgctgacctacatattcatgatagatgtatctttgccaaataccacaccaaccatatcgcctcatgtccctgagtttactgctcgaattctggagaaattgaaacctctcatggatgtggatgaagaaattcagaaccatgttatggaagaaaatggaattggtgaagaagatgagcgaactcagggcattaaactcttgaaaaccatattgaaatggctgatggcaagtgcaggaagatccttttctacagcagttacagaacaacttcagcttctacctttgtttttcaagattgccccagtggaaaatgacaatagctacgatgaactgaaaagagatgcaaagttatgtttatcattaatgtctcaggggttgctttaccctcatcaagtgcctttggtacttcaggtgctaaaacaaacagcaagaagcagttcttggcatgcacgatacacagtactgacctacctccagaccatggtattttataacctctttattttcctaaacaatgaagatgcagttaaagatatcaggtggctggttataagtcttttggaggacgaacaactggaggttcgagaaatggctgctactaccttaagcggtctgctacagtgtaactttcttaccatggacagtcctatgcagattcattttgagcaactttgcaaaacaaaactacctaagaaaagaaagcgagaccctggttctgtaggagataccattccttctgcagagttggtcaaacgccatgctggggtgctaggacttggtgcatgtgttctttctagtccttacgatgttcccacctggatgccccagctcctcatgaatctcagtgcacatctaaatgatcctcagcctattgagatgactgtaaaaaaaaccttatccaatttccgaaggactcaccatgacaactggcaggaacataaacagcaattcactgatgaccaactgcttgttctcaccgatcttcttgtgtcaccatgctattatgcatagaaagatgactagtcctcacttcaggctcttttcatcaaaaattccacaccctcaggtaccatctgtggtggctctctgcaagttttaaaactgcctctgctgagctctcatcattttggtggtttctgtgttagatctcgttagtctgcattccacagcttctcagttgccatttgatttcccaacttgtccggaagtgtttccagaatactgatcactttttttttttgaggcatctgacaaagtcacaaagtctcagactagaaataattacccagtatgatcatggcatccaagaccagagtctcagaactcattaagaaacagtttacttggaatggagaatacccatctgtaatacaggtcctgtcatttcattcatctcaaattattttgaattcttcccaaatggctgctggatttaggtggtaataggggctgtgggccataaatctgaagccttgagaaccttgggtctggagagccatgaagagggaaggaaaagagggcaagtcctgaacctaaccaatgacctgatggattgctcgaccaagacacagaagtgaagtctgtgtctgtgcacttcccacagactggagtttttggtgctgaatagagccagttgctaaaaaattgggggtttggtgaagaaatctgattgttgtgtgtattcaatgtgtgattttaaaaataaacagcaacaacaataaaaaccctgactggctgttttttccctgtattctttacaactattttttgaccctctgaaaattattatacttcacctaaatggaagactgctgtgtttgtggaaattttgtaattttttaatttattttattctctctccctttttattttgcctgcagaatcgttgagagactaataaggcttaatatttaattgatttgtttaatatgttatataaatgtaaaagagtgtataaactgtagagatagcattggcaagacattgtacagatgcaaccttttacacaacatcattgtgtaatttgtaaagattcacgtgtagttctttattatagtgattttgggctttgtacccactgaatgccattttttgtgtttttaaattattttctttatcttgttacaaaaactgagatgtggggttttttttttttcagttcacttatcattagaatgtctgaacttttatgtaacatttttgtgtgcatctctcaatgctaacaccacatgtttgcctatgacaagtttatagagtgaaaggtatcttctgggttgaaataattcacaaattggtgaatgtcatcttgcaacacaccctgtacagtcttccttaaaggaacactacagtatatttttagtatctacatgctgaatgactgaatacagacctaagcacagcagtggtcctggtacagtatttaagtgtcggcatacacaggcgtaatccctgtataaagtagtgccaaactgatttcagttgtgtaactagtttaaaacccaataaatggattctttttaacaaa

SEQ ID NO: 3758 - DNA, 7395 bp, Homo Sapiens
  NM_014615
aagcagtttagacaaacactgggcgacggtggctccagcatgtatcagccgaggtggagctgcggggccctggcatgaaaggcatgagccatgagcccaagtccccttcgctagggatgctttccaccgcgaccaggaccaccgccaccgtcaaccccctcaccccctcgccgctcaatggcgccctggtgcccagcggcagccccgccaccagcagcgcgctgtcggcccaggccgcgccatcctccagctttgccgccgcgctgcgcaagctcgccaaacaggcggaggagcccagagggtcctcactgagcagcgagtcgtcccccgtgtcctctccggccaccaaccacagctcccccgccagcacacccaagcgcgtgcccatgggccctatcatcgtcccccctgggggccacagcgtgcccagcaccccccccgtggtgaccatcgctccaaccaaaaccgtgaatggtgtctggaggagtgagagccggcaggatgccggctccaggagcagcagtggaggtcgggaacgcctcattgtggagcccccgctccctcaggagaaggcagggggaccagccatcccctcgcacctgctcagcaccccctaccccttcggcctctcccccagctcagttgtgcaggattcccgcttcccgccactcaacctccagcggcccgtgcaccacgtggtgccccccagtaccgtgaccgaggactacctgagaagcttccggccctaccacaccaccgacgacctccgcatgtcctcactgcctcccctcggcctggacccggccactgctgcagcctactaccaccccagctacctggccccacaccccttcccccacccggccttcaggatggacgactcctactgcctgtctgccctgaggtccccgttctaccccatccccacccccggctccctgcccccactgcacccatcagcgatgcacctgcacctctctggggtccgctaccctcccgagctctcccactcatccctggcagcgctgcactcggagcgcatgtctggcctcagcgcggagaggctgcagatggacgaggagctaaggcgggagagggagcgcgagcgcgagcgcgagcgtgagcgtgaggctgaccgcgagcgggagaaggaacgtgagcgcgaacgcgagaaggagcgcgagcaagagaaggagcgtgagcgtgagaaggagcgcgagcgcgagctggagcgccagcgggagcagcgggcccgggagaaggagctgctggccgccaaggccctggagcccagcttcctgcccgtggccgagctgcatgggctgcgtggccatgccactgaggagcggggcaagccctcggagcagctgaccccaacccgagcagagaagctgaaggatgccggcctgcaggcgcccaagcccgtccaacaccccttgcatccggtgcccaccccacaccacacggtgcccagcctcatctccaaccatggcatcttctctctgcctagcagcagtgctgccacagccctgctgatccagcgcaccaatgaggaggagaagtggctggcgcggcagcggcggctgcggcaggagaaggaggaccggcagtctcaggtgtccgagttccggcagcaggtgctggagcagcacctggatatgggccggcccccggtgccggcggaggcagagcacaggccggagagcaccaccaggccaggaccaaaccgtcacgagccaggtggccgtgaccctccgcagcactttggggggccaccacctctgatttcgcccaagccccagctccatgctgcacccacggccctctggaaccccgtgtccctgatggacaacaccttggagacgcggcgggccgaaagccactctctgcacagccacccggctgcatttgagcccagccgccaggcagccgtgccgctggtgaaggtggagcgggtcttctgcccggagaaagcagaggaggggccacggaagcgtgagcctgcccctctggacaagtaccagccacctccgccgccaccacgagagggagggagcctggagcaccagcccttcctgcccgggcccgggcccttcctggctgagctcgagaagtccacccagaccatcctgggccagcagcgggcctccctcccacaggcggccaccttcggggagctcagcggacccctgaagcctggctcgccctaccggcccccagtgccacgggcccccgaccctgcctacatctatgatgagttcctgcagcagcgccggaggctggtcagcaagctggacctggaggagcgcaggcggcgggaggcccaggagaaagggtactactacgacctcgatgactcttacgacgagagcgatgaggaggaggtcagggcccacctccgttgcgtggccgagcagccgcccctcaaactggacacgtcctctgagaagctagagtttttgcaactttttggcttgaccacccaacagcagaaggaggaattggtggcccagaagcggaggaagcggcggaggatgctgcgagagagaagcccgtcgcccccaacaattcagagcaagcggcagacgccttcaccgagactggcgctgtctacccgctacagccctgatgagatgaacaacagtcccaacttcgaagaaaagaagaagttcctgaccatcttcaacctgacccacatcagcgctgagaagaggaaagacaaagagagacttgttgaaatgctccgtgccatgaagcagaaggcactgtcagcagcagtggccgactccttgacaaactctccgagggacagtcctgccgtctccctgagtgaaccagccacgcagcaagcctctctggatgtggagaagccggttggtgttgctgcttccttgtctgacatcccaaaggccgcggagcctgggaagctggaacaggtccggccccaggagctgtcgagagtccaggagctagctcctgccagcggggagaaggccaggctgagcgaggcccctggaggcaaaaagagtctgagcatgcttcactatatccggggcgctgcacccaaggacattcctgtgccgctgtcccacagcaccaatgggaagagcaagccgtgggagccctttgtggcagaagagtttgcacatcagttccacgagtcagtgctgcagtccacccagaaggccctgcagaagcataaagggagcgtggctgtgctgtctgcagagcagaaccacaaggttgacacgtccgtccactacaacattcctgagctgcagtcctccagccgcgcccctccaccccagcacaatgggcagcaggagccccccactgcaaggaagggccccccaacccaggagttggaccgggactcggaggaggaggaagaggaggatgatgaagatggagaagatgaggaggaagtccccaagcgcaagtggcaagggatcgaggccgtttttgaagcttaccaggaacacatagaagagcaaaatctggagcggcaggtgttacagacacaatgtagacgactggaggcccggcactacagcctcagcctgacggcagagcagctctcccacagcgtggcggagttgaggagccagaaacagaagatggtctcagaaagggagcggctccaggcagaactggaccacttacgaaagtgccttgccttgcctgcaatgcactggcctaggggctacctgaagggatatcccaggtgacggtttcccttgcactaggccgaacctatagtatagaaatattatctattttattaccttgaatatttaatatttttcactgggaggtttgaagcttacaaaatgagaatgtgccatgcatgaagcaaaggattccaggctccagaaaaaatgaatgaactcaccttgacgtcaatgcaattgaatcaccgttgtcattcagcgagcaaccaatgtaggattgcccacagtttttctttttaaaggtggttttcgcccttcctctcccacattatttcttaatctgaacatgaaggctccattagcaacactaaaacttgatcattaacagccccctgtgcatatgagtggatcaaaccggttctgttctttcttgtgttgccatgttactatgcctcaagcccagtttgcttttgccgcagcgatggggccagtctcattcctccccaggagtgaaacttgcttcagctgaaaaggttgggtgcattgtcagtaaaaagggcttatttgtttcattttactttcctgcaaaattttcttcaaagcaacaagtcctaggagcacacaaagcaacccaaaggcttttccctggaaaagctctttcttacctaaagataaaaccaattcacaaactgaaggtagctttttattactccgtggggagcatgtacagagctctgtgtatacacagcttcacacccaccagattgttactacagtgggttgggttttcatacagacgtaaattttgagagaaaagtcaaaggtgcttcagccttgtactgtgtatatatattaaaaaaaaaacaaagttttgtatgtttttattactttaactattgttataaaaagcctgccatttttaatatgtggtttgggggatttttgtttgtttttcctgtttgggggttttgtttgttgttttggttttttttgggcaaaaaaaaaaaaaaaaccttgcttttagtgtttgtactgctgctggtcaggacattaaaatattgaagtgtttttaaaaattaaagaagaagaaaagtaaaagagcttaccactggcgcctatgcgatcacttcatttttagtttgagttgcaccagaagctgccgtagaaagccatgcgctactgcttacctcctccactccccctgcctgcccccagcatctggacaagctaatagcaaatattacccattgctatcaagggaggagggggtagtctgtagaacccatgtgtgacagtcatgtgcacacatgggcgggggcttttaaaaacctttcaggaagtcaatgatttctgtgattgatataattctaaggtgtctgagagcaggtacagaataggaacttcagaggctttgtttaaacgcaaagctttgtaaaagccacaaggtctgagctgaacccctcctttttgaacttactgtgacaagcacaggaacggtcagaaactgggctcatcacaccaaggcaaagcaacgggcgagtcttcctccttgtcctagttactgcctatggaggcagtgtttagatcaagaaggcctctcttgctcccaagggccctcaccagaggccagggctgccagtcactggtctggggggtggaggcctgagctgagggcagggtgcctgacctgtgtgccggctgctcactgctgtgaccagcagccgagcccttggccctagcccttgctgcgcagaacagcttgctggcagctggcatcgtgtcgctttatctgcccccgcacagtttgctttgtacgtctgccaagaatcttccagttattagcaaactcagacgaatgtaccgccagtattatcagcagtcaacaagcaccttcctctccacagaagcagctggaagagaactcgaggggctgtgctgcaggcctcccctcgaaagacactgggaggtcagcatgttccacaggtgttcagagggagtctgctacaaactatcagggcaaaatctcactggatttctccactgaaaacctacttgaggtttctggtctgaaggcttaagagtcacatcttagcacttccgctctcaggcctcctcctccatcacagatgtctggatgcttttggaaatggccttggctaaagtaaaagggaaaagtagatccgataacttaaaaacgtagctcatcccttaccatccaaggggcactcccttggttggattttctatgacagcacaggggacaggtggcacaccatgagaggtctgcccagggtgggagcagtgtcactgtgctagcaatagttggcttctcccctgtcagtggaaaccccacttctgcccggcccttgagcttcttgcccactgtctccccatccttccacctacttgtggcgatctgagtactctactcttgctcaagaagtaatacgacaatcagaatacaaaccagtaaggcaacacgaataaactaagaaaaaggtaagaactgtctcaaaaacgaaagcacaccacccaagacacagtacccagtcatggtttccccatccaactattagtttcatactttgaaaacttactttcagattattctcaaagaacacagtagcacctaaatctgttttcaattgggcttaaaaattgacatgcaatctcttaagttttttgttcagctacttcacactgagtacctcaaatctgctctggagtcgattatgccacctgtgtgtcaggatgcacctgaaagccctcggctcggtccttagaccatcttcctacattacctggaagggagctgccatctgtccctctgcagagggataccttccaatagtaaattatctggttcctcactgaaacaagttatttttgcttcatatagtcagagtcagactgacatgataaaatatcatgttcctaatctgttgtctcagataagtgaccaagacgggactttccacattttagtctacattctaatcttaaaggaataaagcactgaattgggactaacattctgataggttgcacccttaagagtattcagagagcatcaaaaggagcccacaccttcagcagtgaaggattctaacacagggaatctgcagtttgtagcagaatggtattttcctcaagtagctcataatactgccaaatctcaaaagttaagctgaatttcacaccagatcctacccctttccctgagccacatgtttcacacaagtgtagaaaatgccagggatccaccacaagatggagatggtcagcacaaaccgattctgttcctctttaaagtgtatattagccacttagcaatctctatattctttcaagtaaccaagctgttgactttcttactacttgcagtagcctgtccccaacttttccatccagtgcttaacctaaaaaactccttaactctgccttgacctgaggaagaccatgctaactggtgttattttgtatgtaccctgtgcttaattctataacagtaaaccccatacgcaggtgggagggaggaacaccggtgcctcggtcactctgggggcagtttagatgctgtgaaattaaacctgttctaagtgtacttgtttgaattaattgtattgtaatattatttgttgaatgtagtaattaggtatttatgaatatattgctgtaatttctgacaacatccaaaaaataaaatcttcctaaattatgttaa

SEQ ID NO: 3759 - DNA, 7368 bp, Homo Sapiens
  NM_014616
caataatgaaggtggctgcggcgcggcggcaggctcagctgcgccgggcgggggcggcgctggggccgcgcctgtaggactcggggccgacgccgcgggatggggacgcggcgcggggagtgaggcagtggcggcggcggcggtaagcggaacttcggcccgaggggctcgcccgctcccgcctctgtcttgtcggcctccacctgcagccccgcggcccccgcgccccgcgggacccggacggcgacgacgggggaatgtggcgctggatccggcagcagctgggttttgacccaccacatcagagtgacacaagaaccatctacgtagccaacaggtttcctcagaatggcctttacacacctcagaaatttatagataacaggatcatttcatctaagtacactgtgtggaattttgttccaaaaaatttatttgaacagttcagaagagtggcaaacttttattttcttattatatttttggttcagcttatgattgatacacctaccagtccagttaccagtggacttccattattctttgtgataacagtaactgccataaagcagggatatgaagattggttacggcataactcagataatgaagtaaatggagctcctgtttatgttgttcgaagtggtggccttgtaaaaactagatcaaaaaacattcgggtgggtgatattgttcgaatagccaaagatgaaatttttcctgcagacttggtgcttctgtcctcagatcgactggatggttcctgtcacgttacaactgctagtttggacggagaaactaacctgaagacacatgtggcagttccagaaacagcattattacaaacagttgccaatttggacactctagtagctgtaatagaatgccagcaaccagaagcagacttatacagattcatgggacgaatgatcataacccaacaaatggaagaaattgtaagacctctggggccggagagtctcctgcttcgtggagccagattaaaaaacacaaaagaaatttttggtgttgcggtatacactggaatggaaactaagatggcattaaattacaagagcaaatcacagaaacgatctgcagtagaaaagtcaatgaatacatttttgataatttatctagtaattcttatatctgaagctgtcatcagcactatcttgaagtatacatggcaagctgaagaaaaatgggatgaaccttggtataaccaaaaaacagaacatcaaagaaatagcagtaagattctgagatttatttcagacttccttgcttttttggttctctacaatttcatcattccaatttcattatatgtgacagtcgaaatgcagaaatttcttggatcattttttattggctgggatcttgatctgtatcatgaagaatcagatcagaaagctcaagtcaatacttccgatctgaatgaagagcttggacaggtagagtacgtgtttacagataaaactggtacactgacagaaaatgagatgcagtttcgggaatgttcaattaatggcatgaaataccaagaaattaatggtagacttgtacccgaaggaccaacaccagactcttcagaaggaaacttatcttatcttagtagtttatcccatcttaacaacttatcccatcttacaaccagttcctctttcagaaccagtcctgaaaatgaaactgaactaattaaagaacatgatctcttctttaaagcagtcagtctctgtcacactgtacagattagcaatgttcaaactgactgcactggtgatggtccctggcaatccaacctggcaccatcgcagttggagtactatgcatcttcaccagatgaaaaggctctagtagaagctgctgcaaggattggtattgtgtttattggcaattctgaagaaactatggaggttaaaactcttggaaaactggaacggtacaaactgcttcatattctggaatttgattcagatcgtaggagaatgagtgtaattgttcaggcaccttcaggtgagaagttattatttgctaaaggagctgagtcatcaattctccctaaatgtataggtggagaaatagaaaaaaccagaattcatgtagatgaatttgctttgaaagggctaagaactctgtgtatagcatatagaaaatttacatcaaaagagtatgaggaaatagataaacgcatatttgaagccaggactgccttgcagcagcgggaagagaaattggcagctgttttccagttcatagagaaagacctgatattacttggagccacagcagtagaagacagactacaagataaagttcgagaaactattgaagcattgagaatggctggtatcaaagtatgggtacttactggggataaacatgaaacagctgttagtgtgagtttatcatgtggccattttcatagaaccatgaacatccttgaacttataaaccagaaatcagacagcgagtgtgctgaacaattgaggcagcttgccagaagaattacagaggatcatgtgattcagcatgggctggtagtggatgggaccagcctatctcttgcactcagggagcatgaaaaactatttatggaagtttgcagaaattgttcagctgtattatgctgtcgtatggctccactgcagaaagcaaaagtaataagactaataaaaatatcacctgagaaacctataacattggctgttggtgatggtgctaatgacgtaagcatgatacaagaagcccatgttggcataggaatcatgggtaaagaaggaagacaggctgcaagaaacagtgactatgcaatagccagatttaagttcctctccaaattgctttttgttcatggtcatttttattatattagaatagctacccttgtacagtattttttttataagaatgtgtgctttatcacaccccagtttttatatcagttctactgtttgttttctcagcaaacattgtatgacagcgtgtacctgactttatacaatatttgttttacttccctacctattctgatatatagtcttttggaacagcatgtagaccctcatgtgttacaaaataagcccaccctttatcgagacattagtaaaaaccgcctcttaagtattaaaacatttctttattggaccatcctgggcttcagtcatgcctttattttcttttttggatcctatttactaatagggaaagatacatctctgcttggaaatggccagatgtttggaaactggacatttggcactttggtcttcacagtcatggttattacagtcacagtaaagatggctctggaaactcatttttggacttggatcaaccatctcgttacctggggatctattatattttattttgtattttccttgttttatggagggattctctggccatttttgggctcccagaatatgtattttgtgtttattcagctcctgtcaagtggttctgcttggtttgccataatcctcatggttgttacatgtctatttcttgatatcataaagaaggtctttgaccgacacctccaccctacaagtactgaaaaggcacagcttactgaaacaaatgcaggtatcaagtgcttggactccatgtgctgtttcccggaaggagaagcagcgtgtgcatctgttggaagaatgctggaacgagttataggaagatgtagtccaacccacatcagcagatcatggagtgcatcggatcctttctataccaacgacaggagcatcttgactctctccacaatggactcatctacttgttaaaggggcagtagtactttgtgggagccagttcacctcctttcctaaaattcagtgtgatcaccctgttaatggccacactagctctgaaattaatttccaaaatctttgtagtagttcatacccactcagagttataatggcaaacaaacagaaagcattagtacaagcccctcccaacacccttaatttgaatctgaacatgttaaaatttgagaataaagagacatttttcatctctttgtctggtttgtcccttgtgcttatgggactcctaatggcatttcagtctgttgctgaggccattatattttaatataaatgtagaaaaaagagagaaatcttagtaaagagtattttttagtattagcttgattattgactcttctatttaaatctgcttctgtaaattatgctgaaagtttgccttgagaactctatttttttattagagttatatttaaagcttttcatgggaaaagttaatgtgaatactgaggaattttggtccctcagtgacctgtgttgttaattcattaatgcattctgagttcacagagcaaattaggagaatcatttccaaccattatttactgcagtatggggagtaaatttataccaattcctctaactgtactgtaacacagcctgtaaagttagccatataaatgcaagggtatatcatatatacaaatcaggaatcaggtccgttcaccgaacttcaaattgatgtttactaatatttttgtgacagagtataaagaccctatagtgggtaaattagatactattagcatattattaatttaatgtctttatcattggatcttttgcatgctttaatctggttaacatatttaaatttgctttttttctctttacctgaaggctctgtgtatagtatttcatgacatcgttgtacagtttaactatatcaataaaaagtttggacagtatttaaatattgcaaatatgtttaattatacaaatcagaatagtatgggtaattaaatgaatacaaaaagaagagcctctttctgcagccgacttagacatgctcttccctttctataagctagattttagaataaagggtttcagttaataatcttattttcaggttatgtcatctaacttatagcaaactaccacaatacagtgagttctgccagtgtcccagtacaaggcatatttcaggtgtggctgtggaatgtaaaaatgctcaacttgtatcaggtaatgttagcaataaattaaatgctaagaatgattaatcgggtacatgttactgtaattaactcattgcacttcaaaacctaacttccatcctgaatttatcaagtagttcagtattgtcatttgtttttgttttattgaaaagtaatgttgtcttaagatttagaagtgattattagcttgagaactattacccagctctaagcaaataatgattgtatacatattaagataatggttaaatgcggttttaccaagttttcccttgaaaatgtaattcctttatggagatttattgtgcagccctaagcttccttcccatttcatgaatataaggcttctagaattggactggcaggggaaagaatggtagagacagaaattaagactttatccttgtttgcttgtaaactattattttcttgctaatgtaacatttgtctgttccagtgatgtaaggatattaagttattaagctaaatattaattttcaaaaatagtccttctttaacttagatatttcatagctggatttaggaagatctgttattctggaagtactaaaaagaataatacaacgtacaatgtctgcattcactaattcatgttccagaagaggaaataatgaagatatactcagtagagtactaggtgggaggatatggaaatttgctcataaaatctcttataaaacgtgcatataacaaaatgacacccagtaggcctgcattacatttacatgaccgtgtttatttgccatcaaataaactgagtactgacaccagacaaagactccaaagtcataaaatagcctatgaccaactgcagcaagacaggaggtcagctcgcctataatggtgcttaaagtgtgattgatgtaattttctgtactcaccatttgaagttagttaaggagaactttatttttttaaaaaaagtaaatggcaaccactagtgtgctcatcctgaactgttactccaaatccactccgtttttaaagcaaaattatcttgtgattttaagaaaagagttttctatttatttaagaaagtaacaatgcagtctgcaagctttcagtagttttctagtgctatattcatcctgtaaaactcttactacgtaaccagtaatcacaaggaaagtgtcccctttgcatatttctttaaaattctttctttggaaagtatgatgttgataattaacttacccttatctgccaaaaccagagcaaaatgctaaatacgttattgctaatcagtggtctcaaatcgatttgcctccctttgcctcgtctgagggctgtaagcctgaagatagtggcaagcaccaagtcagtttccaaaattgcccctcagctgctttaagtgactcagcaccctgcctcagcttcagcaggcgtaggctcaccctgggcggagcaaagtatgggccagggagaactacagctacgaagacctgctgtcgagttgagaaaaggggagaatttatggtctgaattttctaactgtcctctttcttgggtctaaagctcataatacacaaaggcttccagacctgagccacacccaggccctatcctgaacaggagactaaacagaggcaaatcaaccctaggaaatacttgcattctgccctacggttagtaccaggactgaggtcatttctactggaaaagattgtgagattgaacttatctgatcgcttgagactcctaataggcaggagtcaaggccactagaaaattgacagttaagagccaaaagtttttaaaatatgctactctgaaaaatctcgtgaaggctgtaggaaaagggagaatcttccatgttggtgtttttcctgtaaagatcagtttggggtatgatataagcaggtattaataaaaataacacaccaaagagttacgtaaaacatgttttattaattttggtccccacgtacagacattttatttctattttgaaatgagttatctattttcataaaagtaaaacactattaaagtgctgttttatgtgaaataacttgaatgttgttcctataaaaaatagatcataactcatgatatgtttgtaatcatggtaatttagatttttatgaggaatgagtatctggaaatattgtagcaatacttggtttaaaattttggacctgagacactgtggctgtctaatgtaatcctttaaaaattctctgcattgtcagtaaatgtagtatattattgtacagctactcataattttttaaagtttatgaagttatatttatcaaataaaaactttcctatataattaaaaaaaaaaaaaaaaaaaaaaaaaaaaacaaaaaaaaaaaaaaaaaaaa

SEQ ID NO: 3760 - DNA, 2300 bp, Homo Sapiens
  NM_014620
ttattgtggtttgtccgttccgagcgctccgcagaacagtcctccctgtaagagcctaaccattgccagggaaacctgccctgggcgctcccttcattagcagtattttttttaaattaatctgattaataattatttttcccccatttaattttttttcctcccaggtggagttgccgaagctgggggcagctggggagggtggggatgggaggggagagacagaagttgagggcatctctctcttccttcccgaccctctggcccccaaggggcaggaggaatgcaggagcaggagttgagcttgggagctgcagatgcctccgcccctcctctctcccaggctcttcctcctgcccccttcttgcaactctccttaattttgtttggcttttggatgattataattatttttatttttgaatttatataaagtatatgtgtgtgtgtgtggagctgagacaggctcggcagcggcacagaatgagggaagacgagaaagagagtgggagagagagaggcagagagggagagagggagagtgacagcagcgctcgcgggggctcaacccccagacctccagaaatgacgtcagaatcatttgcatcccgctgcctctacctgcctggtccagctgggaccctgcctcgccggccgcatggccagagggttggaaattaatgatcatgagctcgtatttgatggactctaactacatcgatccgaaatttcctccatgcgaagaatattcgcaaaatagctacatccctgaacacagtccggaatattacggccggaccagggaatcgggattccagcatcaccaccaggagctgtacccaccaccgcctccgcgccctagctaccctgagcgccagtatagctgcaccagtctccaggggcccggcaattcgcgaggccacgggccggcccaggcgggccaccaccaccccgagaaatcacagtcgctctgcgagccggcgcctctctcaggcgcctccgcctccccgtccccagccccgccagcctgcagccagccagcccccgaccatccctccagcgccgccagcaagcaacccatagtctacccatggatgaaaaaaattcacgttagcacggtgaaccccaattataacggaggggaacccaagcgctcgaggacagcctatacccggcagcaagtcctggaattagagaaagagtttcattacaaccgctacctgacccgaaggagaaggatcgagatcgcccactcgctgtgcctctctgagaggcagatcaaaatctggttccaaaaccgtcgcatgaaatggaagaaggaccaccgactccccaacaccaaagtcaggtcagcacccccggccggcgctgcgcccagcaccctttcggcagctaccccgggtacttctgaagaccactcccagagcgccacgccgccggagcagcaacgggcagaggacattaccaggttataaaacataactcacacccctgcccccaccccatgcccccaccctcccctcacacacaaattgactcttatttatagaatttaatatatatatatatatatatatatataggttcttttctctcttcctctcaccttgtcccttgtcagttccaaacagacaaaacagataaacaaacaagccccctgccctcctctccctcccactgttaaggacccttttaagcatgtgatgttgtcttagcatggtacctgctgggtgtttttttttaaaaggccattttggggggttatttattttttaagaaaaaaagctgcaaaaattatatattgcaaggtgtgatggtctggcttgggtgaatttcaggggaaatgaggaaaagaaaaaaggaaagaaattttaaagccaattctcatccttctcctcctcctccttccccccctctttccttaggccttttgcattgaaaatgcaccaggggaggttagtgagggggaagtcattttaaggagaacaaagctatgaagttcttttgtattattgttgggggggggtgtgggaggagagggggcgaagacagcagacaaagctaaatgcatctggagagcctctcagagctgttcagtttgaggagccaaaagaaaatcaaaatgaactttcagttcagagaggcagtctataggtagaatctctccccacccctatcgtggttattgtgtttttggactgaatttacttgattattgtaaaacttgcaataaagaattttagtgtcgatgtgaaatgccccgtgatcaataataaaccagtggatgtgaattagtttta

SEQ ID NO: 3761 - DNA, 683 bp, Homo Sapiens
  NM_014624
ctgcgcagatgaggggagactcgtcaccaggcgtgcagtgggcactgctgggctcccccatcccgtcctaacccggaacagccccgggcaggaggcgtggaaagtcgagggggtaaaccgcgaatgtgcgttgtgtaagccacggcgcagggtggggcgcgggcgggacttgggcgggcggggtgggcttggccgagctggcctccggggcaccgaccgctataaggccagtcggactgcgacacagcccatcccctcgaccgctcgcgtcgcatttggccgcctccctaccgctccaagcccagccctcagccatggcatgccccctggatcaggccattggcctcctcgtggccatcttccacaagtactccggcagggagggtgacaagcacaccctgagcaagaaggagctgaaggagctgatccagaaggagctcaccattggctcgaagctgcaggatgctgaaattgcaaggctgatggaagacttggaccggaacaaggaccaggaggtgaacttccaggagtatgtcaccttcctgggggccttggctttgatctacaatgaagccctcaagggctgaaaataaatagggaagatggagacaccctctgggggtcctctctgagtcaaatccagtggtgggtaattgtacaataaattttttttggtcaaattt

SEQ ID NO: 3762 - DNA, 5595 bp, Homo Sapiens
  NM_014629
cgggggacgcgggggacgcgggggacggcggggaacggcgggggacggcggggaacagcgggggacggcggggaacagcgggggacggcggggaacagcaggggactgcgggtcgcgtcctggccgccgaggagctccttcccttaacagagctgagagaggcatctggagctgcagcatggaccagcgagagcccctgcctcccgctcctgcagaaaatgaaatgaaatatgataccaataataatgaagaggaagagggagaacagttcgattttgacagtggagatgaaatcccagaagcggacagacaggccccatccgcccctgagacaggaggtgctggagccagtgaagcccctgcacccacaggaggtgaggatggagctggagcagaaaccaccccagtggcagagcctactaagctggtgctcccgatgaaagtcaacccatattctgtcatcgacatcacgccattccaggaggaccagccgcccacccccgtgcccagcgctgaggaggagaatgtgggtctccatgtgccctgcgggtacttggtgcctgtaccctgcggctatgcggtgccctccaacctgcccctcctgctgcccgcctactccagcccggtcatcatctgcgccacgtccctggacgaagaagaaacaccagaagtcacagaagatcgccagcccaattctctgagttccgaggagcctccaaccagtgaagatcaagtcggtcgagaggacagcgcacttgcccgctgggccgcagacccggccaacacagcctggatggagaatccagaggaagcaatttacgatgacgttccaagggaaaactcagactctgaaccagatgaaatgatttatgatgatgttgagaatggggatgaaggtggaaacagctccttggaatacggatggagttcgagtgaatttgaaagttacgaagagcagagtgactcggagtgcaagaatgggattcccaggtccttcctgcgcagcaaccacaaaaagcaactttctcatgacctaacccgtttaaaggagcactatgagaaaaagatgagagatttgatggcaagcacggtgggcgtggtggagattcagcagctcaggcagaagcatgaactgaagatgcagaagctcgtgaaggccgcgaaggacggcaccaaggacgggctggagaggaccagggcagccgtgaagaggggccgctccttcatcaggaccaagtctctcatcgcacaggatcacagatcttctcttgaggaagaacagaatttgttcattgatgttgactgcaagcacccggaagccatcttgaccccgatgcccgagggtttatctcagcagcaggttgtaagaagatatatactgggttcagttgtcgacagtgaaaagaactacgtagatgctcttaagaggattttggagcaatatgagaagccgctgtctgagatggagccaaaggttctgagtgagaggaagctgaagacggtgttctaccgagtcaaagagatcctgcagtgccactcgctatttcagatcgcgctggccagccgcgtttccgagtgggactccgtggaaatgataggcgatgtcttcgtggcttcgttttctaagtccatggtgctggatgcatacagtgaatatgtgaacaatttcagcacagccgtggcagtcctcaagaaaacatgtgccacaaagcccgcttttcttgaatttttaaagcaggaacaggaggccagccccgatcgaaccacgctctacagcctgatgatgaagcccatccagaggttcccacagttcatcctcctgctccaggacatgctgaagaacacctccaaaggccaccccgacaggctgcctcttcagatggccctgacagagctcgaaacactagcagagaagttaaatgaaagaaagagagatgctgatcaacgctgtgaagtgaagcaaatagccaaagccataaacgaaagatacctgaacaagcttctcagcagtggaagccgatacctcattcgatcagatgatatgatagaaacagtttacaacgacagaggagagattgttaaaaccaaagaacgccgagtcttcatgttaaatgatgtgttaatgtgtgccaccgtcagctcacgcccctctcatgacagccgtgtgatgagcagccagaggtacttgctgaagtggagcgttccactgggacatgtggacgccatcgagtatggcagcagcgcaggcacgggcgagcacagcaggcaccttgccgttcacccgccggagagcctggccgtggttgctaacgcgaaaccaaacaaagtttacatggggccaggacaactgtatcaagatttacaaaacttgttgcatgacttaaatgtaattggccaaatcactcagctgataggaaaccttaaaggaaactatcagaacttaaaccagtcagtagcccatgactggacatcaggtttacaaaggcttattttgaagaaagaagatgaaatcagagctgcggactgctgcagaattcagttacagcttcccgggaagcaggacaaatctgggcgaccgacgttctttacagctgtgttcaatacgttcacccctgccatcaaggagtcctgggtcaacagcttacagatggccaagctcgccctagaagaggagaaccacatgggctggttctgtgtggaagacgatgggaatcacattaaaaaggagaagcatcctctcctcgtcggacacatgcccgtgatggtggccaagcagcaggagttcaagattgaatgtgctgcttataaccctgaaccttacctaaataatgaaagccagccagattcattttccacggcacatggtttcctgtggatcggaagttgcacccatcaaatgggtcagattgccatcgtctcgtttcaaaattccactcccaaagtcattgagtgcttcaacgtggaatctcgcatcctgtgcatgctgtacgttcccgtcgaggagaagcgcagagagcctggggcacccccggaccccgagaccccggccgtgagagcttctgatgtccccacgatctgtgtagggacggaggagggaagcatttccatttataaaagcagtcaaggctccaagaaagtgagacttcagcactttttcactcctgagaagtccacagtcatgagcctggcttgcacgtctcagagcctgtacgctggcctggtcaacggggcagtcgccagctacgccagagccccagatggatcctgggattcagaacctcaaaaagtgatcaagttaggcgtcctaccagttagaagtctactcatgatggaagacacgttgtgggcggcttccggaggtcaagtcttcatcatcagtgtggagactcatgctgtagagggtcagctggaggcccaccaggaggaaggcatggtgatctcccacatggccgtgtccggcgtcgggatctggattgccttcacctcagggtccacgctccgcctttttcacacggaaactctcaagcacctgcaggacatcaacatcgccacccctgttcacaacatgctgccagggcaccagcggctgtcggtgacgagcctgctcgtctgccacggattgctgatggtcggcaccagcctgggagtcctcgtggccctgccggtcccacgtctgcaagggattcccaaagtgaccggaagaggcatggtctcctaccatgcacacaacagtcctgtcaaattcatcgtcctggccacggctctgcacgagaaagacaaggacaaatccagggacagcctggctcctggccccgagcctcaggacgaagaccagaaggacgcacttccgagtggaggagctggttcatctctgagccagggtgaccctgacgcagccatctggttgggagattcgctgggatcgatgactcagaaaagcgacctgtcctcctcatctgggtccctgagcttgtctcacggctccagctctctagagcacagatcagaggacagcaccatctatgatctcctgaaggatcctgtctcgctgagaagcaaagcacgccgggccaagaaagccaaggccagctcggcgctggtggtctgtggagggcagggccaccgccgggtgcacaggaaggcccggcagccccaccaggaagagctggcgccgaccgtcatggtctggcagatccctctgctgaatatataagcaggacggccgccttctgctgtcagaatttgcaatcaagggtgacttctcagctaatcctacagcctgagtggttaagctgtgtctacactggttgggaataaattaaaaacagtatttgggggagaaacgtgcaatagcgtaatggtggtgtccctgccaattccttccttctcttctgtacagcagaagtaattacaagcacttctcacgaaggcagaagactgatgcaattttcgagtaattgagtgcagttctgggaaaataccacattctttttgactgctgtagtccatatatgaatactaaatgttaaacttcatcagcgtcagacctattgtatcatattagagaatttgcagactaagaatttatgagaaaatatatgtattcagtagtgcaggcatttattaacaattcttaaaagttttacctgattcagattcacgacttttatttatattctatatttttgaatttcagagtaaaatttgttaacaattttaaaagccaggtaacacctaccagtccagttagcatgatttgctttcagaagtgagctgggttttccaaagtggtataatgtgtgtactgtatattttaacaaagtaatatttttgtattgcatttttctattaaaaaattaacagttaatgtttcagtcaatgtattatctgtagcatttcacaaataatgtttgctttgaaccaaaatgctcagtgcctatcaacatttggactcaagcatcaacaccaaattattcctcccttctcgtataaatagagtgactatccacaggagaaaagtgtgtgctttagtattagaggagataggcagagaagtcttgcttagttccttcgtgcagcttcttgcccctgttgacgtggaatgctgtgtctgctttagcacgcacgctccgaatgactcctggtgctaggccatgctggctgctgtcactgagcgggactcaggccaagaggcgtgacctcgggccagcctgtctgttgtgcagacgcctcctctgcagaacgcatcagtttctattctgcagttgcagagccagccccgcgtgagaacgtgcataatgagtgcacaccatcatgtcaaggtgcatacttagtgagcgccatcctgctgaacgtgtatttcagtgtttcacttactggacggataacaagaaaaaaatcctaacacaggcaggcaccagaaataaatgtctcagcactttacagatgactaaaaatgttaattttatgacttagccaaatatgttctaggttgcatatatcccccatgtgaaagtgatttcttcccaagcttctcaaactgttagctgctgtctgacttcatcaataaagtatttttattttaaaatgcaaaaa

SEQ ID NO: 3763 - DNA, 8191 bp, Homo Sapiens
  NM_014630
atgttgtggctcccgcagccggcgctggggacgcgcgcggccgagactctggcctgcagtcgccgccgccgccgccaggtggtgtttggactctagaccatgtgcctaggtagaagtttttcctttctccgcagctctgctcccctagcaacgctcgccacacccttgttttgagatcctctctaaggagcggagagtttaataggcaagaaggaagggagaagacagaaggaagacgctcccccgtacggagacagagggagggggggctccaaagccgaaagaggaggtccctacctgccacggataccagtcagcccttgccagcatccagccatgggggatatgaaaaccccagattttgatgaccttctggctgcctttgacatcccagaccccaccagccttgatgccaaggaggccatccagacacccagtgaggagaatgagagtcccctcaaacctccaggcatatgtatggatgaaagtgtgtccttgtctcactcaggatcagcccccgatgtgccggccgtgagtgtcattgtcaagaacaccagccgccaggagtcatttgaagcggagaaagaccacattactcccagtctcctacacaatggattccggggctcagatctgcctccagatccccacaactgtgggaaatttgattctacttttatgaatggagacagtgccaggagtttccctggcaaactggagcctcccaagtcagagccattacccaccttcaaccagttcagtccaatctccagcccagaacctgaggatcccatcaaagataacggatttgggataaagcccaaacactctgacagttatttcccaccccctcttgggtgcggggctgtgggaggcccagtcctggaggctctggctaagtttccggttccagagctgcatatgtttgatcatttttgtaagaaagaacccaagccagaacccctgcccttggggagccagcaggaacacgagcaaagtgggcagaacacagtggaacctcacaaggatccggatgccactcgattcttcggggaagctttggagttcaacagccatcctagcaacagtattggagagtccaaggggcttgcccgggagcttggtacctgctcatcagtcccccctaggcagcgtctaaagccagctcattccaagctgtcctcttgtgtggcagccttggtggccttgcaggccaaaagagtggctagtgtcactaaggaggatcagcctggccacacaaaggatctctcagggcccactaaagagagttctaaaggtagccccaaaatgcccaagtcaccaaagagtccccggagccctctggaggccactagaaaaagtatcaagccatcggacagccctcgtagcatctgcagtgacagcagcagcaaaggctcaccgtctgtggctgccagctccccaccagcaattcccaaagtgagaatcaaaaccattaagacatcatcaggggaaatcaaacggactgtcacaaggatcctgccagatcctgatgatccaagtaagtcccctgttgggtcacctctagggagcgccattgcagaggcccccagcgagatgccaggggatgaggtgcctgtggaagagcactttcctgaggcaggcacaaattcagggagcccccagggggccaggaaaggggacgagagcatgacaaaggccagtgactcgtcatctcccagctgcagttctgggccccgggtcccaaagggggctgccccaggctcacagacaggcaagaagcaacagagcacagcactgcaggcatccaccctggcccctgccaacctcctgcccaaagccgtgcacttggccaacctgaacctcgtcccccacagtgttgctgcatcagtgacagccaagtcttcagtgcaaagacggagccagccacagcttacacaaatgtcggtgcccctggtccaccaggtgaaaaaggctgccccactgattgtagaggtcttcaacaaggtccttcacagctccaaccccgtgcccctctatgcgccaaatctcagcccgcctgcggacagcaggatccacgtgccggccagtgggtactgctgcctggagtgtggagacgcatttgccttagagaagagcctgagccagcactatggccggcggagcgtccacattgaggtactgtgcacactgtgctccaagacgctgctcttcttcaacaagtgcagcctgctccggcacgcccgtgaccacaagagcaaggggctcgtcatgcagtgttcccagctgctggtgaagcctatctctgcggaccaaatgttcgtgtcggcccctgtgaactccacggcaccagcagccccagccccttcatcctctcccaaacatggcctcacttcgggcagtgccagtccccctcctccagccttgccactctacccagaccctgtgaggctcatccggtactcaatcaagtgtcttgaatgtcacaagcagatgcgggactacatggtcctggctgcacatttccagaggacaacagaggagacagaggggctgacctgccaggtatgccaaatgctgctgcccaaccagtgcagtttctgtgcccaccagcggattcatgcacacaagtccccctactgctgcccggagtgtggggtcctctgccgctctgcctacttccagacccatgtaaaggagaattgcctgcactatgcccgcaaggtgggctacaggtgcatccactgtggtgtcgtccacctgaccttggccttgctgaaaagccacatccaggagcgacactgccaggttttccacaaatgtgcattctgccccatggccttcaagactgccagcagcactgcagaccacagtgccacccagcaccccacccagccccacagaccctcccagctcatttataagtgctcctgtgaaatggtcttcaacaagaagaggcacattcagcagcatttttaccagaatgtcagcaagacgcaggtgggcgtcttcaagtgccctgagtgcccactcttgttcgtgcagaagccggagttgatgcaacacgtcaagagcacccacggtgttccccgaaatgtggacgagctgtcaagcctccagtcttcagcggacacatcctcaagccgccctggctctcgagttcccactgagccaccagccactagtgtggctgctcggagcagctccctgccttctggccgctggggtaggcctgaagcccaccgcagggtggaagccaggccgcggctgaggaacactggctggacctgccaggagtgccaggagtgggttccagatcgggagagctacgtgtcccacatgaaaaagagccacggtcggacattgaagcggtacccatgccggcagtgtgaacagtccttccacacccccaacagcctgcgcaaacacatccgcaacaaccatgacacagtaaagaagttctacacctgcgggtactgcacagaggacagccccagctttcctcggccctcccttctggagagccacatcagccttatgcatggcatcagaaaccctgatttgagccagacgtccaaagtgaaacctccgggtggacattcccctcaggtgaaccatctgaaaagaccagtcagtggagtgggggacgctccaggcaccagcaatggcgcaactgtctcttccaccaaaaggcacaagtccctttttcagtgcgcgaaatgtagttttgccacagactcggggctcgagtttcagagccacatacctcagcaccaggtggacagctccacagcccaatgtctcctctgtggtttgtgctacacctctgccagctccctcagccgccacctcttcattgtccacaaggtgagagaccaggaggaggaggaggaagaggaggcggcggcagcggagatggcagtggaggtggcagagccagaggagggctccggggaggaggtgcccatggagactagagagaatggactggaagaatgtgccggtgagcctttgtcagctgacccagaggcgaggagattgctgggcccggcccctgaggacgatggtggccacaatgatcacagtcaaccacaggcctctcaggaccaggacagccacacactgtcccctcaggtgtgaccggagactttgcagtgtgcatggtcaggggtggtgccgaagtgtcttccacctgccctgcggaccgtggaaaataaaaggctctgcccccagtgtgagtgtgaccggttgtaccctggagtagtgtctgccctgagctgccagtgctgggtatcccccagccccaggaaatgtggggtcggccaggaccctcacagctctgaatttgcttctgttatttatggcttttcgctgcttcttggtgccccatctcttgtctgtgtccttccaaccccaagctgcttatgtggcccaaccccactgctgtcaactaggcttgaaccccacagcggctgtgctcttctgggaggttcccgcttgctgccttcagccagggcgctcctcagagctctattttcctgcagacaccagctctccttcctgcctttagatcctgagaaggagggaaatgaggggtgctgacacagtccctctgggagagctctgcctagtctggtttggcgagggcccttgatcaccttgcccctcctccctgtcttctctgattcttttccctcaaaatagtcctgagaactaattgtcacactggctcatcatgtctctgtgggtggggtgggagaaacctctgctgcacacctctgtttggaacctgggcagagcaggaggtaaggcaaaggcaggcaggcaccaagaaccagaccccttgagaaggcgctgtgggtgggtctttgttctgctgttctgcctttcctgacaggtggggttggggcacacagacattggaatatttgtactgctctcgtgccatttgagaggctgctgccccaggcaggccagcccctactcctcttggctacactcatgttgctcagactatatttcaaataaaaaatcttctcaccatgcaggtaggctcttgtattcctctccaagtgagcctggccccaccctattccacccaagggtctttcccagacttcccctgtttgtcccatctctgagggagaacaatacttcctactgtctaaggaaggccttctctagattctggagcttgtggttaggaaaccgggagccctgtactacttagttctctagagaccttctgaaggggtgaggggagcggctccacaatggtcaagtcacctccaagatctccaggctagtgacattggctttagggcgtatcgaaattttctaggcaccttcatctttccttcagttgattttcaacataagagaaccccttactggtaaaaagggaaaagggggtggagaagaggaattttataattttcttatagcattcaagaggtttcttatttcttacagcatcgctactgccacagagaactcaaatgtggcagaactgggattagacttgggagactggctgtcttttcactgatggtggagtcagggcccacccaagcacgaggagcaggctgtgtggaggtgtcgtctgacctctaacccaggtggcatggggttgcgcccagcaggatgtagtggagtaaagggaagagggtgctggccgggtgcttagaggtcatctttcaaggaggcattaaatatcaattataaattattaagtcagataaatatgcctgaccttttcacagttgaaaaaatacattttttcccctctatcaaatgccaagtttttagtggaaatgctaatggcagtgggaaaggttgcctcactttcagagagactctcgctgtctgcacccttttaataattgctcttcctggcaaggctgccacttccctgcctccccagctggcagtggggcaacccaggcctgtttccagctacctgcaaagccagacctagacctgccgtagctgttgtcccatgcctaattctagttacaggaagccatccctgtaccctgggtccattcacaggaatgggttccagaggaggctgatagaagggtttgaaatgactggctggatcccttcctgctcagacacagtggtagctggagagcaggcagagatggtagaattgcaggtttgaccacctgtcgtgaccccagatatacatctccttcctgggaagaacgtgagttggaaaaatgctgagccagtccctggaaaacctgggtcctggcctggattctgtccttagccagctcttaacaaatcccttaacctcactgtctcctctccttcacaatagagttagtaattcccatccaactggcttcacaggcttttgtgagcttatgaatgtgaaagtattttctagtttataaaacactatatgaatgtggggaaatctttacttgaccttagggcatggagggtggagcacattttgtctgctgtttggacttggatgctgattagcagttatgaagtggcccagacacctagccattctttagtaagagtgaagatagcattttaagccctccttgtgtgcctagcatcttactgaacactttctggtgattctctcctttaatcctcacaaagatctcacagttgtcctccattttacggagaagaaaccgaggctccgagaggttaaacgatgtgcagaggctacctgtagtgatggtgctgagtcaagcctgtcaaccactgtgctcgttagtgaccaaggctgctttgacaggctgccagcttgtcagtggtttgcagccccccagacatttgctttcctacttcccatgcagttggggtgccctgccaagtgccaggttctctttggagtccatctgtgccttgtcaccccaaggagggcctcgagcatcacaccgttgacatttcgaaacgtggtatctctacaacctttcattctcattgggatttaccttgccatttgaacaccatcattttttgaggactgtctagaaaaggttgcctaaccctcacagggaacacacagttccctcagagtccagcatcttctggtcttttctttttcaagatttttttaaatggttgtgctatcatttgtcatcatcagaaaatgcttgctgtaacaagcgtttatctgcacattatgctgcagtgaatgctctactgatcaagttaaacagataagatcccttcccttgtagaaactacaacttaatacagtctaagacttgacaaattacttagtatttattttccaactgctttatctctgtaaaatgatatgctgaattattataagctaattgttgtagaaagaactttccccttaacttatgtaaacagtctggttttaaaaaatttgataattgtggcccagtaagctcaacactttgccttccccaagactggggaacctctgtcctgttcaccactgtatattcagcaccaggcagtttctttttttgtttgtttgtttttttgttttgaaaaattaatacatatacatggtaagacattccacaatacaaaagggtatacaataaatggtaagcttccccatggaggtcagcctctagtcccctctccagagttaatcactgttatctatatgttgtgtatcctttcatagcaattctatgcatttacaagtttataaatatgtatatttatatatctatttttaatacaaatagtagaattctatacacagtgttctgaagcttgctttcttatatagtattttggagattattccaaattcatacattgggtcagagtaattctttaaaagttccttgcatataacagtgattcaaaaagtatatggatgaatgagtgaatgctgcatgaatgaatgaatctgattcaattggtagctacagctgttctctcagggtctgatctgaccaagacagcaccttctagattctagaatgtgtcctcctgactaaggggttcaggatactgttcaccttctccaacagatgccaccggagccttaggaactgggcacaggaagccttgggcccctggaggaaaaagttgagactaggacgcaggtcccaagtatgggatttttttgggttcctacttaaaatgcttttttctttattggaaaatgatgtaacattttagagaaattaaaaagcacacatatttataaaaaaaaaaaaaa

SEQ ID NO: 3764 - DNA, 11264 bp, Homo Sapiens
  NM_014631
ccgggagtccgggcagcgttcggcgcgccgggccggggtggcgggcggccccgggaccccggcagctggagaaggagccggagcccggccgggatgagaaggtgacgccgccgggggcgccactcgctttgtgggggaagatgctcgcctactgcgtgcaggatgccaccgtggtggacgtggagaagcggaggaacccctccaagcactacgtatacataatcaatgtgacctggtctgactccacctcccagactatctaccggaggtacagcaagttctttgacctgcagatgcagcttttggataagtttcccattgaaggtggccagaaggaccccaagcaaaggatcatccccttcctcccaggcaagatcctcttccgcagaagccacatccgggacgtagctgtgaagagactgaagcccatcgatgaatactgccgggcacttgtccggctgcccccccacatctcacagtgtgacgaagtcttccggttcttcgaggctcgacccgaggatgtcaaccctccaaaagaggactatggcagttccaagaggaaatcagtgtggctgtccagctgggctgagtcgcccaagaaggacgtgacaggtgccgacgccaccgccgagcccatgatcctggaacagtacgtggtggtgtccaactataagaagcaggagaactcggagctgagcctccaggccggggaggtggtggatgtcatcgagaagaacgagagcggctggtggttcgtgagcacttctgaggagcagggctgggtccctgccacctacctggaggcccagaatggtactcgggatgactccgacatcaacacctctaagactggagaagaggagaagtatgtcaccgtgcagccttacaccagccaaagcaaggacgagattggctttgagaagggcgtcacagtggaggtgatccggaagaatctggaaggctggtggtatatcagatacctgggcaaagagggctgggcgccagcatcctacctgaagaaggccaaggatgacctgccaacccggaagaagaacctggccggcccagtggagatcattgggaacatcatggagatcagcaacctgctgaacaagaaggcgtctggggacaaggaaactccaccagccgaaggcgagggccatgaggcccccattgccaagaaggagatcagcctgcccatcctctgcaatgcctccaatggcagtgccgtgggcgttcctgacaggactgtctccaggctggcccagggctctccagctgtggccaggattgcccctcagcgggcccagatcagctccccgaacctacggacaagacctccaccacgcagagaatccagcctggggttccaactgccaaagccaccagagcccccttctgttgaggtggagtactacaccattgccgaattccagtcgtgcatttccgatggcatcagctttcggggtggacagaaggcagaggtcattgataagaactcaggtggctggtggtacgtgcagatcggtgagaaggagggctgggcccccgcatcatacatcgataagcgcaagaagcccaacctgagccgccgcacaagcacgctgacccggcccaaggtgcccccgccagcaccccccagcaagcccaaggaggccgaggagggccctacgggggccagtgagagccaggactccccgcggaagctcaagtatgaggagcctgagtatgacatccctgcattcggctttgactcagagcctgagctgagcgaggagcccgtggaggacagagcctcaggggagaggcggcctgcccagccccaccggccctcgccggcctcttctctgcagcgggcccgcttcaaggtgggtgagtcttcagaggatgtggccctggaagaggagaccatctatgagaatgagggcttccggccatatgcagaggacaccctgtcagccagaggctcctccggggacagcgactccccaggcagctcctcgctgtccctgaccaggaaaaactcccccaaatcaggctcccccaagtcatcatcactcctaaagctcaaggcagagaagaatgcccaggcagaaatggggaagaaccactcctcagcctccttttcctcatccatcaccatcaacaccacttgctgctcctcctcttcctcctcctcctcttccttgtccaaaaccagtggcgacctgaagccccgctctgcttcggacgcaggcatccgcggcactcccaaggtcagggcaaagaaggatgctgatgcgaacgctgggctgacctcctgtccccgggccaagccatcggtccggcccaagccattcctaaaccgagcagagtcgcagagccaagagaagatggacatcagcactttacggcgccagctgagacccacaggccagctccgtggagggctcaagggctccaagagtgaggattcggagctgcccccgcagacggcctccgaggctcccagtgaggggtctaggagaagctcatccgacctcatcaccctcccagccaccactcccccatgtcccaccaagaaggaatgggaagggccagccacctcgtacatgacatgcagcgcctaccagaaggtccaggactcggagatcagcttccccgcgggcgtggaggtgcaggtgctggagaagcaggagagcgggtggtggtatgtgaggtttggggagctggagggctgggccccttcccactatttggtgctggatgagaacgagcaacctgacccctctggcaaagagctggacacagtgcccgccaagggcaggcagaacgaaggcaaatcagacagcctggagaagatcgagaggcgcgtccaagcactgaacaccgtcaaccagagcaagaaggccacgccccccatcccctccaaacctcccgggggcttcggcaagacctcaggcactccagcggtgaagatgaggaacggagtgcggcaggtggcggtcaggccccagtcggtgtttgtgtccccgccacccaaggacaacaacctgtcctgcgccctgcggaggaatgagtcactcacggccactgatggcctccgaggcgtccgacggaactcctcctttagcactgctcgctccgctgccgccgaggccaagggccgcctggccgaacgggctgccagccagggttcagactcacccctactgcccgcccagcgcaacagcatacccgtgtcccctgtgcgccccaagcccatcgagaagtctcagttcatccacaataacctcaaagatgtgtacgtctctatcgcagactacgagggggatgaggagacagcaggcttccaggagggggtgtccatggaggttctggagaggaaccctaatggctggtggtactgccagatcctggatggtgtgaagcccttcaaaggctgggtgccttccaactaccttgagaaaaagaactagcagagggcctgggctcttccagcctcagtgtgcctctctggccgcccactggatgagcggtgagacgaacaaaagggaaaggaaaaaatgggggtggggggtggggggtggacaacattcaacactgcagaatgggtgacctcaaagatgccccctgtccaagccatcccacagctggaaggtaggggatgggggtgcccacactgagtgaggaagggaatggaccagggagtcccaggcctgggacccagagccaagaaagctgagatatcctgtgcaccatagggacttcaccaatggattacatgccatctgggacaggccatgtgggagaccccagttgtgcctttgctacagatctggaaaagacaaggtcatgggggcctccagtgtcctgcccctgcttggcccagttttgattgctggcatcttgccaccccaggtatccctggtattgtcctaagctgtatttgtgaattgtgctggtttcctgggcattgccacgcctaccacaggtgggtacattagaagccaccactggctttcaggcttgggggtgtcttctgagctcaagcctgcttctgggccaggccattgtcactgttagttgaagaaaaagcagttcccaggtgccagcaaagaccatctttcataactgtcactgtcttggccttgagaagagagcccgctctccgtggggcaccccatggaggacacagtaccagagtttacagagagggtgggcgaagccaccggtctcttcctaatctgcacagactattttgggtatttctgggcgggcagttcctttgcatgtttcgggagaggtttgttgatttggggcttatatgtcaggcctttggtttgcgtcttattttaggggttgtttgggggcctgggtggtcggcctcacatgggaaggggatgggtagtggatggggtttctgttgtatcttgtgggcgggtgattttgcttttgtttttgtttcacattcttccccctccacaagccaaagtcgtttcatttggtttccactgtgtggactgtgctggagcttggcgcctgccagaaaaatttggggctaggcaagccccaggttgcagacatggtgaagcagagaaactgttcttctggttcctgcacaacctcagaggggcaaaaaccctccccaggaaggaggagggtgttcaggagccagacttttggagagaaggcagctcccagcctgctgggtgaccgccattctgcgtgtgttccccagctgggcagggctggaagccttacgtatgaagcatggagaagcagccattgtccccactatgggcagaggggggacccggctggccccttgggtcagactggagccaacaccgccagccaccccctctggcctgctggcaatgccacaggtgcccaagaagatggaggatccctgtgccaggagccaacctggtcttcccgagggtcagtgccccagtgaagacagaagcgagagaataaagttccctgtaggtcctctgtcacctttgggttgtgtttttcaattgttgacatttcagaggggaccctccagaagcccagccggcttcccccaaggactcccccttcgctgggagtggatttccacacgtgcctttgatttcggacagattgggcctcacagccaccgattcagctgccagggtccctggactgggggttggtgttttctatagaggaggaaaggccctccctcaccctgctccccacccaggcagggcagcatgggacccagtgtctcagtgccttcaaaacccacccccacccctaccctaccccaccacaccccatcccagaggccttgcctgggcaaccctaagcccctgtccctcgccatacactgatgcctggcagctagagcaaatggctcgtgttctttgtcgaaggcctgtggtgagattgttttgtttccttttgttttgtgagtttgtttaaaattgaaattagttattttcttctgctggacagtattaaatagagcaggatgttgagttaatctgctagattgcagtactaatggtagtggtttagtgtcttcatgttaatattatttgtacttatttgaacaataatgataaagaagtggttcattattttttaattaatgcactttaaataaggtagaatggaaaaaacccagagagcaaagtgcattacttaaagatgcagtatatacttttctcatttttaaacagcacatatttattaagagaaaaaaagtaatttatgactatttaaaataaaatttaaaagtagagtgactgtcaggtaaagaaccttcaatgtagctatcttccagggggagggccctgcagcctcgctcctcagatgtctgcactgagccagttcagtcactagtgcgccagccaggccaggagggagtgcagagcatgtctgccaagcacagagcatctcagttggactggaccacagtgctcccgagagcctgcctttcctgcccttccccaccacctgcactgccccccacattctcccagccccccccaaggaccccctctccttgacccccagtgctgtaagtaatagagtcattaaaatgcaggactgaaagagacctcagaggtctctatcccatcccttcctgttactgcggcccaaggacaggaaacaacttttccaaaatcccacagctagttaatgacagatctccccactacattaatcccgtgctcctcctcactgccattatagtttattgtgtggtcatgtttacattgtgacatccagccccaaggatggctgggagttgctcaggcatccaggaaaagtggggaatgctgccatctggtgacagcatgtagatttgggcagtgaacagggattgccatgccccagtcttcgcacctcgccccctcaccccctaactcacagcacaaaccctgcaaacccaaagagaatattaatacttgaagcaagaagggtgcatgccagtccttctccgacatggccagggggtaccaggccttgtgcgcctggcctcctagccctagccagggcgagagggcctttcccttgagctactgagctgctttgtgatgctgaaggatactgccggcagcaggcagaggagggagggggcctagggctctgacccatctggaggaaaaccagatcggactaaaaaaggaaaaagaaaaacaaaatctccgcagtgtccaaacctagtttcccatgagttgcgactgaaaatgtgaaacgacactgtattgctgtatactgcaactttaaccataatgagcccttctgaggtcattattgaggttcatataatgcccgaagatgcagcatttggtgctttgttttcctttccgtttcaagacctttttcttttattgcaaggggaaaaaaatgtcatctccccccacctcatccctctttgtgacagcagacctggctgtgttgcccctctcctcctcactattctcaccaggccatgggactttgggggcagtgagagagagctggaaaggggcaaccctgagcagcaggtgtgccccatgccctgtgggtttcccctatgtccaatgactgtagacgggctgtcttgccaggcctcagccccgtctaccctaagcctggccccaaaggtttctctttcttcctccttgattttccatcttgacgaaggcattatatagaatcattttaatcactttcagatgttagagcagcgtattttacaggcatttatatccattgctttcctcagcaaggcatgttactacttttatcatctaaggaaaaaagacaagggaattccagtcaggcattattttcctattactagtgtttgcagaataggtgtaggactatttaagtttagaccttggtttggtagttcttgtttttaataaggggaaaaagataaaataacccctatttttcctgttattgtatttaactaatatattatttctttaaggttactcacttcccctacccctccaaataccttgcattctcaatcaaaaatggaaacaatctgagagacaggaaaagtgcaatattaccaagatggatgccagggctcattggggacaatggagggaataccagtggcgctcagagagcaagaggcagggagcggggtgctgaaggaatcctagctgtggaacaggtgggtgggttggtggagtttgatcttgtggcgttctcctctcccccttctttgggaagatgataggggtccctgccagatccacccagaagaaagggattcaggcatggggcccttgacctctaggccccagtccctggagcagaggcaggccctcgggagctgttccttgttttgatttctgttgtggtgcagccagctgctcagagagacctggcctaaaaatgactcccagcagccctctctcaccccagtgtcctgatatttgggctgtgatccttctggtgtatgtttgaatctttctaaaactgggtgccctcagttcagtttctaggcaggaagcctagaagtcaccagatctttttgggggatgtgagaaccttgagccgcgcacaccctggtgagacaccaattcccacaagcctgcagcagggcctggggctgagcctgggctgcccattcatctcagcgacttcagcctgagaagtgagccctgcctgggctccacacccagagagtccatacaaattctgctccgggaagagtcggggggtctattcaagtttctctgcagacaaaacttcccacaacaggtaccaatctggcctccttcctcagcaccggtagagaaagcaacagaatgggaagtttcctctgggttggagcctcagagctctgcccctcaaggtgacagggacgtccctgtggcttgttccctccacctccagtactgtatgcttgctacttcaaccccctatttggtgaatttctgcacagacacagatctctgtgcctggaatgggactgtgccctgtgcgggtctctcccttggcgtatatccatctagatatttagtctttgagaatctcaaagcagagctctctgggaagagaactgtccacattgctaaataattaagattccctcacttttttgagggccatgtgttgtgagagagagagagagagagagagtgtgtgtgtgtgtgtgtgtgtgtgtgtgtctgtgtatgcaagtgttggtaacttcccacttgaactaaataacatggggttagagaaaaaaaaataccaggcaagctgtctccattgaacaagtccttggcaatgggcaggtcccaagggactcacagcttctggcagcaagtgtgtcattcacacacatcattctggctggagagtgcaatgtgtcatttttttttctttttgtaattattttattaagtatttagttggaaatttcacactggcattaacaggtctagcataagtggcctaggcagtcatcccaggctccaaaatgaagatgtgcaaaagagatgccactgggaatagaaacactgagttggttcagttaggtcatcccctgcagacgtgtcatcgagcaggctgactcccacccctcagccatgccatgggtatgagaagccccttataatgaaagctgccagccctttcgtccttgtttcagagggtgggtcaggtggttggggtgagaacttgctcacggtgcacccaacaagacctgcaggtgcatataagtttagtcccaactgcagggccagaccaaacacttcctgggaagtgtgtggagggctgtgctagaccttcctgagtttctggctaaatcatcagccctgtttggtgcagtctcatgtctctgtggttcccaagctgcatgatcagagccagtgagaagacaggatcagtgacccacagctttggggaaaaacagccccactgttaacttccctcctgcaaacctgggtccccaggccataaggtgggcacactggtgcttacagactgggtggagagccctaccttccaaggtcttgatcccagcctgcctataaggttgggattagcatgcaatcccccttccccaatcctgtctttttaaaatctcaagtttgcacttaaccttgacaacagcaccctctcctactccagtcctagaactcagtggccttagagaatggggtcccctgcactgaaggtccccgccttgctcccagttccatcctggccaataggctgcgcctcaagaggtgaaagagaaaaaagggagggagggaggaagaattatttagaacaaaaggatggctcgagcacgttagaggcaagtgagaggcacgttggtgagaagagcatgtgcatgtttggggtagctggggcctactgtcccttcattagggaaggaggcttccagaagcggatgtcttctagaaagaaaaattgtgtgaaggctgaaaaggggcttggagttttgtctttgttgattagaaagaaggaagaagtcagctctgagtgtttcaggaagaagagagcaggtagaaagggaatttagtgatttaacacccaagggtccagccatagcaggttggaaaatcctccaaatttggccacagaaactggctaggaaaaaactgccactcattgggccacacgctgggtccccatcagttctcaatgaatggtcattgatttacttagcagagagaagtcaccagccacaaaccaatctttgagtttgcaggccctgattccagaatatatgcatccagctcccgggttctcagctggttttgcccacttccctttgactgtccaatccaaagccagtctctcaagttgtatggctcaaagagcagtgaccacaatgggtcatacagtagggacccacctccacaaattagaaccagagttcagactccattgggcacatctgggaggaaggcaacctcctttgtcgtcttgttggtaccagtcattctcaagtatctctgacacctgtggtggttcagtttgctgagcctgccacctggtatgaattagactgggtgtgatgaacattcatccatggatataccctaccattttgcgttgccttataaccaaggcacactccccataagagtttactgcagagaaagaacagcaaaacagccaccctccttgaatttacaactcattatctgcaacaggttttctttaaatccaagacacaggatgggaaatgggtttccccaccaggtactcagaggtctgcaggaagtgactcccgggcaaggcagacttcagtaatccctgaagcgtgagcatgtggactgcatggctgggtggggactggtggatgtctctggagctccagaaccttggagaattcctcatggaattcccctcccagctcttagtgggctctgtggggtcaggaggagcccttcctccaggttttccttctttcctcctcagcagagaaactggagaaaggacattaaactcagtgcagtcgatttgagtgctgaaatatttccagaatcaatggtggtgctaaactatctccatgtttctagcatttttaatagtggagttggtttgtttttaatctcatcacaaaaatgcagtgcccttggggaagggaccagccccttggcctgccactttccaggtgtcctttatcactttgacgggactctttggtctgcagaaaatgctctgtcttggcatgcttctagactgtaagatttgggttttgttttgtattttatgtttacatgcatcttatatttccctgaaaactaaataaagttttgggcctttttaaccgaaaaaaaaaaaaaaaaaaa

SEQ ID NO: 3765 - DNA, 5199 bp, Homo Sapiens
  NM_014634
agggacgggaagtgggcggggccggccggcagcagcttgcgggacacggagccgcgaggagacagctgaggcccgcggagaccagggggtgaagcctggagaccctcttgccctggcctagctgcaggcccccgggatgctttgggcatgtcctctggagccccacagaagagcagcccaatggccagtggagctgaggagaccccaggcttcctggacacgctcctgcaagacttcccagccctgctgaacccagaggaccctctgccatggaaggccccagggacggtgctcagccaggaggaggtggagggcgagctggctgagctggccatgggctttctgggcagcaggaaggccccgccaccacttgctgctgctctggcccacgaagcagtttcacagctgctacagacagacctttccgaattcaggaagttgcccagggaggaagaagaagaggaggaggacgatgacgaggaggaaaaggcccctgtgaccttgctggatgcccaaagcctggcacagagtttctttaaccgcctttgggaagtcgccggccagtggcagaagcaggtgccattggctgcccgggcctcacagcggcagtggctggtctccatccacgccatccggaacactcgccgcaagatggaggaccggcacgtgtccctcccttccttcaaccagctcttcggcttgtctgaccctgtgaaccgcgcctactttgctgtgtttgatggtcacggaggcgtggatgctgcgaggtacgccgctgtccacgtgcacaccaacgctgcccgccagccagagctgcccacagaccctgagggagccctcagagaagccttccggcgcaccgaccagatgtttctcaggaaagccaagcgagagcggctgcagagcggcaccacaggtgtgtgtgcgctcattgcaggagcgaccctgcacgtcgcctggctcggggattcccaggtcattttggtacagcagggacaggtggtgaagctgatggagccacacagaccagaacggcaggatgagaaggcgcgcattgaagcattgggtggctttgtgtctcacatggactgctggagagtcaacgggaccctggccgtctccagagccatcggggatgtcttccagaagccctacgtgtctggggaggccgatgcagcttcccgggcgctgacgggctccgaggactacctgctgcttgcctgtgatggcttctttgacgtcgtaccccaccaggaagttgttggcctggtccagagccacctgaccaggcagcagggcagcgggctccgtgtcgccgaggagctggtggctgcggcccgggagcggggctcccacgacaacatcacggtcatggtggtcttcctcagggacccccaagagctgctggagggcgggaaccagggagaaggggacccccaggcagaagggaggaggcaggacttgccctccagccttccagaacctgagacccaggctccaccaagaagctaggtggtttccaggcccctgccctccccttcctcccatccttgtccttctctccctcagaagcctcaggacccaacaggtggcaggcagtggacagggtgcccgccccacagtgctttccccagcaccccagagccagtcgggacaccccccgcagcccgtcctggtggctgtggaactgcactgggtggcgggcagatggtggaaggcagcttaggagacctcaccaaagagaagatggaccggctcttgctcccagctcctattaggcccggggtgggaccagaggtcataggtgcccaacggcagccaaaccaaagacactggtgtgcatggggcagcatggttgtgcacgtgggaccctggggcggacccaggagccaaactcttgaagcaccccctgggtcaggcccagcagcggagtggccagccccagtttcccattgctcctctctgcggccagggccaggtgggttcatatttacagatatgcccagccagtcctggtcggccacaccagtgtcccaaagaggagagcgcagcagagccaggggtctgttctgtagcagccacccccctgcccccactccagggcagccatgatgtgcttgggcccaccagggccttccgggctgctctcttccctgagcccggaaccggcgacgcacatgtgtcttttgttggtgtgtttgtttttttccagggaggtctaattccgaagcagtattccaggttttctctttgttttatcagtgccaagatgacctgttgtgtcatataatttaagcagagcttagcatttattttattctttagaaaacttaagtatttacttttttaaagctatttttcaaggaacctttttttgcagtattattgaatttattttctaaatcaggattgaaacaggaacttttccaggtggtgttaataagccattcaagtgccttacacagctttgaagaaactaggactgcagtgggctcggataggcccattgaggtttttagaaaagcaggatttgttttgttagggaggcatgattttggtgagatctttctggaagagttttccgcctctttgtgatgctgaacacccccaaggttctcccctccccccgctgcccaggtgactggcaggagctgcgactgccacgtagtggtgcctgggcccgacagcggggctctgggcatcccgggtgaccttggcccatctgcctgcattcccacccccttgggcctggctggatcccaggcagagggaccttgctgctgtgtgattggaacattcccaaatatcttgtgaatttgtaatcaaattggtctcattgggaaagactcttaattaagaggctcaggcaagcacagaggcagcccgtgggtctctgtctcagtctggaggcagcagggatgctgctgggagtccatggcacaggccacagcccctcaccttgccgcggtggctggcagcacgcctgccttgctctgccccatgccctgaacaggcatgagagctccacgtcccctagtgcaccctgagagggggctcacaagtgaccgatcctgggtgcctcagggagctcactgagggcgtgcaaagttgaaagtggcaaggctgggggagggtgtcgggtagagggaagagggcagggggctaggggaggactcagaggccatctgcagggccaagccacaggaagggctgagctggaggtgggcagggctgctccaggcaggtcagagcagtgcagggggaggagaggagaaagggaggaagctgggctgtgtggtccccatgaaggcattcagagtccacctgcagacagcgagagccccaggaaggtttgcacagctgtgccccaagcaccttggcctcctctcagctcgccgaggaggcacgctagagccgccttcccggtgggagccctctgtcccacagggagcggggagccagctttgctggggccctacctgcatgcccagccttacccctcattctcacagcacagatgaggttgagaccatgcagtcaatgcattgcttaaggtctcttatttacaaaaaaaaaccttaaacatagtcgctgtcattcagacattcagagaatggttggccacaaacaatgaccaagtattgcttggcttaacttgaaggcctgctgtctccttctgggggtcagggacgcagctccaccctcaccactagcccaccctgcccgtgggcataaccttgacgaagagagagaatgattggcatctgcttttctcttttctttgctaataattctgttcctggctgccgagagtgaagtttcaccatgtggaggtttggctcctatcacctggtggtctgattcataccctagcctgaggctccactggaagatctcgcagcctcagtgtatgggaaaccctttccccaggcttgtcccagcactgccgctccccacccctgagccaggaccccagaggatggccatgccccgtgcctggcagaggtctggtgccagcactgggagctgctccgcccttgccttggggccgagggagccctcgtccacccctgcacagcagctgggcacagaggagcgctcttccatcttgaccaggactgcaccaagaagcaccaggtgtcttcagcctccaacctccggggcgaccttctcttccagccacagtcccatgagggcccctagccagggacactggtctgtaaattgtaatcctttctccagcccagctctccacttgttccttgtgtgagctgagcaggcagtgcacctctgagtgtcccttttgtaaggcccaggggttgcactgagtctgcagaggccgcgacctcctagaacgctgtgggtgcaggtgagccggcgtgtcctggggagatgctgccagcacacaggggccctcctgctgccagcaggttggggtggttaagtcttattagtgtctattcttaaaattaagtgggctggagaagaatggagctccacatgccagcaccgtatatggaatacaaaagctggggaagcagggcctgccttacaggtgtggctgactctgagcccaggcctgcaggggtggagggcagtccctcagaatcccagaggcagtcccagcctcagaacccaggataggaaatgggtgtgtttagtggggaaagggacggggtgcagacggcagggccagtatggggccccctccctctcctctcctctcctatggtgagcccagcgtgggcaccgggccgtctcagccgtgttcccagggctgggaggacagctctggcccttcttaggcctagcctcgtcccaagctaaatgtaagccagttgggctgtgttaaaggaagcagtgtttttggttcgattctgcctctgtagctcaaggggggcagcccccagagtcctgtgcattctgccaaggctccatagctttgccaaatgcacggagctctgccattccggtgcagtgcaggccttgcgaagggtttatctgcgttcgtctcggtgggcttctcctgcatgggagttgtgttcctgtgcaagggggagctttgctccaggacaggatgactgtcttccctattcttagggacaagtcccaagatgccagaaaggcagtctcccaaggacccaccatgcagaagtgtcaataaaccacaagttctgaactctgtaaaaaaaaaaaaaa

SEQ ID NO: 3766 - DNA, 6342 bp, Homo Sapiens
  NM_014636
cgccgctcaggccctggagcggacggttcctactgcggctgggcaccggctccgctcccgcgtctgcccgcgctccagctgcgcctggcccggccccggcccggctcggcgtggccccggcctccaagcgaaggcgccgctgccgctgggccgctcccagggccatgaggaagcggcggcagccactgcggcccgcgtcaaggacttctccagacaggttatgttacctgcagaggctgccctgaagctccctgtggcctggagactatgtacaagaggaatggtctgatggctagcgtgttggtcacctctgccactccacagggcagcagcagctcggactctctggagggccagagctgcgactatgccagcaagagctatgatgccgttgtcttcgatgtcttgaaagtgaccccagaggagtttgctagccagattacattaatggatatacctgtgtttaaagctatccagccggaggaactagccagctgtggatggagtaagaaggagaaacacagtcttgcccctaacgttgtggcctttacccggaggtttaaccaggtcagtttttgggttgtacgagaaattctaacagcacagactttaaaaataagggcagaaatcctcagccattttgtgaaaatagccaagaaacttctagaactcaacaaccttcattctctcatgtctgtggtatcagcattacaaagtgctcccatcttcaggctgacaaaaacctgggctcttttaaatcgaaaagacaagactacctttgagaaattggactacctgatgtcgaaagaagataattacaagcggacacgggaatatatccgaagcctgaagatggttccaagtattccctatctaggaatctatcttctggatttaatctacattgattctgcatatcctgcctcaggcagtatcatggaaaatgaacaaagatccaatcagatgaacaatattcttcgaataattgctgatttacaagtttcctgcagctatgatcacctcaccaccctgccccatgtgcagaagtacctgaagtccgtacgctacattgaagagctccagaagtttgtggaagacgacaactacaaactgtcgctcagaatcgaaccaggaagcagctctccaagactagtctcttccaaggaagatcttgcaggtccctctgctggctccggttctgcgaggttcagccggaggcccacctgtcctgacacatctgttgctggcagcctccccacacctccagtccccagacacaggaagagccacagcctaggcaacaatatgatgtgtcagttgagtgtagttgagagtaaaagtgcgacattcccatcggagaaagcaaggcacctactggacgacagtgtcctagagtcccgcagcccccgaaggggcctggctctgacctcctcctctgctgtcaccaatggactctccctaggcagtagtgagagctcagagtttagtgaagagatgtcttcagggctggaaagccccaccggcccgtgcatctgttctctggggaactccgcagctgtgcccaccatggaggggcctctgagaagaaaaaccctgctcaaggaagggcggaagcctgcgctgtcctcgtggaccaggtactgggtcatactctcaggatccaccctcctgtactacggagccaagtccttgcggggcacagacagaaaacactataaatccacacctggcaaaaaggtttccatcgtgggctggatggtgcagctgcccgatgaccccgagcacccagatatcttccagctgaacaaccctgacaaaggcaatgtttacaagtttcagactggttcccgatttcatgcaatactgtggcacaagcatttggatgatgcatgtaaaagcaacaggcctcaggtacctgcaaaccttatgtcatttgagtaagtctctgcaggacgtggcatgacttcagaggcttctgggaacccaggctgggcctggtggtgaagagcagtcctgggcacaggctgtgagccagggtgctgggaaactcacagctggactcaggggacacggcctgtggcctcaccatcccagagggcttcaccagtgtgggatccacctgtcagtccccagcgactctcatgacactcattctgcagcaccgcctcttggggcagtggtcagaccccacacgccctctctgggcccaccacctgcatctgcgactagagagcacccggcccacgttgggttctcagtgctttctactgcacagagtggacagcgctaactaacctgtgagaggggcccgagagaaggaacagctgtggaacaggctttttacaccccaagtgcatggggttgctcgcccacagggctgcctcagattttgtacaaccccgaagcgtcctctgcgtgtgcgtgctgtacgtgtgtgtgtgtgtgtgagcgagtgtgaactcttcaagaaacatgcattttggcacaagactcgtgacatcacacacttcattcgctttgaggccctgctttaaccttaagttatagccctgtccaccgaggaaggtcagggtgagagcctagattcctcctgtgtcaagggtccctcgcattcttttactgtaaacaaacaatgccttaaattgtgtcttgttttctgttcctatgggtgctattcatctggaaggcctgcttccaggcctctttgctgtcagcccttctgagacaggacctggcttcaggactgtggactgggctgctggcctgcttgcttcctcccttccccattcctagcagggcctgaggccctcctcttctcgcccttcccaccatgccagaatgggaagttgtgacgttgcagctccaaccgacgtgctcatagtgatcagctgtgcaggagccatgaggcaccaacctctccccgcagggcaaagcctgtgcccccatcatctcactcctttgcctgcactgccagggtggggcccaccaagattcctgatcatgacgggaagctgagtgaccctgaggccttaagcttccccagtcttggccccaaatgcagtcaccagcaagttttccattttccaagtccaagggcacaattgttgatgaccgtgtgacaatagagcgaagccccggggagtgaacggtccaacctctgcattcagttaggagctcttcacatgaatcacatccttatctgtcaccttgtgtcacattttaaagtgacttttattttgcacaaataatttttattcagaataataaatcactctttatcatagtatcttctcttccctcttcccctttagtttggatagcctaactctgagaagttaacccttaaacagttttctggaagagactgaatttctgggtccttgcagctgtgatggtttcagagctcagactgatcaggcatcaagctaccctcaagagtttctgggctggatgtttcagaacaacatctacaccagtaaagtgtaataggtcagtttcaaaacgaccaaaagacccaccactgtattttgaccaaataatgacaacttctttagaaatttgaatggcttggtgaggaaagtagttgtcaccagggcctcattttgtagttgagccttacaatgcttagtagttcatcttctttttgagcaaagactagaatactttcctcctaagagaaactcccaggtgataaaagttgatgccatcaaaccttgacaccgggtgctctgcacacccacgcggatgttgcacctcattctcccgatgactattcaaatcagcatctagaggctgaatgacaatgccaaacactccacctctgatcagaaccatgcagtgttaacactttaacctacattgaatctgattctacctgttaacttttaaaaagtcgtaagtttggatgaaagtgcaagatgtggaacatcaactacctattttccttgggtttttccactctgcaaactgtcctggtttttcacaccaatgaagtattatagatgccaatccaaaacctcagaatttcaggcaccacaaaaacaggtaattttctatcccttataagtttgtcttttctttcagaaacatctcttagcctaatttgaaatagcacaatcacaattcaaaatgtttagtcttctcactaattgagtctgcttccacgtcctctcccaggaacattcttagctcggactcttgaagaatctctttagattttgttggcaaaagccttatagaagcagtaagaggcttgaccacgccggaagagtcctggagctaaagctggaagacactcagctctctaagcaggggctcggccaaacatgggagttaagtgctgcttgtcttcccagtgttggtttgaaccctgtgagcctgagacagagagggccaggcaccaaccacaaggcgggaaagtccatgggtagaccctccccctggagggaagcatttctagtttttgctccttgactgtccagagtgtacaaatgttcataacgccattgaagggattatttcttgcatgcatatgctgaatttttttaagcaaatggatcatggcaccccaaaatgaaagttatagaaagctgtctacaactgtggagttggtagctggtaacattgttgtctcaagaacaactcacctctctccctaggactaatttttgtctctctcagttgaacatgttttgtcattcaagatcagtcaggtgcattctggcaactgacatacttgatggaggattgattcggtagagagcagtagaaatcttgttctaactgtgcctggtgagagactttggccccctccctccctataaggctgtggaacctgaggaagtagatacttgaagagattctgtttaggaagaaactcactctcttttgccagttgaatttatagagcattttttttcttaccaagatggccagtatcattttacccccacctcccaagccccaagaggtgtaccttttcagatgccattttacaggcggaaatgctccatgaaacaggaagccacttgcaagcaacatctgctctgttcctcaggtggggcccagagcccttccccgagactgctgatgtctgtaaccactggggagcactgccaaaaatacagctttctggtttgtgagcccataaatgacttaaatcagctttacatcatttttacatatcaagtggtttcatgttaaaaaacaaactcctagtcctttagaaataacagattctctgcacaaaaccacccattcattcatttattcattcacagcactagcaagtgctgcctatgctgagaacaagtcagatctgatccctgccctcatggacctgaccactcaacaaacagtccccaccacacctatctccttaggcaagactttgcctctctcctagtcctgagtataaatcctgtgcatagattcctctagaaaggcatcaaaaggctcaacagactgaatggcctcttggtctgcgaaaattcagttgcaatgaggatgaagtcactatcctagaggctgcttggcccagaagagccaggcacagagctgcagttgggcacgccaaggattccaaaggtggaatgagagagtagggtcaaactgtcacagtatctgctccataggtttctgtttttaatttcaatgttaaatacaactacaatatgagcgagaactgcattttcttgggtgttgagaacttgtaccatggacttcagaccgccttgcagccgtatgctgcacaagcgtgtacaccccctgggcagcctcaaaaccccgcttacagcagcaacacaggagatcatctgtccattttagaaccattaatctctttatccattgctgaacgactgtgactattcagtaacgaagtaatagtaattaattagtatggtataatctttaataaatttcgtgccaaaatgcatggttttccacttagcattcaaaatgttgcatagagagtagttttcaatttcttatgtactcttcgaagtaagttgaaaatcagtttctacattttaattcgtttcctgttaaatctgttgcactctcctgggctgtctttttctccagcagacccctgcatgcagttgtgtaaggactttctctaattcttgtgaatcgtctcacccgcagtaaccactgaacgtcaatcagccctccatggggttctttcgatttttggtgaagtattttgttacctcagtcttgtatcaagttgctgtatttttcagcttgttacattgataataattatttcactaattaaatactttaatgtacaaacatctttgtttactttgaaattaaatgtgttttccaatgaaaaaa

SEQ ID NO: 3767 - DNA, 4837 bp, Homo Sapiens
  NM_014638
gcggctgcgtcagggattccttggtggccctggagggtggataggctggcctgggggccatcaggacagcaggtgacggtcaggccaatgccagccgggcctgggcacagccctgtgggggcttcggagggccctgaggaggaggaggaagaggcagaggagagaaggccccacggaggtcctgtcgccagcgctgccactgcctgacctccgctgcccgaaggccggtgggcctctgtggcctccgtgaagcaggcccggctgtcgtcaggccatgtctggtccatggccctcccccgacagccggaccaagggaacggtggcctggctggcggaggtactcctctgggttggagggagtgtggtgctgtcttcagagtggcagctcggccccctggtggagcggtgcatgggtgccatgcaagaggggatgcagatggtgaagctgcgtggcggctccaagggcctggtccgcttctactacctggacgagcaccgctcctgcatccgctggaggccctcacgcaagaacgagaaggccaagatctccatcgactccatccaggaggtgagtgaggggcggcagtcggaggtcttccagcgctaccctgacggcagcttcgaccccaactgctgcttcagcatctaccacggcagccaccgcgagtcgctggacctggtctccaccagcagcgaggtggcgcgcacctgggtcactggcctgcgctacctcatggccggcatcagcgacgaggacagcctggctcgccgccagcgcaccagggaccagtggctgaagcagacgtttgacgaggccgacaagaacggggatggcagcctgagcattggcgaggtcctgcagctgctgcacaagctcaacgtgaacctgccccggcagagggtgaagcagatgttcagggaagcggacacggatgaccaccaagggacgctgggttttgaagagttctgtgccttctacaagatgatgtccacccgccgggacctctacctgctcatgctgacctacagcaaccacaaggaccacctggatgccgccagcctgcagcgcttcctgcaggtggagcagaagatggcgggtgtgaccctcgagagctgccaggacatcatcgagcagtttgagccatgcccagaaaacaagagtaaggggctgctgggcattgatggcttcaccaactacaccaggagccctgctggtgacatcttcaaccctgagcaccaccatgtgcaccaggacatgacgcagccgctgagccactacttcatcacctcgtcccacaacacctacctcgtgggtgaccagctcatgtcccagtcacgggtggacatgtatgcttgggtcctgcaggctggctgccgctgcgtggaggtggactgctgggatgggcccgacggggagcccattgtgcaccatggctacactctgacttccaagatcctcttcaaagacgtcattgaaaccatcaacaaatatgccttcatcaagaatgagtacccagtgatcctgtccatcgaaaaccactgcagtgtcatccagcagaagaaaatggcccagtatctgactgacatccttggggacaagctggacctgtcatcagtgagcagtgaagatgccaccacactcccctctccacagatgctcaagggcaagatcctcgtgaaggggaagaagctcccagccaacatcagcgaggatgcggaggaaggcgaggtgtctgatgaggacagtgctgatgagattgacgatgactgcaagctcctcaatggggatgcatccaccaatcgaaagcgtgtagaaaacactgctaagaggaaactggattccctcatcaaagagtcgaagattcgggactgtgaggaccccaacaacttctccgtctccacactgtccccatctggaaagctcggacgcaagagcaaggctgaagaggacgtggagtctggggaggatgccggggccagcagacgcaatggccgcctcgtcgtgggaagcttctccaggcgcaagaagaagggcagcaagctgaagaaggcggccagcgtggaggagggagatgagggtcaggactccccgggaggccagagccgaggggcgacccggcagaagaagaccatgaagctgtcccgggccctctctgacctggtgaagtacaccaagtccgtggccacccacgacatagagatggaggcggcgtccagctggcaggtgtcgtccttcagcgagaccaaggcccaccagattctgcagcagaagccggcgcagtacctacgcttcaaccagcagcagctctcccgcatctacccctcctcctaccgtgtggactccagcaactacaacccgcagcccttctggaacgccggctgccaaatggttgccctgaactaccagtcagaggggcggatgctgcagctgaaccgagccaagttcagcgccaacggtggctgcggctacgtactcaagcctgggtgcatgtgccagggcgtgttcaaccccaactcggaggaccccctgcccgggcagctcaagaagcagctggtgctccggatcatcagtggccagcagcttcccaagccgcgcgactccatgctgggggaccgtggggagatcatcgacccctttgtggaggtggagatcattgggctccctgtggactgcagcagggagcagacccgcgtggtggacgacaacgggttcaaccccacctgggaggagaccctggttttcatggtgcacatgccggagatcgcgctggtccgcttcctcgtctgggaccacgatcccattgggcgtgacttcattggccagaggacgctggccttcagcagcatgatgccaggctacagacacgtgtacctagaagggatggaagaggcctccatcttcgtgcatgtggctgtcagtgacatcagcggtaaggtcaagcaggctctgggcctaaaaggcctcttcctccgaggcccaaagcccggctcgctggacagtcatgctgctgggcggcccccggcccggccctccgttagccagcggatcctgcggcgcacggccagcgccccgaccaagagccagaagccgggccgcaggggcttcccggagctggtcctgggtacacgggacacaggctccaagggggtggcagacgatgtggtgccccccgggcccggacctgctccggaagccccagcccaggaggggcccggcagcggcagcccccgagacacccgccccctctccacgcagcggccactccccccactgtgcagcctggaaaccatcgctgaggagcccgccccaggccctggtcccccgccaccagcggctgtccccaccagctcttctcagggacggcccccataccccacaggacccggagccaatgtggcaagccccctagaggacactgaggagccccgagacagcaggcctcggccgtgcaacggcgagggcgccggcggggcatacgagagggcccccggcagccagacggacggcaggagccagccccggaccctgggccacctgcccgtgattagaagggtgaagagtgaggggcaggtgcccacggagcccctgggagggtggcggcccctggccgctccctttccagctcctgccgtgtactccgatgccacgggcagtgacccgctgtggcagcggctggagccatgtggccaccgagacagcgtttcctcctcctccagcatgtcatccagcgacactgtcattgacctctccctgcccagcctgggcctgggccgcagccgtgagaacctcgctggagcccacatgggacgcctgccccccaggccccactcggcttcggctgcccgcccagacctgccacctgtgaccaagagcaaatccaaccccaaccttcgggctacaggccagcggcctcccatacctgacgaactgcagcccaggtccctggccccaaggatggctggcctccccttccggcctccctggggctgcctttccctggtgggcgtgcaggactgccccgtggctgccaagtccaagagcctgggcgacctcactgctgatgactttgcccctagctttgagggcggctcccgcagactgagccacagcctgggcctcccgggagggacacggcgggtgtcggggccaggggtgagacgggacaccctgacagagcagctgcgctggctcactgtcttccagcaggcaggagacatcacgtcacccaccagcctgggcccggctggggagggggtggcagggggccctggttttgtgcggcgctcctcctcccgcagccacagccgcgtgcgtgccattgccagccgggcccgccaggcccaggagcggcagcagagactgcagggcctgggccggcagggacccccagaagaggagcggggcacccccgagggcgcctgctccgtgggccacgagggcagtgtggatgcaccagcaccctccaagggagccctcgggccagcatccgcggctgctgaaaacctggtcctgctccgcctctgaccgtcagtggtgggaacctgggcggctctggaggcccagggcaggggtgggcgtgttgtttgctcaggaaacagggcagccaggcccccaaaactgtgtccccctggctgccctgtgtcccctccacccctgcctccctcctgcccctgctcccggggaggaaaggctaaagctgctggcccggggcccacaggaggggcttcgaggctggccctgccaggcagttttcccggcgttttaggatctgtacatagagaaatatttaaatttttagaagcaaaacttatacaacattaaaatgataccaagtcc

SEQ ID NO: 3768 - DNA, 5704 bp, Homo Sapiens
  NM_014639
gagtcctgggaaaggcgcatgcgctctcattgcagcctcggcgtttgtagaagaggagcatctgctccagatggaaaatgggtaaggaacaatcaaattcaattcgggaagaatatagaggtggtaataattggtaaaagtctgcagggttttttttaaccaaaggaaactggtttgagaaaattgtgaaatcagcattgaaatttgttacctactccaatcaagatttgcaaactacaaaaaaatcattctgaagctttcacctataaatatataccaagataatttcagataagaatgtccagcaaggaagtgaagactgctctaaaaagtgctagagatgcaatcagaaacaaagaatacaaagaagctttgaaacactgtaagacagtgttaaagcaagagaaaaataactataatgcctgggtttttattggcgttgctgcagctgaactagaacaacctgatcaggcccagagtgcctataaaaaagctgctgaattagagccagaccaattactagcttggcaggggttagcaaacttgtatgagaaatataatcacataaatgctaaggatgacttgcctggtgtttaccaaaagctcctggatctttatgagagtgttgacaagcagaagtggtgtgatgtctgcaagaaacttgtggatctatattaccaagaaaagaaacacctagaggtggctcgaacatggcacaagttgataaaaacacggcaggaacaaggtgcagaaaatgaagagcttcatcaactatggagaaaattgactcagttcctggctgaaagtacagaggaccagaataatgaaactcagcaattgctttttactgcttttgagaatgcactgggattatcagataagattcctagtgaagatcaccaagtactttataggcatttcattcagagtttatccaaatttcctcatgagtctgctagattgaagaaggcctgtgaaggaatgataaacatctatcctactgtacagtatccattagaagtgctttgtttgcatttaattgaatcaggaaatcttactgatgaggggcagcagtattgttgtagattagtggaaatggattcaaaaagtggtccaggcctcattggcttaggcattaaagcattacaagacaaaaagtatgaagatgctgttaggaacctaacagaagggttaaaggaaagccctgtctgcacaagtggatggtatcatctggcagaagcccaagtcaaaatgcatagacctaaagaagctgttctttcatgcagtcaagctctgaagatcgtagataatcttggtgcgtctggtaacagtctttatcagaggaatctttgtcttcatttgaaagcagaggctttgattaaactctcagattatgactcttcagaggaagcaattcgtacgcttgatcagatttctgatgcagataatatcccaggacttttggttctcaaaagcttggcctatcggaacaaaggttcatttgatgaagctgcaaagattatggaagaccttctctcttcttaccctgacctagctgaagttcatgcccttgaggctttgattcatttcaccaaaaaggactatctacaagcagaaaaatgttttcagagagctcttgagaaagataccgaagttgcagaatatcattaccaacttggattaacatactggttcatgggtgaagagacaagaaaagataaaacaaaggctcttacccactttctgaaggctgcaagactggatacatatatgggcaaagttttctgctatttaggtcattattatagagacgtagtgggagataaaaacagagctcgtggatgttataggaaagcctttgaattagatgacactgatgctgaatctggagctgcagcagttgacctaagtgtggagcttgaagatatggaaatggctttagctatcctaacaacagtaactcaaaaggcaagtgctggaacggcaaaatgggcctggcttaggcgaggactatactatttgaaagctggtcagcattctcaagcagtggctgatttacaggcagcattaagagcagacccaaaggacttcaattgttgggaatcgttaggagaagcatacttaagcagaggaggctacacaacagccttgaagtccttcacaaaagccagtgagctgaacccagaatccatatacagtgtgtttaaggttgcagcaatacagcaaatcctaggcaaatataaggaggctgtagctcaataccagatgatcattaaaaagaaagaagattatgtgcctgctttaaaaggtttgggtgaatgccatcttatgatggcaaaagcagctctagttgattatcttgatggaaaagccgtagactacatagaaaaagcactggaatattttacttgtgctctacagcatcgagctgatgtgtcctgcctctggaagctagctggggatgcttgtacctgtctgtatgctgtcgcaccatctaaagtgaatgttcatgttttaggagtccttctaggtcagaaagaaggaaaacaagtattaaagaaaaatgagctcctccaccttggaggaaggtgttatggtcgtgcattaaaactgatgtctacatctaatacatggtgtgaccttggaattaattattatcgccaagcacaacatctagcagaaacaggcagcaacatgaatgatcttaaggagttgctggagaaatctttacattgtctgaaaaaagcagtgagactcgacagtaataatcacttatactggaatgctcttggtgtggttgcatgttacagtggtattggaaattatgcccttgctcagcactgtttcatcaaatcaatccagtcagaacaaattaatgctgttgcatggaccaacttgggagtgttatacctcacaaatgaaaacattgagcaagctcatgaggctttcaaaatggctcaatcccttgatccatcttatttaatgtgctggattggacaagctcttattgctgaggcagttggaagttatgacaccatggatctcttcaggcacactacagaactaaatatgcatactgaaggagcattaggttatgcgtattgggtctgcacaacattgcaagataaaagcaacagagaaacagagctgtaccagtacaacatcctccagatgaatgctattccagcagcacaagttattttgaataaatatgtagaaagaattcagaattatgccccagctttcacaatgttgggttacttaaacgaacatctacaactgaaaaaggaagcagcaaatgcataccaaagggcaattttgttgttacagactgcagaagaccaagatacttacaatgttgcaataagaaattacggcagattgttatgttccactggtgaatatgataaagctatccaggcttttaagtcaacaccccttgaagtgttagaagacatcataggttttgcattggctttattcatgaaggggctttataaagagagcagcaaagcctatgagagagccttgtctattgttgaatcggagcaagacaaagcccatatcttgacagctctggcaataactgaatataaacaaggaaaaacggatgtagccaagacattgctatttaaatgctctatcttaaaggaaccaaccacagaaagccttcaagccctgtgtgctctagggttggcaatgcaggatgctacactgtcaaaagcagcacttaatgagttactgaagcacatcaaacacaaagacagtaattatcagaggtgccttcttacatcagcgatttatgcactccaaggccgcagtgtggctgtgcaaaaacaaatatctaaagctgttcacagcaaccctggtgaccctgctctttggtctctgttgtctcgagttgttgcacagtatgctcaacgaaatgcaaagggaggtgttgtagcaggaaatgtggctcatattctggactcaaatcatggaaagaaggcattactgtacactgcggtaaatcagttggctatgggaagcagttcagcagaagatgaaaaaaatactgcactaaagaccattcagaaggcagctctcctttctccaggtgatcctgctatctgggctgggctaatggcagcctgtcacgctgatgataaactggccttagtgaacaacactcagccaaagaggatagatttatacttggcactgttatctgctgtttctgcttcaattaaagacgaaaaattctttgaaaattacaaccagtcccttgaaaagtggtctctctcacaagctgtcactggtctaatagacacaggaagaatatctgaagctgaaactctctgcacaaagaatttaaaaagtaaccctgatcagccagccgttatcttacttttgagacaagttcagtgtaaaccactcctggagtcacaaaagccactcccagatgctgtacttgaagaactacaaaaaacagtcatgtccaactcaacctctgttccagcttggcagtggctggcacatgtgtatcaatcccaaggaatgatgagagctgcagagatgtgttacagaaagagtctacaattggcatcccaacggggcagttggagtgggaagctctcaagtctgttgagactagcactacttgcattaaaagtctgtatggctaacatttccaatgatcactggccatctttggttcaagaggctacaactgaggccttgaagctttgcttttgtccactggctgttcttttacaagctttgttacaattcaaacgcaaaatgggggcaagagagacacggcgtcttttggaaagagtggtatatcagcctgggtatcccaaatctattgcatcaactgcacgttggtacctactgagacacttatatgccaaagatgactatgagcttattgacgtgctggtaaacaatgccaaaactcatggagatacaagagcattggaactgaatcagagattgtcctcacaataacattggattattttatagtaaggaagcaaagaaaaagctgtaagaatgaagcaatgaatcaagacttctacccaaagcaacatttttttaaactatatttattccttttctaaaggaatctagagaagttgaagtttttaagttaggaatgcaattttctgttaactccaaacctgattttaatctgaaaaaaaaaaaatttaatttgggaaaaccagaatgaaaggaaaaccattattgccttggttgcttaacattatttgtaaaccattattttctgcatcttgcatggtgcacaatagaatatcttttactgtaatcccttacaataaagccttaatagccattttctatgtaatatgcaaaagtagattagcacaatgcacaattttcttttgttaaaaatcaaattcaaagatttaattcttgctatgaattctaaagttcggcaaaccaattcatcataaaatccaaataatcttgtaacctatttatctagtgattcatctccaattctgttgaaaaagcataatataaatgttgatgagactagactctaatggatatgtttatataattccaaacactcaggtgtgtgaatgcatttaaaaacattaatggaaaataatgctgataatatttaattgatcatgcaattccttcaattatgatggaaagacttgaactttctgaaataaaacaaaaatacagc

SEQ ID NO: 3769 - DNA, 7385 bp, Homo Sapiens
  NM_014641
caccatgtctaggaggaccgaggaaaggcgctctggccttaccagacacgtcggacgtctatgacacagcccctctatccgttgccggcagctggcgccagactctctggtcgcggtttggaactgcgcgggaagtgggtggtgggcgggcaagcggtagtgggttgtcccttggagctgcccaatcgacgtgcattattctgttggcgcacggcggccttcaattaccgtctcattaactgatctcagcagcctgggagacaccacctatttgaactctaagggggcggggctttgggtgtgcctccgctcgactggctgcggttgtgaaagacagcggcagaagccaatcagcaaataagctctttttcggcacacgcagtcgctccacctgggtcgcgaccgttactggtggcgcgcgcggggacttaaagtagatcatggaggacacccaggctattgactgggatgttgaagaagaggaggagacagagcaatccagtgaatccttgaggtgtaacgtggagccagtagggcggctacatatctttagtggtgcccatggaccagaaaaagatttcccactacacctcgggaagaatgtggtaggccgaatgcctgactgctctgtggccctgccctttccatctatctccaaacaacatgcagagattgaaatcttagcctgggacaaggcacctatcctccgagactgtgggagccttaatggtactcaaatcctgagacctcctaaggttttgagccctggggtgagtcaccgtctgagggaccaggaattgattctctttgctgacttgctctgccagtaccatcgcctggatgtctctctgccctttgtctcccggggccctctgacagtagaagagacacccagagtacagggagaaactcaaccccagaggcttctgttggctgaggactcggaggaggaagtagattttctttctgaaaggcgtatggtaaaaaaatcaaggaccacatcttcctctgtgatagttccagagagtgatgaagaggggcattccccggtcctgggcggccttgggccgccttttgccttcaatttgaacagtgacacagatgtggaagaaggtcagcaaccagccacagaggaggcctcctcagctgccagaagaggtgccactgtagaggcaaagcagtctgaagctgaagttgtaactgaaatccagcttgaaaaggatcagcctttagtgaaggagagggacaatgatacaaaagtcaagaggggtgcagggaatggggtggttccagctggggtgattctggagaggagccaacctcctggagaggacagtgacacagatgtggatgatgacagcaggcctcctggaaggccagctgaggtccatttggaaagggctcagccttttggcttcatcgacagcgacactgatgcggaagaagagaggatcccagcaaccccagttgtcattcctatgaagaagaggaagatcttccatggagtaggtacaaggggtcctggagcaccaggcctggcccatctgcaggagagccaggctggtagtgatacagatgtggaagaaggcaaggccccacaggctgtccctctggagaaaagccaagcttccatggttatcaacagcgatacagatgacgaggaagaagtctcagcagcgctgactttggcacatctgaaagagagccagcctgctatatggaacagagatgcagaagaggacatgccccaacgtgtggtccttctgcagcgaagccaaaccaccactgagagagacagtgacacagacgtggaggaggaagagctcccagtggaaaatagagaagctgtcctcaaggatcacacaaagattagagcccttgttagagcacattcagaaaaggaccaacctccttttggggacagtgatgacagtgtggaagcagataagagctcacctgggatccacctggagagaagccaagcctccaccacagtggacatcaacacacaagtggagaaggaagtcccgccagggtcagccattatacatataaagaagcatcaggtgtctgtggaggggacaaatcaaacagatgtgaaagcagttgggggaccagcaaagctgcttgtggtatctctagaggaagcctggcctctgcatggggactgtgaaacagatgcagaggagggcacctccctaacagcctcagtagttgcagatgtaagaaagagccagcttccagcagaaggggatgctggggcagagtgggctgcagctgttcttaagcaggagagagctcatgaggtgggggcccagggtgggccacctgtggcacaagtggagcaggacctccctatctcaagagagaacctcacagatctggtggtggacacagacactctaggggaatccacccagccacagagagagggagcccaggtccccacaggaagggagagagaacaacatgtgggtgggaccaaggactctgaagacaactatggtgattctgaagatctggacctacaagctacccagtgctttctggagaatcagggcctggaagcagtccagagcatggaggatgaacctacccaggccttcatgttgactccaccccaagagcttggcccttcccattgcagcttccagacaacaggtaccctagatgaaccatgggaggtcctggctacacagccattctgtctgagagagtctgaggactctgagacccagccttttgacacgcaccttgaggcctatggaccttgcctgtctccacctagggcaataccaggagaccaacatccagagagcccagttcacacagagccaatggggattcaaggcagagggaggcagactgtggataaagtcatgggtataccaaaagaaacagcagagagggtgggccctgagagagggccattggagagagaaactgagaaactgctaccagaaagacagacagatgtgacaggagaggaagaattaaccaaggggaaacaggacagagaacaaaaacagttgttagctagagacacccagagacaagaatctgacaaaaatggggaaagtgcaagtcctgaaagagatagggagagtttgaaggtagaaattgagacatctgaggaaatacaagagaaacaagtacagaagcagacccttccaagcaaagcatttgagagagaagtagagagaccagtagcaaacagagagtgcgatccagccgagttagaagagaaggtgcccaaagtgatcctggagagagatacacagagaggggagccagagggagggagccaggaccagaaagggcaggcctccagcccaacaccagagcctggggtgggggcgggggaccttccgggacctacctcagcccccgtaccttctgggagccagtcaggtggaaggggatccccagtgagccccaggaggcatcagaaaggcctcctgaattgcaagatgccacctgctgagaaggcttccaggatcagagctgctgagaaggtttccaggggcgatcaggaatctccagatgcttgtctgcctcctacagtacctgaagccccagccccaccccaaaagccccttaactctcagagccagaaacatcttgcacctccgccccttctttctccccttttaccttctatcaagccaaccgttcgtaagaccaggcaagatgggagtcaggaagctccagaggctcccttgtcctcagagctggagcctttccacccaaagcctaaaattagaactcggaagtcctccagaatgacaccctttccagctacctctgctgcccctgagccccacccttccacctccacagcccagccagtcactcccaagcccacatctcaggccactaggagcaggacaaataggtcctctgtcaagacccctgaaccagttgtccccacagcccctgagctccagccttccacctccacagaccagcctgtcacctctgagcccacatctcaggttactaggggaagaaaaagtagatcctctgtcaagacccctgaaacagttgtgcccacagcccttgagctccagccttccacctccaccgaccgacctgtcacctctgaacccacctctcaggctactaggggaagaaaaaatagatcctctgtcaagacccctgaaccagttgtccccacagcccctgagctccagccttccacctccacagaccagcctgtcacttctgagcccacatatcaggctactaggggaagaaaaaatagatcctctgtcaagacccctgaaccagttgtgcccacagcccctgagctccggccttccacctccacagaccgacctgtcacccccaagcccacatctcggaccactaggagcaggacaaatatgtcctctgtcaagacccctgaaacagttgtccccacagcccctgagctccagatttccacctccacagaccaacctgtcacccctaagcccacatctcggaccactaggagcaggacaaatatgtcctctgtgaagaaccctgaatcaactgtccctatagcccctgagctcccaccttccacctccacagagcagcctgtcacccctgagcccacatctcgggctactaggggaagaaaaaatagatcctctggcaagacccctgaaacacttgtccccacagcccctaagctcgagccttccacttccacagaccaacctgtcactcctgagcccacatctcaggccaccaggggcaggacaaataggtcctctgtgaagacccctgaaacagttgtccccacagcccctgagctccagccttccacctccacagaccagcctgttacccctgagcctacgtctcaggctactaggggaagaacagatagatcctctgtcaagactcctgaaacagttgtccccacagcccctgagctacaggcttccgcctccacagaccagcctgtcacctctgagcccacatctcggaccactaggggaagaaaaaatcggtcctctgtcaagacccctgaaacagttgtgcccgcagcccctgagctccagccttccacctccacagaccaacctgtcacccctgagcccacatctcgggccactaggggcaggacaaataggtcctctgtcaagacccctgaatcaattgtccctatagcccctgagcttcagccttccacctccagaaaccagcttgtcacccctgagcccacatctcgggccactaggtgcaggacaaataggtcctctgtcaagacccctgagccagttgtccccacagcccctgagccccatcctaccacctccacagaccagcctgtcacccccaagctcacatctagggccactaggagaaagacaaataggtcctctgtcaagactcccaaaccagttgaaccagcagcctctgatcttgagccttttacccccacagaccagtccgtcacccctgaggccatagctcagggtggtcagagcaaaacactgaggtcttccacagtaagagctatgccggttcctaccacccctgaattccaatctcctgtcaccacagaccagcctatttcccctgagcctattactcaacccagttgcatcaagaggcagagagccgctgggaaccctggctccctcgcagctcccattgaccataagccttgctctgcacccttggaacctaaatcccaggcctcaaggaaccaaagatggggagcagtgagagcagctgaatcccttacagccattcctgagcctgcctctccccagcttcttgagacaccaattcatgcctcccagatccaaaaggtggaaccagcaggtagatctaggttcaccccggagctccagcctaaggcctctcaaagccgcaagaggtctttagctaccatggattcaccaccacatcaaaaacagccccaaagaggggaagtctcccagaagacagtgattatcaaggaagaggaagaagatactgcagagaagccagggaaggaagaggatgtcgtgactccaaaaccaggcaagagaaagagagaccaggcagaggaggagcccaacagaataccaagccgcagcctccgacggaccaaacttaaccaagaatcaacagcccccaaagtgctcttcacaggagtggtggatgctcggggagagcgggctgtgctggcactggggggaagtctggctggttcagcggcagaggcttcccacctggtcactgatcgcatccgccggacagtcaagttcctgtgtgccctggggcggggaatccccattctgtccctggactggctgcatcagtcccgcaaggctggtttcttcttacccccggatgaatatgtggtgaccgaccctgagcaagagaagaactttggctttagccttcaagacgcactgagcagggctcgggagcgaaggctgctagagggctatgagatctatgtgacccctggagtccagccaccaccacctcagatgggagagattattagctgctgtggaggcacatacctacccagcatgcctcggtcctataagcctcagagagttgtgatcacatgccctcaggacttccctcattgctccattccactacgggttgggctgcccctcctctcgcctgagttcctgctgactggagtgctgaagcaggaagccaagccagaggcctttgtcctctcccctttggagatgtcatccacctgagaactccactacccttttccctcccagaccacgaattagaagatatgtggaagaaagaactcagggcgttagaaaggattggggtatattgatacaacttgtcctggaacatgggtgggaccagaaatctttatgaataaatgaaaagataagggatttggaagccacaggttgttttttgtttgtttgtttgtttttttaatggccattttattttatttgtatttatagttttttatttgtatagatttaggggatacaagatttcttacatgcatgtattaaatggccattttaaaattagctagtttcatgctcagatgtcataagtggcagctatctttagccagactgttgcagttattgctcgatgccactcatggtgtcctacctcctatttggaaaccatctctatttttttcttactgagattcttactttggggtcaggaacttgaagggatgcttggagtgagtagatttgagggtccagttatggagtgctactaaaacattttcttctctcctggcctctggaagcatctttagctttgactttgggcaagtctctgtacttttctggccagcttttccaggatttataaaattagagcttcggcttgacctctgtgataaataaatattcactctgtgccttaaaaaaaaaaaaaaaaaa

SEQ ID NO: 3770 - DNA, 3334 bp, Homo Sapiens
  NM_014649
gttgtgccggggaacccgcggttggtggacgcgcgagcgtccttgctgctaagtacgctagtgggggcggtgcgcgtgcgcgtgcgcggccgcaaagcggggcgggaggaaacgagtgcgttttcctcttaggcggcgccattttgtgttcagagccgctatagctgccggcggtgtgcgactgagtcggtggcgaagacgggaacgcgacgatggcggagactctgcccgggtcgggcgactcgggccctggcacggcttctctcggcccgggcgttgcggagactgggacgaggcggctcagcgagctgcgggtgatcgatctgcgggcggagctgaagaagcggaacctggacacgggcggcaacaagagcgtcctgatggagcggctcaagaaggcggttaaagaagaggggcaagatcctgatgaaattggcatcgagttagaagccaccagcaagaagtcagccaagagatgtgttaaaggactgaagatggaggaggaaggcacagaagataatggcctggaagacgattccagagacgggcaggaggacatggaagcaagtctggagaacctgcagaatatgggcatgatggacatgagtgtgctagacgaaactgaagtggcgaatagcagtgctccagattttggggaggatggcacggacggccttctcgattccttttgtgatagtaaagaatacgtggctgcacagctgagacagctcccggctcagcccccagagcatgctgtggatggggaaggatttaagaacactttggaaacttcatcgttgaacttcaaagtaactccggacattgaagaatcccttttggagccagaaaatgagaaaatactcgacattttgggggaaacttgtaaatctgagccagtaaaagaagaaagttccgagctggagcagccatttgcacaggacacaagtagcgtggggccagacagaaagcttgcggaggaagaggacctatttgacagcgcccatccggaagagggtgatttagatttggccagcgagtcaacagcacacgctcagtcgagcaaggcagacagcctgttagcggtagtgaaaagggagcccgcggagcagccaggcgatggcgagaggacggactgtgagcctgtagggctagagccggcagttgagcagagtagtgcggcctccgagctcgcggaggcctctagcgaggagctcgcagaagcacccacggaagccccaagcccagaagccagagatagcaaagaagacgggaggaagtttgattttgacgcttgtaatgaagtccctccggctcctaaagagtcctcaaccagtgagggcgctgatcagaaaatgagctcttttaaggaagaaaaagatataaagccaatcattaaagatgaaaaaggtcgggtcggcagcggttctggtcggaacctgtgggtcagcgggctgtcctccacaacacgcgctacggatctcaagaaccttttcagcaagtatgggaaggttgtcggggccaaagtggtaacgaacgcccgcagcccgggggctcgatgctatggattcgtcaccatgtcgacatctgacgaggcgaccaagtgcatcagccatctccacagaactgagctgcatggacgaatgatctccgtagagaaggccaaaaatgagcctgctgggaaaaagctttccgacagaaaagagtgcgaagtgaagaaggaaaaattatcgagtgtcgacagacatcattctgtggagatcaaaattgaaaaaactgtaattaagaaggaagagaagattgagaagaaggaggaaaaaaagcctgaagacattaagaaggaagaaaaagaccaggatgagctgaaacccggacctacaaatcggtctagagtcaccaaatcaggaagcagaggaatggagcggacggtcgtgatggataaatcgaaaggagagcccgtcattagcgtgaaaaccacaagcaggtccaaagagagaagctccaagagtcaggatcgcaagtcagaaagcaaagaaaagagagacatcttgtcgtttgataaaatcaaagaacaaagggagagagagcgccagaggcagcgggaacgggagatccgcgaaacggagaggcggcgggagcgcgagcagcgggagcgggagcaacgcctcgaggccttccatgagcggaaggagaaggcccggctacagcgggaacgcctgcagctcgagtgccagcgccagcggctggagcgggagcgcatggagcgggagcggctggagcgcgagcgcatgcgcgtggagcgtgagcgcaggaaggagcaggagcgcatccaccgcgagcgcgaggagctgcggcgccagcaggagcagctgcgttacgagcaggagcggcggcccgggcggaggccctacgacctggaccgacgagatgatgcctattggccagaaggaaagcgtgtggcaatggaggaccgatatcgtgcagactttccccggccagaccaccgctttcacgacttcgatcatcgagaccggggccagtaccaggaccacgccatcgacaggcgggagggttcgaggccaatgatgggagaccaccgggatgggcagcactatggagatgaccgccatggccacggaggacccccagagcgccacggccgggactcccgtgatggctgggggggctacggctccgacaagaggctgagtgaaggccgggggctgccccctccccccaggggtggccgtgactggggagagcacaaccagcggctagaggagcaccaggcacgcgcctggcagggtgccatggacgcaggcgcggctagccgggagcacgccaggtggcaaggtggcgagaggggcctgtctgggccctcggggccggggcacatggcaagccgcggtggagtggcggggcgaggcggctttgcacaaggtggacattcccagggccacgtggtgccaggtggcggactggaaggtggcggagtggccagccaggaccggggcagcagagtccctcacccacaccctcatccccccccgtacccccacttcacccgccgctactaagtcccactcgctgcgagttttcgggtgggcagacgcactgttgaatctggtagccagggttccctcgaacttgggggatctttttaaaagcaaagtaaatcctgccaccatgttgtagctcaatacaatgtgaactcactttttttttttttttaaataaatgtgttcttgttctgccatttttaaatcaaggtttctgttaacgaggcattccattttccattaataaagtttaccattcgcaaaaaaaaaaaaaaaaa

SEQ ID NO: 3771 - DNA, 4041 bp, Homo Sapiens
  NM_014652
agttccgctgggccgtgccggcctgtaccgggccgtgccgagccagaactggcaggagtgggggcctgagttggaggtgccggggacaggcgctcggggcagcccgcgccttgccgaggtccctgccccgtcccggccggcctggcttgtcttgtcagtcactggggcggaggcagcggctgtagcggggctgtagccgggcgttgagcacagcgcgggccaggccgaacggaagggacctgccacagcccctcaactccacggactcttcgccctagactagcggagctgcatctccgcgcttcgttggacgcctccgtaaccacgaagggctctctctctcccgtgaccctccagccccatgacctgttcatagcagccgagagctcacccaggcgggggtgttgtgggtacaggccatcgaccctgtgacccctcaagagccagggactcggtttcccccgcaggcctccctcccctgtgactccctccacacagattctggggacagagctgttacctgccactaggatccccgcctgagagctcctcactgacggctccctcctcggagtccccttcattgggtctcctaagagcaccaattttggtctctggcaagcctcccacccccaaacgaggtggggaggcctcggcagccatgcccgccctgggccccccctcaccccaccactccctgggcacccaagccggggtctagcagggggccagcagccaaggggctggggcaggagacagatcagggcccacctccctgccagggagggagcaaagatggagcggcgggaggagcagccgggggctgcaggggctggagcagcaccagccttggacttcactgtggagaacgtggagaaggcgctgcaccagctctactatgatcccaacattgagaataagaacctggctcagaagtggctgatgcaggcccaggtctccccacaggcctggcacttcagctggcagctactgcagcccgacaaggtaccagagatccagtactttggggccagtgctcttcacatcaagatctctcgctactggagtgacatccccactgaccagtatgaaagcctaaaggcacagctcttcacccagatcacccgctttgccagtggctccaagattgtactgactcggctgtgcgtggcactggcctcactggctctcagcatgatgcctgacgcttggccatgtgctgtggcagatatggtacgactcttccaggctgaggactcaccagtggatgggcagggccgctgcctagccctgttagagctgctgacagtgctgcctgaggagttccagaccagtcgcctaccccagtaccgcaaaggcctggtgcggaccagcctggcggtggaatgtggggctgtcttcccgctgctggagcagctgctacagcagcccagctcacccagctgtgtgcgtcagaaggtgctcaagtgtttctccagctgggtgcagctggaggtgccgctgcaggactgtgaggcgctcattcaggctgcctttgctgctctgcaggactcggagctcttcgacagcagtgtggaggccattgtgaatgccatctcacagcctgatgcccagaggtacgtgaacacactcctgaaactcatcccgctggtgctgggtctgcaggaacaactgcggcaggcagtgcagaatggggacatggagacctcccatggcatctgtcgcatcgctgtggccctgggcgagaaccactcccgggccttgctggaccaagtagagcactggcagagtttcctggcactcgtcaacatgattatgttctgcacaggcatccctggccactatcctgtcaatgagaccaccagctccctaaccctcaccttctggtacacactgcaggatgatattctatcctttgaggcagagaagcaggctgtataccagcaggtgtaccggccagtctacttccagctggtggatgtgcttctgcacaaggcccagttcccttctgatgaggaatatggattctggtcctcagacgagaaggagcagttccgaatttacagggtggacatctcagacacgctcatgtatgtctatgagatgttgggggccgagctgctcagcaacctctatgacaagctgggtcgtttgctcaccagctcagaggagccctactcctggcagcacacagaggccctcctctacggcttccaatccatcgcagagaccattgacgtcaactattctgatgtggtgcctgggctcattggcctcatcccacggatcagcatcagcaacgtgcagctggcagacactgtcatgttcaccattggagctctgtctgaatggctggctgaccaccccgtcatgatcaacagtgttctgcccttggtactgcatgccctaggcaatcctgagctgtctgtctcttctgtgtccaccctcaagaagatctgccgagagtgcaagtatgacctgcctccctatgctgccaacattgtggctgtgtcccaggatgtgctgatgaaacagatccacaagacaagccagtgcatgtggctgatgcaggcgctgggcttcctgctgtcagctcttcaagtggaggagatccttaagaacctgcactcgcttatctcaccctatatccagcaactggagaagctggcagaggagatacccaatccctccaacaagctggccattgttcacatcttggggcttctctccaacctcttcaccacactggacatcagtcatcatgaggatgatcatgaaggccctgagcttcggaagctgccagtgccacagggacccaaccccgtggtggtggtgctgcagcaggtcttccagcttatccagaaggtgctgagcaaatggttgaatgatgcccaggttgtggaggcggtgtgcgctatctttgagaagtctgttaagacgctgctggatgactttgcccccatggtgccacagctgtgtgagatgctgggtcggatgtacagcaccatcccccaggcctctgctcttgacctcactcgacagctggtccacatctttgctcatgagcctgcccactttcccccaattgaggccctcttcctgctcgtcacctccgtcacactcactctcttccagcaagggcccagggatcatcctgatattgttgattcatttatgcaactcctggcacaggctctgaagcggaagccagatttgttcctgtgtgaacgattggatgtcaaagctgtgttccagtgtgctgtgctggccctcaagttccctgaggcacctactgtcaaggcctcctgtggcttctttacagagctgctgcctcggtgtggggaagtagagtctgtgggaaaggtggtacaggaagacggtcgtatgctgctcatagcagtgctggaggccattgggggccaggcctcccgcagcctcatggactgctttgccgatatcctgttcgccctgaacaagcactgcttcagcctcctgagcatgtggatcaaggaggccctgcagccacctggtttcccctctgcccgcctcagccctgaacagaaggataccttcagccagcagatccttcgcgagcgagtgaacaagaggcgggtgaaggagatggtgaaggagttcacactgctgtgccggggtctccatggcacagattacacagctgactactgaggggtgcccccatcccatccaccccttctcttcatccttccctattcccaaagagtaaacctggaccctcactgctgtctctgcctcctttctgctgtcaccaccacctaactgaaagcctgggtccagaaggcctgggggaaggatgggaggatgcttggacccaggccttgggagggaatggtgggaacatcctctagctcccaggttggaagagatactactgtagccaagccacctaggctggagcccttcagaatactgtcattgtccttggggcggggtggttgcagtagtgtcatcaacccccccatccccattaaattaatcccaacatgcaaaaaaaaaaaaaaa

SEQ ID NO: 3772 - DNA, 3653 bp, Homo Sapiens
  NM_014655
aaatccaagatggctaccaggaggccgtcagttctcggaagtgcggcacatcctcactcctgggaggctcaaaggctcaaacgccattggcagaatccccgacagctcatcctccgccccctgcagggggcggtaatgacagagtcctaatttccggttccggcagtaccggtagcccagtcgagatggaggaagatgcgaccggcagacggcattcgctgggaacgacggatagactgggggctgcggcctagaggtccgggcttggagttcgcctcagacgcggtggagccgccggagtctgagaaggtcttcaggcaccatggaggacaaacgcaacatccagatcatcgagtgggaacacctggacaagaagaagttctacgtgtttggtgtggcaatgacaatgatgatccgtgtcagtgtctacccattcaccctcatccgcacccggttgcaagttcagaaggggaagagcctctaccatgggaccttcgatgccttcatcaagatcctgcgagcagatggtatcactggcctctaccgagggttcctggtcaataccttcaccctcatctctggccagtgttatgtcaccacttatgagctcacccggaagtttgtagctgactacagccagagtaacacagtcaaatcactggtggctggtggctcagcctcccttgtggcccagagcatcacagtgcccattgatgtagtctcccagcacctgatgatgcaacgcaagggtgagaaaatgggccgctttcaggtgcgggggaacccagagggacaaggggtagttgcctttggccaaaccaaggacatcatcaggcagatcctgcaggctgatggacttcgcggcttctatcgaggctatgtggcttcactgcttacctatatcccaaacagtgctgtctggtggcccttctatcacttctatgcagagcagctctcctacctgtgtcctaaggagtgccctcacattgtctttcaagctgtctcggggcccctggctgcagccactgcctccatcctcaccaatcccatggatgtcatacgaacccgtgtgcaggttgagggcaagaactccatcatcctgaccttcagacagctgatggcagaagaagggccttggggcctcatgaagggcctctcggccagaatcatctcagccacaccttccaccattgtcattgtggtgggctatgagagcctcaagaaactcagcctccgacctgagctggtggactcgagacactggtaaccagtggtggggagagaagcctgctgttttccacactaccgtgggtcaggggcagagtggagaggacagcaccctctccaggtgctcccaccacacacccagccctgccctgggccaagtggcctatctgggatagggatagagactttgaactgctcttgctgaagaggctccacgcctggatcccttgcccccactatttaaaattctcttctgagctgggctccctcactcagtccctgtatttgatactggcctaaagaccccaccccccaccctgccagcccttcttctggcttccccttccatctgtgtccctgagaccctgagaagagctgtacatagagcttgcttactaccactggttcttcctcttgggctttcagcccagactccaagcagctgctatcaaccctctctcccttcatctcttagccttgcttatttttattttgggaccgagctgcccactagatgactctgcttttccctgcatttggggctaaggtgccaggtacttatttgcacagggagcaggagcagcaaaaaatctctggttctccagagcactcgtcctctctttggaggggttattaggttgggagaaatgttgatacttttgttttgtgtgtgtgtgtgtgtgtgtgtgtgtgtgtgtgtgtgtgtgtgttttaacatctgtgaaccaggctattagtcctgctaaagcgccaatcctgctgtcagagctcacccccttcctaagacaggtagaaaaatgtaatgtagctttttccacaagccacttccctgtcccttcagtctcaggagccctaggagagtctaagctggggcatcccctggcccagaggactcccgtggtgggcacagttctaagtggatcaggctgtcttgggtgcactggacttggagcactaccttgagaagtcaggttgagaaagtagttgatctagaaggcaacaagtgggcatgtgttccccagcacattacccaggccagcagagccaaacctaggagagggcagtgggtagattctctgccccaggcagccatgacatacacataaataccccaatcactcagacttacggcaacaagtgttgtctcactatggtgatctctaagatccacatcactggatgcgtagtcatcccagtcatggtaccctgtggaggaatgctggaagaacataaagagcagttcagaaagtcacccaataccaggaccactgcatttaccagcctgatactgccaagattatctgatgctctcctcaggagctaggagaggagtgctccttcctccctaccgctactctccccaagcctgtgttgcaggtagagaggtgcagcaaatagagaaggcatgtcaaaccctgcatttctacctgagacgtgtgacctggatgatcctccaaaccctattggtcccaccccctgggaaaggccatggtgccagtttgaaaggtgctagctacctgaagccttgatatttcttcatggctgccgcacattcttccaccttggccagaacaggttctgaaaaccacttctctaccttcaccaccaccactgcccatcttgatctctttgagggttttcccatttcacttgatcttatttttgtttatcccttcctgcactttgtcaagagagtcctccagtttctatccaggaatgttcacatccaaagggttggacccacggatcattctgaatcttcctgcccctcctcactgcttaaccctgagaaccacaaatataatggaagcagttccccccaccctcaccccatctctttaagctcatcctagcaagacctctagagaccctagagactcgactttagtccttccccgccatggcacagtggggaaggtgtcaatggggagtgtcacggacaggaggtaggatcctgccgctcgcgtcttagtgtttctccctcaagactttccttctgttttgttgtcttgtgcagtattttacagcccctcttgtgtttttctttatttctcgtacacacacgcagttttaagggtgatgtgtgtataattaaaaggacccttggcccatactttcctaattctttagggactgggattgggtttgactgaaatatgttttggtggggatgggacggtggacttccattctccctaaactggagttttggtcggtaatcaaaactaaaagaaacctctgggagactggaaacctgattggagcactgaggaacaagggaatgaaaaggcagactctctgaacgtttgatgaaatggactcttgtgaaaattaacagtgaatattcactgttgcactgtacgaagtctctgaaatgtaattaaaagtttttattgagcccccgaaaaaaaaaaaaaaaaaaaaaa

SEQ ID NO: 3773 - DNA, 3931 bp, Homo Sapiens
  NM_014657
gagagtgagagaaaggctggaagacgagacctgctcactctgtcaccgaggctagagtacagtggcacaatcacagctcattgcagcctcaacctcccaggctcaatcgatccttccaactgagcctccctagcagctgggactattagtgcacaccaccacacctagcctgcaggatgtttcctcaatgaggggaaggctgctgcacaatggcagtttttgatactcctgaggaggcctttggtgtcttacgtccagtctgtgttcagctcacaaagacccagacagtggagaatgtggagcatctgcagacacgactacaagctgtgagtgacagtgcccttcaggaacttcagcagtacatcctcttccctctgcgatttaccctgaagaccccaggtcccaaaagagagcgtttgatccaaagtgtggtggaatgcctcacatttgtcctttcttcaacatgtgtgaaagaacaggagcttctccaggaactcttttcagaactctctgcttgtctgtattcacccagctcccaaaaacctgcggctgtgtccgaggagttgaaattggctgtgatccagggacttagcacattaatgcactcagcttatggggacatcattctgactttttatgagccctccattctgccacgtttaggatttgctgtatctttactgttaggccttgcagaacaggagaaatcaaagcaaattaaaattgctgccttaaaatgtttacaggttctactcttgcagtgtgattgtcaggaccatccaaggtcattggatgaacttgaacaaaagcagctgggggatttgtttgcctcttttttacctggaatctcaactgcactgaccaggcttatcacaggagactttaaacaaggtcacagcattgtcgtatcttccctaaagatcttttacaagacagtgagcttcattatggctgatgaacagctcaaaagaatctcaaaggtccaagcaaaacctgcagttgagcacagagtagcagagctgatggtttacagggaagcagattgggtaaaaaagactggcgacaagttgactatccttattaaaaagataattgagtgtgtttctgttcacccacactggaaggtgagactggaactggtagaacttgtggaggaccttcttttgaagtgcagtcaatcattggtcgaatgtgctggtccccttctgaaggccttagtgggactagtaaatgatgagagtcctgaaatccaagcccagtgcaataaagttctgagacattttgcagatcaaaaagtagtggtgggcaacaaagccctcgctgacatcttgtcagaaagcctgcattcccttgccacatctcttcctcgcctaatgaactcccaagatgaccagggcaaattctctactctttccttgttacttggttatctgaaactcttgggcccaaaaataaactttgtcctcaactctgtggcccatctccagcggctttccaaagcactcatccaagttctagagctagacgtggctgacatcaagattgttgaggaacggcgttggaactctgatgatctgaatgcttctccaaagacctcagccacacagccttggaaccgcatccagaggagatatttccgcttcttcactgatgagagaatcttcatgctcttgaggcaggtttgtcagctacttggttattatgggaatctttatttgcttgtggatcactttatggaactttaccatcaatctgtggtttaccggaagcaagctgccatgatccttaatgaactggttacaggggctgctgggctggaggttgaggatcttcacgaaaaacatattaaaacaaacccagaagaactgagagagattgtgacatctatacttgaagaatacacaagtcaagaaaattggtatttggttacctgtcttgaaactgaggaaatgggagaggagctgatgatggagcacccaggcctccaagccatcacgtctggtgaacacacctgccaagttacatcttttctagccttctcaaagccaagtcccactatttgctccatgaacagtaacatctggcaaatatgcattcagttggaaggaattggccagtttgcatatgcactaggaaaagacttctgtttgctcttgatgtcagccctttatccagtactggagaaggctggagaccaaaccctactcattagtcaggtggctaccagcaccatgatggacgtttgccgtgcttgtggctacgactccctgcagcacctgatcaatcaaaattcagactatttagtgaatgggatctctttaaatctgcgtcatctggctctgcatcctcataccccaaaggtcctggaagtcatgctgcggaactcagatgctaacctgcttcctttggtggcagatgtggttcaagatgtcttggccaccctggaccaattttacgataagagagctgcttcctttgtcagcgttctgcatgctctgatggcagcattagcccagtggttcccagacacaggtaatcttgggcacctccaagagcaaagtttaggagaagagggaagtcatttgaaccaaagaccagcagctcttgagaagagcaccaccacagctgaagacatcgaacagtttttgctgaactacctcaaagagaaggatgtggcagatggaaatgtctcggattttgataatgaagaagaggaacagtcagtccctcccaaagtggatgagaatgacacccgtccagatgtggagccaccactgccattgcagatccaaatagccatggacgtgatggaacgctgcatccacttgttgtcagataaaaatctgcaaatccgcctgaaggtcttggatgtgctggatctgtgtgtggttgttcttcagtcccacaaaaaccagctgcttcccttggctcatcaggcctggccctcgctcgttcaccgactcacacgggacgcccccctggcagtgcttagagccttcaaggttttacgtaccctgggaagcaagtgtggtgactttcttcgcagccggttctgcaaagatgtcctgccaaagctggctggctccctagtcacccaggcccccatcagtgccagggctggaccagtttactcgcacacgctggccttcaagttgcagctggctgtcttacagggcctgggccccctctgtgagagactggacctaggtgagggtgacctgaataaagtggctgatgcctgcttgatttacctcagtgtcaaacagcccgtgaaattacaagaggctgccaggagcgtcttcctccacttgatgaaggtggacccagactccacctggttcctcctgaacgagctttactgccccgtgcagttcacacctccccaccccagcctccaccctgtgcagctgcacggggccagcgggcagcagaacccctacacgaccaacgtgctccagctgctcaaggagctgcagtgaccctgctcccccaccacagaggccaccgatccctcccctactgccagccagaagctgggctgaccccaccccggccataggcggtggcagcggcagcagagaaggtgaattagttagccaatcgatttataaattgatcgatcacacaactgcttagaaatggattgaaggaaagtagctgactattatttatatttcataccttgtgttttcaagtgacattgtctggtggctctaagggtttaaccccttagcctaccatctctatagccccagctccctcacaggccacacacacacacacacaagaggtcagttcccctccatctgcatacacctccctgtcttcaaataatgagatggaactaatttgttttacctaacctgatctttgggaaacaaacggaaataaagacacttcttggatgaaaagtaaaaaaaaaaaaaaaaaa

SEQ ID NO: 3774 - DNA, 5740 bp, Homo Sapiens
  NM_014661
cgccgccgccgcacgccgcctgcctcctgcacgccgccgccgcgcctagcgcccgggcccgcgacaccgcccgctaagcgccgggccgagttcacgcagccgcggtctggcggctccgcggcggcggcgggtgcgggcggcctggccggtgccggttaaagggacgagttgcaaacacttcaggaagtgacaagtcgatttcctcctccccgggagtcgctcgtacaaagcgctcggcgccggcaggcgagcgtgcgcgcggcggacgcgcggcgggcaccccggacgacttggcgagcgctggcggtgacggcgcggggtccgcgcccggagcgccccgccgcgcacaggagttgaccacatttggccatttcccagaagggccccaccccaagggtgagtggccaatggggagctgtttctgctgacatcaattccccaggaggtactcaccccaagtctgcccaagtgaagatggctgatacccaccctgggatggagcccagcgcctgaggcccttatcatggtgatggtcctaagtgaaagcctcagcacccggggagctgactccattgcatgtgggaccttcagccgtgaactgcacacgccaaagaagatgagtcaaggacctacacttttctcttgtggaattatggaaaatgacagatggcgagacctggacaggaaatgccctcttcagattgaccaaccgagcaccagcatctgggaatgcctgcctgaaaaggacagctcactatggcaccgggaggcagtgaccgcctgcgctgtgaccagtctgatcaaagacctcagcatcagcgaccacaacgggaacccctcagcaccccctagcaagcgccagtgccgctcactgtccttctccgatgagatgtccagttgccggacatcatggaggcccttgggctccaaagtctggactcccgtggaaaagagacgctgctacagcgggggcagcgtccagcgctattccaacggcttcagcaccatgcagaggagttccagcttcagcctcccttcccgggccaacgtgctctcctcaccctgcgaccaggcaggactccaccaccgatttggagggcagccctgccaaggggtgccaggctcagccccgtgtggacaggcaggtgacacctggagccctgacctgcaccccgtgggaggaggccggctggacctgcagcggtccctctcttgctcacatgagcagttttcctttgtggaatactgtcctccctcagccaacagcacacctgcctcaacaccagagctggcgagacgctccagcggcctttcccgcagccgctcccagccgtgtgtccttaacgacaagaaggtcggtgttaaaaggcggcgccctgaagaagtgcaagagcagaggccttctctagaccttgccaagatggcacagaactgtcagaccttcagcagcctcagctgcctgagcgcagggacagaggactgcggtccccagagccccttcgcccgccacgtcagcaacaccagggcctggaccgccctgctctcagcctccggcccagggggcaggacccccgctgggaccccggtccctgagcctcttcccccttccttcgacgaccacctcgcctgccaggaggacctgtcctgtgaggagtcagacagctgcgccctggacgaggattgtggcaggagagcggagccggctgcagcctggcgggaccgcggggcccctgggaacagcctctgctccctggacggcgagttggacattgagcagatagagaagaactgagggggtgtgggcccaggcagggctggggtgtgctggcatcgacagcccccactctgggcactaggtgggcccttgaaggggagcccaactcgtgggcctgatgaaagcttcctgagtggtgtcgggtcccagagagggagcccacctgctgcctgggggagagcctggcctggccgcgtcatacagcgggtgtgtcagcctctcaccggctccccgagcgtggcagccaccaggtccacagaactactgcagcccagaggacagctttgaagtttgcgtcttttctgcctctttccctgtgggatgttgggcagtctctgttgtccccggcagagctgggcaccgctctgtatccccctggtggtgggggctgtcagggagggcctggggtgggggccaggggccatctgctatgtcagggcccttcttggcctcactcaggttcacttctggggagtcggccccgcagcttctttcactcagttttactccgtgccttctctcccaggtctccctgcttcaggcttgggaaggttcgggagatgcttccttctgtaacaccagaaccatttggccttaattccaatgtgagagacagaatccctggggtgctggactggccctccagagggtaagccatgtccggagtctcgggcccaaggaacgatttggagggtgcttgttagggcctcccgtgttgggtagaaatttggtggatctgttggctgaaaagacggacttgcttgcctctcctacagcatggagaggctgaccccatggctctgccaccgttggggcagggttagcagatggcagcccttctctgtggctgacaggtcactgagtgataagcatggttggttccggtgagtgtagggatggcacgataccagggcagcctcttgaaaacggcctcgggagacgggagctgcgagcaggtgggcagatgagggccctatgcgcactcaggggtgaagggcgtccgctggccactctgcaggggcccctgcaggattccaggcacctcccgtttgtccttgaggactgctggctgtaaccagggcacatcacccacctcaagacaagcccacgcccttgtcagcttagggggagcccagtcctgagggctgcatctctgttgtaggcccagccaccggcacaaagctggattcatgctccctgcccctaccccaccctggctcctcaccctggggcatccgaggagcctagccccctgagggtttgctctcctctcaaggtttgtagctcctctccggctgccttgcagacaccaccacatgggctctgctctatgggaatctggcttttagcgaatgtggcgtcttctgcaaacaatagcaattgggctggcttaggagcaagtggctcattttcccataaggctaaaaataactggtgcgctcccttgtgttggctgacacgcgcgttcaaagcacttttgtagtcactttgcttttgctcgtcttcatggacgagtgaacgcctcgcttctgcaggttgagtccagatgcttctcaccttctttctcctcaagaaagatgctttttgggaaacgttgtttaaatcttatttttttactacatcaaaaggatggtggttcaagttcccaatatgtgggtggcacttcttaaaaatcagctttaaggagctggcagaaagcccccagccccacagccctgagagatggtgttgctagctcaggtggctgacacatggggtatgccgggcactgggcaggtcccagagccggggaaccagctcacctctggttgctgtagctcctgccggaggcatgtctacttgtgatcccggacagccgaacccaagagctggtggctctgagcagacagagacatcttggcctgtccctgcctgggggtcatggagaccatgtcttcttagagcaaatgtggaggcggccagggcagttgttgggtgaatgtggagagcacatggccatgtcttgcccccggagtaccactgggcgtggggggtcctggcaccacatgcccggtgtggccgagggcacacagcctctatagcaggccttcctgtggaaggcagaggcagtgagggaggtggacggtgccagctgaggctgaggcatgcagcagcccccagctacctttgcttagggctggggtgggaggcacatggtgacaggtatatgtcgtgggactggggtgtgggtgacctgccctcaaaccttgcctgccacctccccattcaggcctggtggcaggaagggacaagctgtggagctggctgagtcacagccacctccccacctccccgcaagctggtcccatcgaccagcaagcccagccccagggcgcttagggagaaatgacccagcctcctcagaccccgcctgcctgtcctgtgcccaccacgcagcagtcaggggagaaaatggtggctatcccttctgcttagagaaagaaatggcctttagctggtttcatgtttgtgttttgactggagggagtagaccctatctataaggtgccaccccatcatccaagctgccacactgcccggagcagcctgttcctgcactccaccctgctggccccaggacttctgatctcagtcctctgggagggaggttcgcctaggaggtgccccccacattggtgtccccatgggcagcaggcagacagctcacccccaccagcatgatggccccagctgggggcagtggcaggagccttacttttgtcacagccttgcccacaaaccctgcctctgaggggagactgaggaagggcagagccagaagcaagccgtgccaggccatctgcctgctcatggggtcctaaagcgcgggctaagcctgcaggaaagccggggcggtggggggggcttagtgccacatgcaccccactcattccaaagccaccaaactgccaggggctgccgtccacccgtggggcccaggggctggggccacagccttgccattttcgttgccataccctcttgccttactcgcggtggaggccggatttgcacgggcagacgtgcacctgggcccgtggggagcttgttctgaccagacgtacagattttcattctcagaaagccttacttttcaaccaaatttttgtagccagttttgtgaatttgtacactgaaagaaaatttaaataaaggggaagtccacattaaaaagaaaacaaaacaaaccctaactaacttccaaatgggtctcctggtgcgggggcgtgagtggccgtgccctgggtgtgctgcctgtctgagcaagcttccctagctgtggaaccccgggccccctgctgcgggctctgccttggtgtcatgcctgctgcacccccgtttccactgacgtgccgtctgtggctatgggggtggtcactggaatgacggtcactccagacgtcagccggcagggatgcagcaggctggccgcgcaccggggctcgggcaccctctggccccacactggcaatgatgccacaccttgccatgtccacgctgttggtcaaacccctctgtcatgcctctttaaagagaaaagaagagaaagattttttttttttttaatggcagaccgaagtggagatcttgtagcctagataggatagtctgaccttctagcatagtctttttggcaaatgatttgtgttttcagtgtgtggggaagctgtcctgggggctggggcgacagatagcacataggctgtttctggggctgcaggggcttccctgagctggatgttgtgggtgttgccgtgcttcaggaagtgtggcgaccagaaagcgtagacccggggcccagggtctgcccgcccctgcagcctggcctccccgcacaggctgtggcttgcactccagccgctctagtctctcaggaatttgcttgttacttgtactgtgtaaataaagcttcctggttcaataccc

SEQ ID NO: 3775 - DNA, 5394 bp, Homo Sapiens
  NM_014662
atctggaggaggcgcagggaacctggagagggtccagccctcagtgccccggccagaggcgggaaggggctctagagcttcgggaggcaagatgacttctctgccccaagcttggaacagctaaagggaaaaacagtgcaagatgagaacaacaaaggtctacaaactcgtcatccacaagaagggctttgggggcagtgatgatgagctagttgtgaaccccaaagtgttccctcacatcaagcttggagacattgtagagattgcacaccccaacgatgaatacagccctctgcttttgcaggtcaagtctcttaaggaagatttacagaaggaaactatcagtgtggaccagactgtgactcaagtgttccggctgagaccttatcaggatgtctatgttaatgtcgtagaccctaaggatgtgacccttgacctagtggaattaacttttaaggatcagtatattggccgtggggatatgtggcgactaaagaaaagtttggtcagcacatgtgcctatatcacccagaaggtggagtttgctggcatcagagcacaggctggtgaactgtgggttaagaatgagaaggtcatgtgtggctacatcagtgaagataccagggtggtgtttcgttctacgtcggctatggtttacatatttattcagatgagctgtgaaatgtgggattttgatatttatggggatttgtattttgagaaagctgtgaatggtttccttgctgatctatttaccaagtggaaggagaagaactgtagtcatgaagtgacagtggtcctgttttctagaactttctatgatgcaaaatctgttgatgaatttcctgaaataaaccgagcctcaattcgacaggatcacaaggggagattctatgaagacttttacaaagtggtggtgcagaatgagagaagagaagaatggacttcacttctcgtaaccattaaaaaactcttcatccagtatccagtgttggtgcgactggaacaggcagagggctttcctcaaggagataattctacctcagcacaaggaaactacctggaggccatcaatctgtcattcaatgtgtttgataagcactacatcaaccgcaactttgaccgaactgggcagatgtcagtggtgatcacgcccggggtgggtgtctttgaagtggaccgcctactcatgatcctgaccaagcagcggatgatagataatggaattggtgtggatttggtgtgcatgggagagcaaccgttacatgctgtcccattgttcaagctccataatcggagtgctccccgtgattctcgtctgggcgatgactataatatccctcactggataaaccacagtttctacacatccaaaagccagctcttttgtaatagtttcaccccacgaataaaactggcaggaaagaagcccgcctctgagaaagcaaaaaatggccgtgatacatctctcgggagtccaaaagaatctgagaacgcccttcccatccaagtagattatgacgcctatgacgctcaagtgttcaggctgcccggcccatcccgggcccagtgcctcaccacctgcagatctgtgcgagagcgagagagtcacagtcgaaagagtgccagctcctgtgatgtttcatccagcccttccctaccaagccgcacactgcccactgaggaagtgaggagccaggcttctgacgacagctccctaggcaagagtgccaacatcctgatgatcccacacccccacctgcaccagtatgaagtcagcagctccttgggatacaccagcactcgagatgtcctggagaacatgatggagccaccacagcgagactccagtgcaccagggaggtttcacgttggcagtgcagaatccatgctgcatgttcgacctggtggatacacgccccagagagcactgattaaccccttcgctccctctcggatgcccatgaagcttacgtccaacagaaggcgctggatgcacacttttcctgtggggccatccggagaagccatccagatccaccaccagacccgacagaatatggcggagctacaaggcagcgggcagagggatccaactcactcctctgcagagctgctggagttagcatatcatgaagctgctggaaggcacagcaattcccgccagcctggtgacggcatgtccttcttgaacttcagtggaacagaggagctttctgtcggcctgcttagcaacagtggtgcaggtatgaatcctaggacccagaataaggattctctagaggacagtgtttctacctctccagacccaatgccaggcttctgttgcacagttggagtggactggaagtctctcactactccggcgtgcctcccccttaccaccgactacttccctgaccgccagggcctgcagaatgactacacagagggctgttatgatctccttccagaagcagacatcgacaggagggacgaagatggtgtgcagatgacagcccagcaggtatttgaagagtttatttgccaacgtctcatgcagggctaccaaatcatagtgcagcccaagacacagaaacccaatcctgctgtcccgcccccgctgagcagtagcccactctatagccgaggccttgtgtcccgaaaccgccctgaggaggaggaccagtattggctgagtatgggcagaacgttccacaaagtgacgctgaaggataagatgatcacagtgacgcgataccttcccaagtatccttatgaatctgcccagatccactacacctacagcctctgtccttcccactcagactcagagttcgtctcctgctgggtggaattctcccacgaacggctggaggagtacaagtggaattacttagatcagtatatctgttctgccggctctgaagacttcagcttaattgagtccctgaagttctggaggacccgcttcctgctgctgccagcctgtgtcaccgccaccaagcgcatcacggagggggaggcccactgcgacatctatggggacaggccccgtgcagacgaggacgagtggcaactcctggatggttttgtccgctttgtggagggcttgaatcgcattcgcaggcggcatcgctcggatcgcatgatgcggaaagggaccgccatgaaaggcttgcagatgactgggcccatttccacgcattctctggagtcaactgcacccccagtggggaagaagggaacctcagctctctctgccctgttggagatggaggccagtcagaagtgcctgggagaacagcaggcagctgtgcatggtgggaagagctccgcccagtcagccgagagcagcagcgttgccatgactcccacctacatggacagcccacgaaaggtatctgtggaccaaacagccactcctatgttggacggcaccagtttgggcatatgcacaggccaatccatggacagaggcaacagccagacctttgggaactcccagaacataggagaacagggctactcctccacaaactccagtgacagcagctctcagcagctggtggcaagctccttgacctcatcctctaccctgacagagatcctggaagccatgaagcacccctcgacaggagtccagctgctctctgaacagaagggcctctcaccgtactgcttcatcagcgcggaggtggtacactggttggtgaaccacgtggaggggatccagacacaggcgatggccattgacatcatgcagaaaatgctggaagagcagctcatcacacatgcatctggcgaagcctggcggaccttcatctacggcttctatttctacaagatagtaacggacaaagagcccgaccgagtggccatgcagcagcccgccaccacctggcacacagcaggagtggacgacttcgccagcttccagcgcaagtggtttgaggtggcctttgtggcagaagagctcgtgcactctgagattcctgcctttctcctgccctggctgcctagccggccagcctcctatgcaagtaggcacagctcctttagccgaagttttggaggacggagccaggcggcagcacttttagctgccactgtcccagagcagaggactgtgaccctggatgttgacgtgaacaaccgcacagaccggctggagtggtgcagctgttattaccatggcaacttttctctgaatgcagcctttgagatcaagctgcactggatggcggtgaccgcagcagtactcttcgagatggtccaaggttggcatcggaaagccacctcctgtggcttcttgttagtcccagttttggaggggccttttgcactgcccagttacctgtatggcgacccccttcgtgcccagctcttcatcccactcaacatcagctgcttgctcaaggagggcagcgagcacctgtttgatagctttgaacccgaaacgtactgggatcgaatgcacctcttccaggaagccattgcacacaggtttgggtttgtacaagataaatattctgcctctgcttttaacttccctgctgagaacaagcctcagtatatccacgttacaggaacagtgtttctgcagctgccctactccaagcgcaagttctcagggcagcagcggcggcggcggaactccaccagctccaccaaccagaacatgttctgcgaggagcgggtcggctacaactgggcctacaacaccatgctcaccaaaacatggcgctccagcgccacaggggatgaaaagtttgctgatcggctgctgaaggacttcacggacttctgcatcaaccgtgacaaccggctggtcacgttctggacaagttgcctggagaagatgcatgccagtgccccgtgaggccaggctgcacctgtgctgggggaaggtgggtgagccactgccctcaaacccggggcggaggattccaggcaggctctaggagtcaggtgtccgtttgctgctatcagtgagtgggggccattgttttttgtttgtttgtttgtttgtttgtttgtttttggcccccacgacaagtcttctactctagaagaaagactttggaagcagctgctgctgctgccaccactcctgtcagcaagtgctcagagcaggtgggaggcacagattgtccgtgggagggctccagtgtctgggaagagggcaggcggcccccatgaatgtcctcggaagggggtggctcctggtagcatccttttccttcaccatctatgggatattaggggcagaatctgccacttcttgcccaggagtgtgcacagatgtaagataattttgtgaaataatgtaccatagactctcaccaactgtatatacctgtacatatcagaagcaaataaagagctccacgtgcatcaaaaaaaaaaaaaaaa

SEQ ID NO: 3776 - DNA, 5369 bp, Homo Sapiens
  NM_014665
ccgggcggggagcggcggacggtctaggcggggctggaggcggtggctgcggttgcgggaccggcactatgctgggccttcctaccacttgtgtgtggcttggtagtggcctagggtctctcctccctgctgaagtccctctcctgcaggtggccgtctgcccggcccagcaccatgcacacgcttgtgttcttgagcacacggcaggtgctgcagtgccagccagctgcctgccaggccctgcccttgctgccacgcgaactcttccccctgctgttcaaggtggccttcatggacaagaagacagtggtactgcgcgagttggtacacacgtggcccttcccgctgctcagtttccagcagctgctacaggagtgtgcccactgcagccgtgccctcctgcaggagcggcctagcactgagagcatgcaggctgttatcctggggctgactgcccggctccacacctcagagcctggggccagcacacagcccctctgcaggaagcatgcgctgcgggtgctggacatgacgggcctcttggatgatggtgtggaacaggatcctggcaccatgagcatgtgggactgtactgctgccgtagctcgcacatgcattgcccagcagcagggtggggccgcagagcctgggccagcccccatccccgtggaggtgcgcgtggacctgcgggtgaaccgggcctcctatgcgttcctgcgggaggcactccgaagcagcgtgggcagcccgctgcggctctgctgccgggacctgcgagctgaggacctgcccatgcgcaacactgtggccctgctgcagcttctggatgcaggctgcctgcgccgcgtggacctgcgcttcaacaatctgggcctgcgcggcctgtctgtgatcatcccacacgtggcccgcttccagcacctggccagcctgcggctccactatgtgcatggggattcaaggcagccctccgtggatggcgaggacaacttccgctacttccttgcccagatgggccgcttcacctgtctgcgtgagctcagcatgggctcctctctcctttcagggaggctggaccagctgctcagcaccctgcagagccccctggagagcctggagttggccttctgtgctctgctgcctgaggacctacgcttcctggcacggagcccacatgctgcccacctcaagaagttggacctgagtggtaacgacctgtctggcagccagctggcacccttccagggtctgttgcaggcatcagcagccacactgttgcatctggagctgactgagtgtcagctcgcagacacccagctgttggccacactacccatcctgactcagtgcgccagtctccggtaccttggcctctatggcaacccactgtccatggcgggcctcaaggagctgctgcgggactcagtggcacaggctgagctgcgtactgtggtgcaccccttccctgtggactgctatgagggcttgccctggccgccgcctgcctctgtcctgctggaggcctccatcaatgaggagaagtttgcccgcgtagaagctgagttgcaccagctgcttctagcctcaggccgtgcccatgtgctctggaccacggacatctacgggcgactggctgcggactacttcagcctatgatgaagtagctctgggtgagacacaggccgccctgcagtctctttaggtaggcagggcctttgctgggacccctggtggaggccttcacaaaagcactggttactggtttcctgctgggtctaccttgcttctgggcacacctcaagcctcccctgctttctgcagtgccccacgcggttttccctgcacttgctccataattggctgatcatctgtgggccccggggctggatgtcaggcctccattgccctgctcagtttggctgcatttggctgccgtctggggtcctggtcctttgtgcaaatgctttgggattccagttgtgagctgagagagatgatggcctctctgggcctttcctctccctttactgagagctcagtgcttctggggttgaagttggacagaggcctgcttcagggaagctgggagtccccaggcactcacgcctcttacgtgttccctaccctgccacccagccaccccactgggctgggctcgggctggagggggtcatcaaggtacacatgtgcctggaagttgaatttgtggctgtttttttttctgtccacgttggtcacccttatccttatctctgctgtcacccccaacatggccacccggcaacaactgccatccagcctgtcgccccgcccttcgcggggcagccccgtcggcactgccggccagtccttgctcttcccacctttcggaggcccaagatcctactgtggccggccagggccagcgagggaccccccccatgcagagctggaggttggggtgatgtcttttcggaagagcttcaagggaggtgttggggcctccccggccaccttccattgctaccccaggattcccgagtgcaacgttcccggctcgcgccccacacacggctcagcgcacactgcgcggcttccacctttactgacggagcatgcgcgaggccgcaccggccaatctccggcgcccacgtcatccgcgcgcccgcggccctagcagtggatctcgtaggcgaccggcgggggcacgcggagtcccggccccgccccctgttccgggccgcagtcagcgggcgcctccgccggaccctcggcgaagagcggcttggagcggttgatgacgaacatctcgtggccgcgctcgtcgcggagctcctctagctgtgcgaacgtacaggggccgtccaagtagtcgttgacgaacagcgctccctcccccggaggcccccgcgccttttttcgcctgcggcgccggcgacagatcatggcgaccaggagcagcgccgtgagcgccagcagcgcgatggccgccgcaatggccgtctgtgtggccacgcccagggcgcggaaggccatgctgcccgcctcgggccggggctcgctgccggcggggcgggcggccggaggcggcggttgcgcgggctgctgcggctgctgccgggacgcgttgaccaggagccggaagggcacgcgggcagcgccgccggcgttggaggcctcgcactcgtacttaccggcgtgcgccagcgtgatgttgctgaggaagagcatgccgctgcccgtgtcggatgccgagtgtccgcccaggcccagcaacccgccttctagctgggcctgggctcgcggccggccctcgcgaggctggggcacctttctccaggtcaccaatggctgcgggtagccggaggcttggcaggcaacccgcaggtcctcacccaggttggctgtgagctccagcggctgcacgtggacagagggcggaatgcagatgaggctgctgtgggatacgtccaggagactctggagcgccaggcgcgggggctctgcacacatgatcttcctgtccctggaggtgagcagccgctggccgccctccttgatccaggcacccagccagtgcagggcgcagtcacagcgccatgggttctctgtgggagagcagcgttaggcaggtggcttgagggtgctgctaaaacagcctgtgcagttggggttttgcaggccaggacagaggcctctttcccacctcccacagcgttttcacacggagtccaaggccctgccaccccttccttgaccccaagctccttggggcggcaggcccttcaccctcgcccccctcccctttagctctgtgatgcctgcctgttacagatcacttctccgtcggtctctgagaaagcacctgctccttaagtcttcctgcaacaagtgccactgtttttaggaacctgggcgtccacatagacatctcaccagcactgaaacctcacaagtcctctcagccttgcctttggatgccctctcttgggaatgtccccagtcctggtcagctgtctctctcctttgcaattttgtctgcctcccctcagcctaaaagtgtgcagaaccctcaattctgttaagtcaccctgtggagttcctgtcttctgttttccccaggcagggtgcctgagctgtattccccagcacacccactcccgcagccctccagtgtggctgcaggcggtggtgcagccttccagactgctgcccagttgcctgatgtcagagcccctccacacatgagcctgctccctactgccaacaccgtggcccagacagagacgctttccgaggaagaggtacctgtgaggcgcaggacttgcagactggccaggggctgcagggcctctcggctgatggtgcccagctggttcctgctgaggtccagcagtgctagggaggacagccccgctagagcctggtcctccagcagctcaatgctgttttcttgcaggtgaagctcctgcagtcgctgaagtaaggacagcagatcgtgaggaaaaagggcgccgaggttgggggcatgtctctcttcttaccaagctagactgggttgccttttctaactattccagccctacagggcgaggggccataatggagtatcccgcccctttagaccccaggcgctcaccggcaggtgcaagaaggtgaaatccagcagccgcgccagctggttgcccgccaggtagagcacgcgcagctgggccaggcctacgaaggcgccgctgcgcaagccgcgcagccggttgctagtgagcgccagctccagcaggcgcggctgcgcgcggaaggcgccggcctccagggcgcgcaggctgttgttgtgcaggtagagccggcgcagagcggcgagtggcgccagggctcccggctctaggcgggcgatgttgttgtcctgcaggaacagtgtctgcaggccggggaaagaggaggcgcttaccccgttgcgggggtcttcctctccctgggggcaccccgtcctcccgcagctccacacggtgcccacctgcgtccctggcgggattcccagcgggacgacgcgcaaccgcagggcgccacactccaccgtggcgctgtagcagcggcaggctgctgggcagccggcggcgcggagcggcagtagtagcagcagcagcggcagcagtgcgggggccctcagggccatctcccgaggcccggttcctcaccggcccttccgcggttcagccgcagacgcgtgccctcctgaaacacaggttggcaggccagtctcggcagtcgagagccagccaatagatggaatggaggcctgcacctgcgtctaacttttgacgctataaataggttcaagaaactaataaaacgttctggttttctcctttgacaaaaaaaaaaaaaaaaaa

SEQ ID NO: 3777 - DNA, 4007 bp, Homo Sapiens
  NM_014666
acttccgctccacgcagcgcctgtgctgccgcgtctcgacgtgtcaccggcggcgccgctgctgtggcaaaggaaggagctgactgggggagttcgaggcggcgggcggcggtgaccccggcctggaactgccccggtacggaagtgttccggggtccgtggggagcaggagagggaggcggcggaccgtcccgcgcggggcacgatgttgaacatgtggaaggtgcgcgagctggtggacaaagccaccaatgttgttatgaattattcagagatcgagtctaaggttcgagaggcaacgaacgatgatccttggggaccttctgggcaactcatgggagagattgccaaggctacatttatgtatgaacaatttccagaacttatgaacatgctttggtcacgaatgttaaaagacaacaaaaagaattggagaagagtttataagtcgttgctgctcctagcttacctcataaggaatggatcagagcgtgttgttacaagtgccagagaacacatttatgatttacgatccctggaaaattaccactttgtagatgagcatggtaaggatcaaggtataaatattcgacagaaggtgaaggaattggttgaatttgcccaggatgacgacaggcttcgtgaagagcgaaagaaagcaaagaagaacaaagacaagtatgttggggtttcctcagacagtgttggaggattcagatacagtgaaagatatgatcctgagcccaaatcaaaatgggatgaggagtgggataaaaacaagagtgcttttccattcagtgataaattaggtgagctgagtgataaaattggaagcacaattgatgacaccatcagcaagttccggaggaaagatagagaagactctccagaaagatgcagcgacagcgatgaggaaaagaaagcgagaagaggcagatctcccaaaggtgaattcaaagatgaagaggagactgtgacgacaaagcatattcatatcacacaggccacagagaccaccacaaccagacacaagcgcacagcaaatccttccaaaaccattgatcttggagcagcagcacattacacaggggacaaagcaagtccagatcagaatgcttcaacccacacacctcagtcttcagttaagacttcagtgcctagcagcaagtcatctggtgaccttgttgatctgtttgatggcaccagccagtcaacaggaggatcagctgatttattcggaggatttgctgactttggctcagctgctgcatcaggcagtttcccttcccaagtaacagcaacaagtgggaatggagactttggtgactggagtgccttcaaccaagccccatcaggccctgttgcttccagtggcgagttctttggcagtgcctcacagccagcggtagaacttgttagtggctcacaatcagctctaggcccacctcctgctgcctcaaattcttcagacctgtttgatcttatgggctcgtcccaggcaaccatgacatcttcccagagtatgaatttctctatgatgagcactaacactgtgggacttggtttgcctatgtcaagatcacagaatacagatatggtccagaaatcagtcagcaaaaccttgccctctacttggtctgaccccagtgtaaacatcagcctagacaacttactacctggtatgcagccttccaaaccccagcagccatcactgaatacaatgattcagcaacagaatatgcagcagcctatgaatgtgatgactcaaagttttggagctgtgaacctcagttctccatcgaacatgcttcctgtccggccccaaactaatgctttgatagggggacccatgcctatgagcatgcccaatgtgatgactggcaccatgggaatggcccctcttggaaatactccgatgatgaaccagagcatgatgggcatgaacatgaacatagggatgtccgctgctgggatgggcttgacaggcacaatgggaatgggcatgcccaacatagccatgacttctggaactgtgcaacccaagcaagatgcctttgcaaatttcgccaattttagcaaataagagattgtaaaagaagcagattgaatgaagaatttttagctgtgcagataggtgatgttgggatggaaaatgctaatcaactaccctttcttttatcaagtaattaaaataaatctacataaagaaccaaaaaggctgttttataaaagtgaaatatccagtatttcagagggccaggcaagagcacttcagatgaggcagtcaaaatcatttttttccagtgaggatagaccacaagtgggtggtgagaccattgaaagcctttatcaactgaagagtccatttaacagcataatttgtgggaagactggaatagggctgaataaatgtgtttgaatctctaattttatactttcttttcctgaggaacttgatttttctgtccctggatcgccttgtcataattgggtctgttccttttactaccactcttgagtccatatatgaaatcattaaagttggatgatcagttttttataaaaatatatatttttgtccaagaaaaaaaaaagcatacatatgtgattatggctaaatcaaaggtaactggaatgtatatacttttgctaatgttccagcaacactgctattatactatccaaatttttattgtaacaaaacctctttaagcaattggtgattgccatgggacttttcccatgtcttctgctgtaattatcctgtgcagaactaggaagaaatttttttcaggactgctctatggtttcctttaaaagaaaaaaacttctgtttgtttttagcagtcattatttacaatttgcagtgattaacttggcaaggcttccttccgtgtttatccctgtagccatcatttaagtcaggaacagtcagaaaaatatttattttattttttttttgggtgtctgcaaaggtaaaaatccattaaaaccttaagttaaatataaatgttacaactcaatgtttgcttttagattttatacagtatttgttttgttttggttttgagtgtatataatgcagcattagcaatatggttccaatagaggagttaaatatatattgttaaaggagacctgtagcagtcaaagattttattgatttaatgacaaaggaaattaatgaaaatgtttttgtttttctgctgtaattctgcattaagctcacatgaaaatcatgattctagagtttggaatgcaaaattaattgttttaccctcaagctgggaatatttttcaaaataaatactataatatagatatcaaattattacctccccatgttatgttgaaaatttttttattaaattgataaaactttatttccattatattcataatgttctgttatacataacattaaaatgttcattaaaatcaatgttgaactgctttttctttcgttctgttagacatttgagaccatttggggaaaaaataattatagtttgggcaaagtaatttttataaataatttaaaattatttaatgacttctctattctttcctatcagactctactgttaggaattaaaaatgaagcagcaaagatatcctgacctgctccattcttgctaatgttccatctacaacatttctaattaggcagaaattcatgtacttcagctaagtggtaatgaaaagtgattcatttgctgaataagagatgagagtgagtgtaattagctgactgcggtttttaatctttcaacaattcaatgtgtttaacttagtttcaaagaataggagctttcaagtgttgttacttcagagcaatcaagccagcctctggtggccgcatagtagaatatggtccctgatatttaaaaccgatcatcttaagtaaattttttctttaagaagtatatcttcactttctcaaatatgtatggttcttagacgaagtaaatgtttatctgaaccttaaaaaaaaaaaaaaaaaaaaa

SEQ ID NO: 3778 - DNA, 2764 bp, Homo Sapiens
  NM_014669
gggagcggccagccttggccaatcaggaagcgggggagagcggcgcgagaagcggcggccgcgtcctcaagccggcacctgagcggcggagacggctgtagcacaaggatctgcatctccaatggatactgaggggtttggtgagctccttcagcaagctgaacagcttgctgctgagactgagggcatctcagagcttccccatgtggaacggaacttacaggagatccagcaggcgggagagcgcctgcgttcccgtaccctaacacgcacgtcccaggagacggcagatgtcaaggcgtcagttctcctcgggtctcggggacttgacatatcccacatctcccagcgattggagagtctgagtgcagccaccacctttgagcctcttgagcctgtgaaggacactgacattcagggcttcctgaagaatgagaaggacaatgccctgctgtctgccatcgaagagtcccggaagaggaccttcggcatggctgaggagtaccatcgggagtcaatgttggttgagtgggagcaagtgaaacagcgaattctgcacacactgctggcatcaggagaagacgcccttgactttactcaagaaagcgagccaagctacatcagtgatgtgggaccccctggtcgaagctctctggataacatcgagatggcctatgcgcggcaaatttatatctataatgagaaaattgtaaatggacacctgcagcctaacctggtggacctttgtgcttccgtcgcagagctcgatgataagagcatttccgacatgtggaccatggtaaaacaaatgacagacgtgttgttgacaccggcaacggatgccctgaagaaccgcagcagcgtggaagtgcgcatggagtttgtcaggcaggccttggcgtaccttgagcagagttataagaattacacccttgtgactgtctttggaaatttgcatcaggcccagctgggcggggtgcctgggacttaccaattggttcgaagtttcctgaacattaaactgccagctcccttgcctggactacaggatggagaggtggaaggccatcctgtgtgggcgctaatttactactgcatgcgctgtggagacctgcttgccgcttcacaggtagttaatcgagcccagcaccagctgggagagtttaaaacctggttccaggagtacatgaacagcaaggacagaagattgtccccagctacggaaaacaagctccggctgcattaccgtagggccctcaggaacaatacagatccctacaagcgggccgtgtactgtatcattggcagatgtgacgtcaccgacaaccagagtgaagtggcggacaaaactgaggattacctgtggctgaagttgaaccaagtgtgttttgacgacgatggcaccagctccccacaagacaggctcactctctcacagttccagaagcagttgttggaagactatggcgagtcccactttacggtgaaccagcaacccttcctctacttccaagtcctgttcctgacagcgcagtttgaagcagcagttgcctttcttttccgcatggagcggctgcgctgccatgctgtccatgtagcactggtgctgtttgagctgaagctgcttttaaagtcctctggacagagtgctcagctcctcagccacgagcctggtgaccctccttgcttgcggcggctgaacttcgtgcggctcctcatgctgtacacccggaagtttgagtccacggacccaagggaggccctccagtacttctatttcctcagggatgagaaagatagtcaaggagaaaacatgtttctgcgctgtgtgagtgagcttgtgattgaaagccgagagttcgatatgattcttgggaaactagagaatgacggaagtagaaagcctggagtcatagataagtttactagtgacacaaagcctattatcaacaaagttgcttctgtggcagaaaataaaggactgtttgaagaggcagcaaagctgtatgaccttgccaagaatgctgacaaggtactggagctgatgaacaaactgctgagccctgtcgtcccccagatcagtgccccgcaatccaacaaggagaggctgaagaacatggcactctccattgccgaacggtatagggctcaaggaataagcgcaaataaatttgtggactccacgttctatcttcttttggacttgatcaccttttttgacgagtatcatagtggtcatattgatagagcttttgatatcattgagcgcttgaagctggtgcccctgaatcaggaaagtgtggaagagagagtggctgccttcagaaatttcagtgatgaaatcaggcacaacctctcagaagtgcttcttgccaccatgaacatcttgttcacacagtttaagaggctcaaggggacaagtccatcctcgtcatccaggccccagcgagtcatcgaggaccgcgactctcaactccgaagtcaagcccgcactctgattacctttgctggaatgataccataccgaacgtctggggacaccaatgcgaggctggtgcagatggaggtcctcatgaattaagtgccatgctttgtgggagtctgggtcggcacactgtcagtacatcaggcacatgggcccactaggctggggtttctggttttgtttctgttgtgttttgttttggtttctgtattatgtatttttgtcaacgccaataaatttctttgatttgtaaaaaaaaaaaaaaaaaaaaaaaaaaaa

SEQ ID NO: 3779 - DNA, 5195 bp, Homo Sapiens
  NM_014671
gaggcggcagttccaggtgcaagcgccgggtttgctgcccgctgggcgcccctgcagcggcccgagctgtggccggcgtggatgaggggcaggcgaggcagggccgcccctccagtattgccgcccctcccgccccagggcagggctgggagggtacagcccgggggcgggctcgggtcgcctcccggccgccgcgtcctcgctgccccgggccgggcgggcgggcgccgagagcctcccagcccgccccgtgccccgcccgcccggctgcttccgcggcggcgctgcccgcacatgggctaggctgccaggatgttcagcttcgaaggcgacttcaagacgcggcccaaggtgtcccttggcggcgcgagcaggaaggaggaaaaggcttctcttttacatcgtactcaggaagaaagaagaaagagagaggaagaaaggcgaaggttgaaaaatgcaataattatccagtcatttattcgaggctatagagacagaaaacagcaatattccatccaaagaagtgcatttgatcgctgtgctaccttgtcacagtccgggggcgcttttcccattgctaatggccccaaccttacccttttggtaaggcagcttctgtttttttacaaacaaaatgaagactcaaaacgtttgatatggctgtatcagaacttaattaaacacagctctctgtttgtcaagcagttggatggatctgagagacttacatgcttatttcagataaaaagattgatgagcctctgttgcaggttgctgcaaaactgtaatgatgacagtttgaatgttgcacttccaatgagaatgcttgaagtattttcgtctgagaatacttacttgcctgttttacaagatgctagctatgtggtgtcagtgattgaacaaattttgcactacatgattcacaatgggtattataggtctctatatttgttgattaacagcaagcttccatcaagtattgaatattctgatttatctcgagttcctatagcaaaaattttgctagagaatgttctaaaaccattgcactttacttacaactcctgtccggaaggtgcgaggcaacaagtttttacagccttcacagaggagtttctggcagcaccttttacagatcagatttttcatttcatcattccggcgcttgcagatgcgcagaccgttttcccttacgagccctttctgaatgcactgttgttaatagagagtagatgttcaagaaagagtggtggagcaccctggcttttctatttcgttttaactgttggcgaaaattatttgggggccctctctgaggaagggctgctggtgtatttgcgggtgctgcagaccttcctctctcagttaccagtctctcctgccagcgcgagctgtcacgactcagccagtgactctgaggaggagagtgaagaagccgacaagccctcaagcccggaggatggcagactgtcagtatcatacataacagaggaatgcctgaagaagctggacacaaagcagcagaccaacaccctgctcaacctggtgtggagggactctgcgagcgaggaggtcttcaccaccatggcctccgtctgccacacgctgatggtgcagcaccgcatgatggtacccaaagtcaggcttctctacagtttagcctttaatgccaggtttctgagacatctttggtttctaatatcttccatgtcaacacggatgatcacagggtctatggtaccgttgcttcaggtgatatccaggggttctcctatgtcttttgaagattctagtcgaatcatcccactcttttatctttttagctccttgtttagtcattcactaatttccatacatgataacgaattcttcggtgatcccatagaagttgtaggtcaaagacaatcatcaatgatgccttttactttagaagagctgataatgttgtctcgatgccttcgagatgcatgcctggggatcatcaagttggcttatccagaaaccaagccagaagttcgagaagaatatattacagcatttcagagtattggagttactactagctctgaaatgcaacaatgcatacagatggaacagaaaagatggattcagttatttaaggttatcaccaatctagtgaaaatgttgaagtccagagacacgaggagaaatttttgtcctccaaaccactggctgtcagaacaagaagatattaaagcagataaggtcactcagctctatgtgccagcatccagacatgtgtggaggttccggcggatggggaggataggcccgctgcagtccaccctggacgtgggtttggagtccccgccgctgtctgtgtctgaggaaagacagcttgctgtcctgacagagttgccttttgtggttccatttgaggaacgagtaaagatctttcagaggttgatttatgcagataagcaagaagttcaaggagatggtccatttctggatggaattaatgtcacaataagaagaaattacatttatgaagatgcttatgacaaactttctccagaaaatgagcctgatttgaaaaagcggatccgtgtgcacttgctcaatgcccatggcctggatgaagctggcattgatggtggtggtattttcagagagtttttaaatgaactactgaagtcaggatttaaccccaaccaggggttctttaagactactaatgaagggcttctgtaccccaacccggctgctcagatgcttgtgggagattcttttgccagacattactacttcctaggcagaatgcttggaaaggctctctatgagaacatgctggtggagctgccctttgcaggcttctttctttccaagttgcttggaaccagtgccgacgtggacattcaccacctcgcctccctagaccctgaggtgtataagaatttgctctttctgaagagctacgaagacgatgtggaggagcttgggctgaacttcactgtggtgaacaatgacctgggagaggcgcaggtagttgaactaaaattcggtgggaaagacatccctgtcaccagcgccaaccggattgcgtacatccacttggtggcagactacaggctgaacaggcagatccgccagcactgcctggctttccgccagggccttgccaatgtcgtcagcctcgagtggctccgaatgtttgatcagcaagaaattcaggtattaatttctggtgcacaagttcccataagcctagaggacctaaaatcctttacaaactattcaggaggctattctgcagaccatcctgttattaaggtcttctggagagttgtggaagggttcactgatgaagaaaagcgcaaactgctgaagtttgtaacaagctgctctcgaccccctctcttggggtttaaggagttgtatcccgcattttgtattcacaacggaggctccgaccttgagcggctccccacagccagcacctgcatgaacctgctgaagctccccgagttctatgacgagacacttttgcgaagtaaacttctctatgcgattgaatgtgccgctggctttgagctgagctgaagctgatgctggggtcagacccctacagagaaccagtgcttccttcgtcagcagcgcctccccagacccacgaggatactcacactgcacgcctgaggctctcctaagctccttctttcattctgccattcctccctcccttccttttttaaatgatttttattacggtgtggtcacttatttagatggacattgcttttcaaataacttaaaataacacgttatgtgccatgtggctactttagtaatattgccaagaagagcacagtttttacactagtggcatctcagtgaaattaaccaaagatgaagctttggctttgctggtgagatcagagccctcctgagcaggcagcgccactccagggttcagacagggctgcacaggcggcagagatacagggtctgagggctgagacgccatggggccgctgctgcttatgtggttggattgtttacaagcctcattattaaaactgaaggcattttttttttctgctgcctttcccaaagtggttaggtttggaaaagagatgatgatggtaatattttatttgtgctttttaagccatttccccaaatgggactagcatgcttgttttcagtataccgtggcctgcctcatgatggtttggagatactgtctgtggatgtgaggtggggacttcattcattgtcctatttctatctccactttgtgcctggagagctttcaggggaggtggaggaggagggtctgccaagctactgcaacatctgtcacccactatacccagttacttgggggaggacagacactgtggtgtcattaaagttgtttgaaccaaagtggcggctgcatctttgtcccgatgctagccgtgccggtctcccatcatccgctcgccctcctttcccctgggctgcgcccacttgtcttcctggatatttgggggtgactcgccatgcttggcaccctctgcttcctggtgctgctctgactcgaagacgggacagtccctggtgcacatccagggaagaggagtgtcggtagttcttgcagtaggcactttatcaggacctgacctgttgctgggtgattttagtctctacaaacagaaagcgtttcaaagcgtcagctgtgggagcagagtgaccctttgctgatgctggggggaggggatctaaatcctcatttatctcttctatgtctcgtattttactgtcactggaggctctgtgggctgtcatagttaattgaccataattagcaatatacttttaaagtgggaaagctgaatgacacttttaagacaatgaacattatcaaaacaaaatgtataatttcttaatttgaataataaattaagcgtttaaatgctatttgtagtcttgatatacagaaataaaataattagggttggtcttttttattttaggttgttttatgttgaatgttctatatcttattagttaatttgtatattttattagtattttggaaatagcatatctgagactgaagagaaattgacaattcacttatttgtggtttttttctcagctattctgagcttatttatttatttgtatgttctaatggctaaacatttacattaaatgttttttttcccaagaaaaaaaaaaaaaaa

SEQ ID NO: 3780 - DNA, 6656 bp, Homo Sapiens
  NM_014675
gcgtgctgactgagctagtcttggggtcctggagaagggggctggaggcatgcccacagcctcccccccatgagcttggggctggcgagggcacaggaggtggagctgacactagagacggttatccagacactggagagcagcgtcctgtgccaggagaaaggcttgggcgcgcgggacctggcccaggacgctcagatcaccagcctgcctgcccttatcagggagattgtcacccgcaacctctcccagcctgagagcccagtcctgctgccggccacagagatggcatcgctgctgtcgctgcaggaggagaaccagctgctgcagcaggagctgtcccgcgtggaggacctgctggcccagagccgtgccgagcgcgatgagctcgccattaagtacaatgcggtcagcgagaggctggagcaggctctgcggctggagcctggggagctggagacgcaggagcccagggggctggtacggcagagcgtggagttgcggaggcagctgcaggaggagcaggcctcctaccggcgcaagctgcaggcctaccaggagggccagcagcggcaggcccagcttgtgcagcggctgcagggcaagattctccagtacaagaagaggtgctcggagctggagcagcagctgctggagagatccggagagctggagcagcagcggctgagggacacagagcacagccaagacctggaaagcgccctcatccggctggaggaggagcagcagaggagtgccagcctggcccaggtgaatgccatgctccgagaacagctggaccaggcaggctcggccaaccaggctctgagtgaggacatacgaaaggtgaccaatgactggacacgctgccgcaaggagctggagcaccgggaggcggcgtggaggcgcgaggaggagtccttcaacgcctacttcagcaacgagcacagtcgcctgctcctcctctggaggcaggtggtggggttccggcggctggtcagcgaggtgaagatgttcactgagagggacctgctgcagctgggaggggagctggcccggacatcacgagctgtccaggaggcgggcctgggactgagcacgggcctacggctggcagagagccgggccgaggcagccctggagaaacaggccctgctgcaggcccagctggaggagcagctgcgggacaaggtgctccgcgagaaggacctggcgcagcagcagatgcaaagcgacctggacaaggctgacctcagtgccagagtgacagagctgggcctggcagtgaagcgtcttgagaagcagaatctggagaaggatcaggtcaacaaggacctcactgagaagcttgaggccctggaatccctgcggctacaggagcaggcggccctggagacagaggatggagaggggctacagcagaccctaagggacctggcacaggccgtcttgtcagactctgagagcggcgtccagctgagcggctctgagcgcaccgcggatgcttccaacggcagcctgcgggggctctcgggccagcggaccccgtccccaccgcggcgctcctcgcccggccgaggccgttcaccccgccgaggcccctccccggcctgctcagactcctccacgctcgccctgatccactccgccctgcacaagcgccagctgcaggtccaggacatgcgtgggcgctatgaggcaagccaggacctactgggcaccctgcggaagcagcttagcgacagcgagagcgagcggcgggccctagaggaacagctgcagcgcctgcgggacaagaccgacggcgccatgcaggcccacgaggacgcccagcgcgaggtgcagcggctgcggagcgccaacgagctcctgagcagggagaagagcaacctggcccacagcctgcaggtggcccagcagcaggccgaggagctgcggcaggagcgggagaagctgcaggctgcccaggaggagctgcggcgccagcgggaccggctggaggaagagcaggaggacgcagtgcaggatggcgcgcgggtgcgccgggagcttgagcgcagccatagacaactagagcagctggaagggaagcgctcagtcctggccaaggagctggtggaggtgagggaggcgctgagccgcgccacactgcaacgggacatgctgcaggccgagaaggccgaggtggccgaggcgctgaccaaggctgaggctggccgcgtggagctcgagctctccatgaccaagctgagggcagaggaggcctccctgcaggactccctgtccaagctgagcgccctcaacgagagccttgctcaggacaagttggatctgaaccgccttgtcgcccagctggaggaagaaaagtccgccctgcagggccggcaacggcaggcagagcaggaggccacagtggcgcgggaagagcaggaacggctagaggagctgcggttggagcaggaggtggcgcggcagggcctggagggctccctacgagtggcggagcaggcccaggaggcattggagcagcagctccccacgctgcgccatgagcgcagccagctgcaggagcagctagcgcagctctcccggcagctgagcgggcgggagcaggagctggagcaggcccggcgggaggcccagcggcaagtggaggcgctggagcgagcggcccgtgagaaggaggcgctagccaaggagcacgctggcctggctgtgcagctggtggctgcggagcgtgaaggcaggaccctgtcagaggaggccacacgcctgcgcttggagaaggaagccctggagggcagcctgtttgaggtgcaacggcagctggcccagcttgaggcccgccgggagcagctggaagccgaggggcaggccctgctgctggccaaggagaccctgactggggagttggcgggcctgcggcagcaaataatagctacacaggagaaagccagtctagacaaggagctgatggcccagaagctggtgcaggctgagcgggaggcccaggcctctctgcgggagcagcgggcagctcacgaggaggacttacagcgactccagcgtgaaaaggaggcagcatggcgggagctggaggccgagcgggcccagctgcagagtcagctgcagcgtgagcaggaggagctgctggcccggctggaggctgagaaggaagagctgagtgaggagattgctgccctgcagcaggagcgcgacgagggcctcctcctagcagagagtgagaagcagcaggccttgtctctgaaggagtctgagaagacggcgctgtcagagaagttgatgggtacacggcacagcctggccaccatctccctggagatggagcggcagaaacgagatgcccagagccggcaggagcaggaccggagcaccgtgaacgctctgacgtctgagctgcgggacctacgggcccagcgggaggaggctgctgcggcccacgcccaggaggtgaggaggctgcaagagcaggcccgagacctgggcaagcagcgggactcctgtcttcgcgaggcagaagagcttcggacccagctgcgtctgctggaggatgcccgtgacgggctgcggcgggagctgctggaggcccagcgcaagctgcgtgagagccaggagggccgggaggtgcagcgccaggaggcaggcgagctgcgacgcagcctgggcgagggtgccaaggagcgcgaggccctgcggcgttccaatgaggagcttcggtctgctgtgaagaaggcagagagcgagcgcatcagcctgaagcttgccaatgaggacaaggagcagaagctggcactcctagaggaggcacggacagctgtgggcaaggaggccggggagctgcgaactgggctgcaggaggtggagcgctcacggctggaggctcggcgggagctgcaggagctccggcgtcagatgaagatgctggacagtgagaacaccagactgggccgggagctggcggagctgcagggccgcctggcgctgggcgagcgggcagagaaggagagcaggcgggagaccctgggcctccggcagaggctgctgaagggcgaggccagcctggaggtgatgcggcaggagctccaggtagcccagcggaagctgcaggaacaagaaggcgagttccggacccgcgagcgacgcctgctgggctccctggaggaggcgcgtggcactgaaaagcagcagctggaccacgcccgcggcctggagctgaagctggaggcggcgcgggccgaggctgcagagctgggcctgcggctgagcgcagccgagggccgggcacaaggcctggaggccgagctggcccgcgtggaggtgcagcggcgcgcggcggaggcccagctgggtggcctgcgctcggctctgcgccggggcctcggcctcggtcgcgcgcccagcccagccccgcggccagtgcccggttcccctgcccgggacgcacccgcagaaggaagcggggaagggctcaacagccccagcaccttagaatgcagccctgggtcccagccaccatctccaggacctgccacctccccagcctctccagacctggacccggaggcagtgcgcggggccctccgggaattcctgcaagagctgcggagtgcccagagagaacgggacgaacttcggacccagaccagtgccctgaatcgccagctggccgagatggaggctgagagggacagcgcaacctcgagggccaggcagctgcagaaggcggtggctgagagtgaggaagcccggcgcagtgtggatgggcggctgagcggggtccaggcggagctggcgctgcaggaggagagtgtgcggcgcagtgagcgggagcgccgggccacgctggaccaggtggccacactggagaggagcctgcaggccaccgagagcgagctccgggccagccaggagaagatcagcaagatgaaggccaatgagacaaagctggagggcgacaagcggcgcctgaaggaggttctggacgcctccgagagccgcactgtcaagctggagctgcagcggcgctcgcttgagggggagctgcagcgcagccgcctgggcctcagtgaccgcgaggcccaagcccaggccctccaggatcgggtggattccctgcagagacaggtggccgacagcgaggtgaaggcagggaccctgcagctgaccgtggagcggctgaatggggccctggctaaggtggaggaaagcgagggggccctgcgggacaaggtgcggggcctgacagaggccctggcccagagcagtgccagcctcaacagcacccgggacaagaacctgcatctgcagaaggctctgaccgcctgtgaacatgaccgccaagtactccaggaacggctggatgccgcccggcaggcattatctgaggcacggaagcagagcagctccctgggcgagcaggtgcagacgttgcgaggcgaggtggctgacctggaactgcagcgggtggaggccgagggccagctacaacagctacgggaggtgctgcggcagcggcaggagggtgaggctgcagccctgaacaccgtccagaagctgcaagacgagcggcggctgctgcaggagcgcctgggaagcctgcagcgcgccctggctcagctggaagctgagaagcgggaggtggagcgctcagccctgcggctggagaaggaccgtgtagccctcaggaggacgctggacaaggtggagcgggagaagcttcgtagccatgaggacacagtgcggctgagcgcagagaagggccgcctggaccgcaccctcacgggggctgagctggagctggcagaggcgcagaggcagatccagcagctggaggcgcaggtggtggtgctggagcagagccacagcccggcccagctggaggtggatgcgcagcagcagcagctggagctgcagcaggaggtggagcggctgcgcagcgcccaggcgcagactgagcgcaccctggaggctcgggagcgggcccaccgccagagggtgcgtgggctggaggagcaggtgtccacactgaagggccagctgcagcaggagcttcgaaggagctcagcacccttctccccaccctccggccccccagagaaatgagctcctgctggcatctggagaacacccctgtgcctgggacaggggaggacccttcttttggacagcccccccacccagagcccggtcccttgggggcctcaagctggggtgggatgaggaggcgctctgctggcagtgctgaggacgggtactccagctccaggcctggagaggcttcccagcaacacctgcagtccagcccccctcttctaggatgagccactgtagatcattaaagttcctccttgagaggctgagccgtagccaggattggggagagcccttgtctctggtcagccctggagcatgggatcgtgggaaagaggagggggaccaggcccagggcaggggtcagaggcccaggccctgacttcggcttcccagagatctctccgccttagttaagagcatgtgtcgggaaattcctcagagtgctcagagtccctgtatttttatacctttttacaatgttaactgttcagaactgttttttgtaacaaaaccttgtttttaaaaaagtttgtacagctgtg

SEQ ID NO: 3781 - DNA, 7456 bp, Homo Sapiens
  NM_014680
cgcgcgcagctggtcggcccgcggcggtgctgcgcggatccggcgtcggggcccggcatggcgggggccggggccaagccgggccggacccggacctaaatgcctctgttcttctccgcgctgttggtcttgctgctagttgcgcttagcgccctctttctaggccggtggcttgtggtccggttggccaccaagtggtgtcagcggaagctgcaggcggagctaaagattggctccttccgctttttttggatccagaatgtcagtcttaagtttcagcaacaccagcaaacagtggaaattgataacctgtggatttccagcaaactccttagccatgatcttccacactatgtggcattgtgctttggagaagtgcgtatcagaacggacctacagaaagtttctgacctgtctgccccattctcccagagcgctggggtggatcaaaaggaactgtccttcagcccatccttattgaagatcttctgccaactattctccattcatgtagatgctataaacatcatggttctcaaggtggatacctctgagtccttatggcatattcagatcagtagaagcagatttcttttggatagtgatgggaaaaggctaatctgtgaggtgagcttatgtaagatcaacagcaaagttctaaagagtggtcagctggaggacacctgcctagtggagctttcactggccctggacctgtgtctaaaggtgggcattagcagtcggcatctcactgctatcactgtggatgtgtggacactccatgctgaactgcatgagggcctcttccagagccaactgctgtgccagggcccaagcctagcatctaagcctgttccctgttcagaggtgacagaaaacttagttgagccaactctgcctggcctattccttctccagcagctgccagaccaggtcaaggttaagatggagaacacaagcgtggtattgtccatgaatagtcaaaagaggcacctgacttggactctgaagctgctgcagttcctgtaccaccgtgatgaggatcagctgccccttcgaagcttcacagcaaactctgatatggcacagatgagcactgaactgctgctggaagatgggttgttgttgtcccagagtcgccaacgcattgtctgcctcaactccctcaaggctagtgtgcaggtgaccaccattgacctctcagcctccctagttctgaacacttgcatcattcactaccggcaccaggaattctctcactggctgcacctgctagcactggaaacccaagggtctagttcacctgttctaaagcaaaggaaaaaaagaaccttcccccaaatcctggctcccatcatctttagcacctccatctccaatgtcaacatttccattcaacttggagatacaccaccttttgccttgggattcaattctatctctctggattaccagcacctcaggccacaaagcatccatcagcggggcgtcctaactgtggaccacctctgctggcgtgtgggcagtgactcccacattcagcgggcgccacacccacccaatatgcatgtttggggtgaggcacttgttctggactccttcacactacagggtagctataaccagcctctgggcctgtccagcacccagtcagataccctttttcttgattgtaccattcgaggacttcaggtggaagcatcagatacctgtgcccaatgtctgtctcgtatcttatccctgatgggtccacaatctgggaagtcagctgtctctaggcactcttcatttggggaatctgtgtcattactgtggaaggtggacttgaaggtcgaagacatgaacttgtttaccctttctgccttggttggtgcttcagaggtacgactggacaccctaactatcctgggcagtgcagagacgtccactgtggggattcaaggacttgtgttagcgctggtgaaatcagtcacggagaagatgcaaccctgttgcaaggcccctgacatccctaccccagtgctcagcctttccatgctctccatcacctatcacagcagcatccgctctctggaggttcagtgtggtgcagggctgaccttactttggagccccccagatcacatgtacctgtaccagcatgtcctggccactctacagtgccgagacctactaagagccactgtgtttcctgagactgtaccatcccttgcactagagacttcaggaactacttctgagctagaaggccgtgcccctgagccattacccccaaagcggctgctaaacctaaccctggaggtgagcacagccaagctcacagcttttgtagctgaggacaagttcattaccctggctgcagagagtgtgtcactgagccggcatggaggttccctgcaggcatactgtccagagctggctgctggctttgatggcaatagtatcttcaacttcaaggaggtggaggtgcagctgctacctgagctggaagagatgatcctccaccggaaccccttccctgcgctgcagaccctccggaaccgtgtttggctcctctctttcggctcagtctcggtggagtttccttatcagtatgacttttctcgaactctagatgaggctgtgggagttcagaagtggctgaagggactacatcaagggactcgtgcttgggcctctccaagccctgtcccactcccacctgatctactcttaaaggttgagcacttctcatgggttttcttggatgatgtttttgaggtgaaacttcatgataactacgagctgatgaaggatgaaagtaaggagagtgccaaaagactacagctactggatgctaaagtggccgcccttcggaagcagcatggggagttgttgcctgcccgcaaaattgaggagctctatgcctctttggaacgcaaaaacattgaaatctacatccagcgttcccgtcgtctctatggcaacacacccatgcgccgggcactgcttacttggagcttagcagggctagaactggtagctctggcagatgcctccttccatggtcctgagcatgtggtagaacaggttcaagagcttgatccaggcagcccttttccccctgagggattagatcttgtcattcagtggtgtcgaatgctcaagtgcaatgtcaagagctttctggttcggatcagggactatccacggtacctgtttgagatccgtgactggcggctaatgggtcgacttgtgggcaccgagcagagtggtcagccttgctcccgtcggcgtcagatcttgcacttggggcttccgtggggtaacgtggcagtggagaggaacatgcccccactcaaattctaccatgactttcactcggaaatattccagtacacagtggtgtggggcccatgctgggatccagcctggacactaattggccagtgtgtggacctcttgaccaagccctcagctgaccccagcccacctttgccctggtgggacaagagccgtcttctgttccatggagactggcacatggacattgaacaggcgaacctgcaccagctggccactgaggatccatacaacacaactgaaaatatgcactgggagtggagccacctgtcttttcattggaaacctggtcagtttgtgttcaagggtgacttggatatcaacgtgagaacagcctctaagtatgacgactgctgcttccttcacctgcctgacctctgcatgacactggacctgcagtggctgtgccatgggaacccccatgatcaccatagtgtcactctgcgggccccagagttcctgcctgaggtgcccttgggccagcttcatgactcctaccgggcctttcgctcggagaacctcaatctctccatcaagatggatctgactcggcacagtggaacaatatcccagccccgaattctgctatatagtagtaccctgcgctggatgcaaaacttctgggcaacttggacaagtgtcacaaggcctatctgcaggggaaagctcttcaataacctgaaacccagcaagaagaaacttggtcagcactacaagcaactttcctatacagccctctttccccagctgcaggtacattattgggcctcatttgcccagcaacggggcatccagattgagtgcagtcagggccatgtcttcactcgggggactcagcggcttatacctcaagcaggcacagtgatgcggcgccttatctctgattggagtgttacccagatggtgagtgacctaagtcaggtgaccgttcacctgatggcctcacccactgaagagaatgctgatcactgtcttgatcccttggtaacaaagacccacctgctgagcttgtcctccctcacctaccaacggcatagcaatcgcacagctgaggaggagctctctgctcgtgatggggatcctacctttcatacacatcagctgcacttagtagatttacggatttcctggacaactaccaatcgagacattgcctttgggttatatgatgggtacaaaaaggcagctgtactcaaacgtaatctttctactgaggccctgaaggggttaaagattgatccacagatgccagccaaaaagccaaagcggggtgtcccaactagtgcctcagccccacctcgtgttaacactcccagcttcagtggacaacctgataaggggtcatcaggaggtgcttacatgttgcagaagctaattgaagagacagataggtttgtagtgttcacagaagaggaatcaggcatgagtgaccagttgtgtggcattgctgcctgccagacggatgacatatacaaccgaaactgccttattgaattggtcaactgtcagatggttcttcgtggagcagagacagaaggctgtgtcattgtgtcagctgccaaagcccaactgctgcagtgccagcaccatccagcctggtatggtgatacattgaagcaaaagacatcctggacttgcctcttggatggcatgcagtactttgccaccactgaaagcagccccacagagcaggatggccgacagctctggttagaggtgaagaatatcgaggagcaccggcagcgtagtctggactctgtgcaggagctgatggagagtgggcaggcagtgggcggcatggttaccacaaccacagattggaaccagccagctgaggcacagcaagcccagcaagtccagcggatcatttcgcgttgcaactgccgaatgtactatattagttacagccatgacattgatcctgaactagcaactcagattaagccacctgaagttcttgagaaccaggaaaaggaagatctcctaaagaagcaggaaggggctgtggataccttcacccttatccaccatgagctggaaatttccaccaacccagctcagtatgccatgatcctggacattgtcaacaacctgctgctccatgtagaacctaagcggaaggaacatagtgagaagaagcaacgggtcaggttccagcttgagatctctagcaatccagaggagcaacgcagcagcatactgcatttgcaggaggctgtgcggcagcatgtggcccaaatacgacagctggagaagcagatgtattctatcatgaagtctttgcaggatgacagcaagaatgagaatctgcttgacctgaaccagaagcttcagttgcagctaaaccaggagaaggccaacctgcagctggaaagtgaagaactgaatatcctcatcaggtgttttaaggatttccaactgcagcgggctaacaagatggagctgcgaaagcagcaagaagatgtgagtgtggtccgtcgcactgagttttactttgctcaggcacggtggcgcctgacagaggaagatggacagctgggaattgctgaattagaactgcagaggttcctctacagcaaggtgaataagtctgatgacacagcagaacatcttctggagttgggctggtttaccatgaacaacctcctccccaatgctgtctataaggtagtactgcggccccagagctcctgccagtctgggcgacagctagctctccgcctcttcagcaaagttcggccccctgttgggggtatctctgttaaggagcattttgaggtaaatgtggtgcctctcaccatccagctgacacaccagttcttccacagaatgatgggctttttctttcctggccgaagtgtggaagatgatgaagttggtgatgaagaggataagtccaaactggtgactactggaataccagtggtgaagcctcggcagctgattgcaacagatgatgcagtaccactgggccctgggaagggtgtggcacagggtttgactcggagttctggggtcagaaggtcatttcgcaaatcgccagagcaccctgtggatgacattgacaagatgaaagagcgagctgccatgaacaactccttcatctacataaagattccacaggttccactgtgtgtcagctacaagggtgagaagaacagtgtggactggggtgaccttaacctggtgctgccctgtctggagtaccacaacaacacatggacatggctagactttgccatggctgtcaaaagggacagccgcaaagccctggttgcccaggtaatcaaagagaagctaaggctgaagtctgcaacaggctctgaggtccggggaaagctagaaactaaatcggacctgaacatgcaacagcaggaagaggaggagaaagcccggctcctcattggtttaagtgtgggcgacaagaaccctggcaagaagtccatctttggcaggcgcaaatgatttggcgattcgagtggctgcagtacaggatctgactctggctcaggctccagggacttgtggggtgggaggggcttcccgttatccacgaggatttgtgggtgtcagagcccataggcatcactcttcagcacctggtctgttcgctgcagggcatggtggacagtaatgctgagttctgtctcacactgatcaggctcagggccagagaggcaacaagagagcaagacccagggaatgggcccagggcaggaccctattcccttggggtcaagtgaaagggtagggggatagtcctgatcaagtgtgataaatttttatagacatatataaatatatatatattatatatatatttctaagtgtaactgtccttcctctgtgccaggaaacgggagggggctgatcctctgatcctcactccactgtcatgtttgaaagaggtattggtgttctggagtgggggtcaacccctccccagtctctgtgctaagttcacttgggaggatggcagtaggagccagggctggccatgggtcccctacccttccccgtaggatataccctggagaatggcaaaatgatttaaagagaaaaaaaaagatattttaaatttgatgctcaaaaaaaaaaaaaaaaaaaaaaaaaa

SEQ ID NO: 3782 - DNA, 6683 bp, Homo Sapiens
  NM_014686
gacgtaacttccggtgtacacagccggtccaaggcggtgcgctgggggccggggcgcgtcgcaggaaaggacttagaagccttacaaatacatctgtgcattcttgcttcagactttacaactgagggccagcccagtctggaagcatctcttattaatgttacaaggaaaccgctacctcagcaaacaaaaggaatggaggaggagacttacaacaaacgccatttaaaaaaaaaagaaaaacttgttttcaggaaacattagaggaaatttggagaatttcagcattgcatagaagcagccttacaggtaaacggatttgacgggcaggctctgtcaaaattctgcagaagtttgatcttccttcttaaggactttgtgtgaagtaattctttactgcttttaaattgctgttgatcagcttctgggtttttgggttctaacttttttgggtatattgaagacacagtgtattacattatattacatttttaaacgttaagttatttttctgccattgtaaatacaagtatcaaaatattcttgcaaagaagtaaacatttttctcagcaagcatatccttttagtaagagagtggaatgctaaacagttcttatccagcattttggacatcttttattttttgtcagagatcctgtctacactgaaaatattaattatataaacctgttgtctctcacctctacattggatcacatggtcacctgcctcatggaaatgccttttttaaaacttcgatttgcagaactccactatttttatacctagctacagttttgagaaagaagaatcagaaccctgacccacttacggttgctgggacaattccccctcccgcatgtattgctgcagtgcccaggacagtaaaatggactacaagcggcgcttcctgcttggcgggtccaagcagaaggtgcagcagcaccagcaatacccgatgcctgagctgggccgagcactgagtgctcccctggcatccacggccaccactgcccccctgggcagtctgaccgctgcaggcagctgccaccatgccatgccccacactactcctatcgccgacatccagcagggcatctccaagtatctggatgccctgaacgtcttctgccgtgccagtactttcctcacagatctcttcagcactgtgttcaggaactctcactactcaaaggcagccacacagctcaaagatgtgcaggagcatgtcatggaagcagccagtcggctgacctcggccataaagcctgagatcgccaagatgctaatggaacttagtgctggggctgcaaattttacggatcagaaggaattcagtctccaggacattgaggtgttggggcgatgtttcctgactgtggtgcaagtccatttccagtttttgactcatgcgttacagaaggtccagccggtggctcactcttgctttgctgaggtcatcgtgccagaaaaaaagaacagcggcagtggcggcggcttatctggcatgggccacacacctgaagtagaggaagctgtgcggtcctggcggggggctgctgaggcgacatctagactaagagaaagaggctgtgatggttgcctggcaggaattgaagttcaacaactcttttgttctcaaagtgcagcaattcctgagcaccagctaaaagaactgaacataaaaatcgacagtgctttgcaagcatataagatagctctggaaagcttaggacactgtgaatatgcaatgaaagccggcttccacctgaatccaaaggcgattgaagcaagtttgcagggctgctgcagcgaggcggaagcccagcagacggggcggaggcagacacccccgcagcccatgcagtgtgagctccccaccgtccctgtgcagataggatcgcacttcctgaagggcgtctcctttaatgagtcggccgccgacaatctgaaacttaagacgcatacaatgttacagctgatgaaggaggcaggctgctataatggaatcacatccagggatgattttcctgtgactgaagtgctgaaccaggtttgcccttccacatggcgaggtgcctgcaagacggcggtgcagctgctgtttggccaggctggactggtggtggttgacacagcacagattgagaataaagaagcctatgccccccagatcagtttagaaggctctagaatcgtggttcaagtcccatccacatggtgcctgaaagaagaccctgctaccatgtccctgctgcagagaagccttgatcctgagaagaccctgggtctagtggacgtgctctacacagctgtgctggacctaaaccgctggagggctggaagggagcaagctttaccctgcatacagatccagctgcaaagggagatctgtgattttggcaaccaggctgacctgccttctggaaatggaaacaaatcttcaggtggcctgcagaagacattctccaaactgacatcccggttcaccaagaaagcttcatgtaccagctccagcagcagcacaaattattccatccaaaataccccttccaaaaacatcttcatagctggatgttccgaagagaaggccaaaatgcctggcaatattgatacaaggttacaaagcattttgaacattggtaatttccccaggactacagacccttcacagtcagctcagaattccagtaatacagtggccaatggctttctcatggagaggcgtgagaacttcctgcatggagatgacggcaaggatgagaagggtatgaacttaccaactgatcaggaaatgcaagaggtgatagattttctctcgggctttaacatgggccagtcacatcagggctctccgttggtgacaaggcataattctgctgccacagccatggtgactgagcagaaggcaggagccatgcaaccacagcagccgtcactgcctgtgccccctccaccacgggcaccccaggctggggcacacacacctctgacaccccagccgggactggcacctcagcagcagtccccaaagcagcaacaacctcaagtccaatactaccaacacctactccagcccattggaccgcagcagcccccgccccagcctcgggcacctgggaaatgggtacatggctcatcccagcagccagcgcaggctgttggagcaggtctgtctcctcttggtcagtggcctggcatatctgatctcagttctgacttgtacagcttgggtctggtgagcagctatatggataatgtgatgtcagaggttctgggacagaagccgcagggacctagaaataacacctggcccaaccgtgaccaaagtgatggagtctttggaatgctgggagagattctgccttttgatcctgcagtgggctcagacccagagtttgcacgctatgtggcaggagtgagccaggcgatgcagcagaagcggcaggcccagcacggtcgccggccaggcaacccccggggcaactggccgcctatggatgacgcgcatcggacctggcccttccccgagttcttcacagaaggggatggcctgcacggtggctggtcgggtgctcagggagactctgccagctcgagtgatgagacatcctcagccaacggggacagcttgttctccatgttttcagggcctgacctcgttgctgctgtcaagcagagaaggaaacacagcagtggagagcaagacaccagcacgctgccctcaccacctctcctcaccacggtggaggatgtgaaccaggataacaaaaccaaaacgtggccacccaaagcaccctggcagcacccttccccgcttcccagcacgctgcccagccccagcgcaccactctatgcagtcaccagccctggcagccagtggaacgacaccatgcagatgctgcagtccccagtgtgggccgcaaccaacgactgcagtgccgctgccttctcctatgtgcagaccccaccccagcccccacccccaccagcacacaaggcagcacccaagggcttcaaggccttccctgggaagggtgagcgcaggccagcctatctgccccagtactgaccccaggccagccagcctgcctgcctgcctgcctgcccgcccagagctgtggggatgagtgtccccaccccagggccacttagctgacaccagcccctcagaggaccagtgcgccccatcccagggagggttccttggggacaagggtggttggcagctccaagcctttaaacctggcttctgaaacgatggcatcagagccctggagagccagctggagacacaggcgtctggccttcaggggcttgctagggaacctgcatgcctagtaagcgccacaggtgactctgatgcaggcgccacagccacacttgaagaaacacagctcttgggtttttagtcctgctgtgtgttgggaagacatcaggcctgaaagctgagggcataactgaccattttttggaaaccctctcctccctcctccacaccttgagtgatgaccacaccaatcactgtattttatagctttttttttcatgtaggtttttagttaaaacatctcctgcctaaaatgcattgaatattttaagataacagatatactggctggaggtttgtttaacactatctatatttaagcttatacaaaatgggcaaaatatagaatatttgtgattggaagcagtcacctggggtttctgggggtggacagttcctcgccacccagcagcaccctgggactgcggcctttcccagctttattgaagcagaatggtggaacttgtgccggaggtacactgctgaaggtgcgtggcggtggaccagccagctgctgtccatgtgcagagcaaggctgcacctgctgcccttcgatccttccacacatggccaggacactgccacaatcctcggggtgtggtcaaggggcactcagagacacctgcactagaaattgcattgacattgtgagctggctcagaagacaaaccaattaagatgtagatagaaattaatttaaggtcttttcttaaaaaaaaaatccacctcattttcagttaacatgtgccattaaatagataacatcctgtggatttagggatattttccagccagaatggatccagaagaattgaatggtgcttaaattgagaaataataataaatatatctatatagaatagacatatcccactgtatattaattgaggttacagaaagttctttatataaaacttatttaaatttttcatatttcatctttgaaaaagtctgagaaaaatccataatattttctggtatgaaagtttgacagtattaatattttttttatattttcttaaatcattaaaccattttaatatatgttaactactaataaatggtttattctttctaactccatataagcttttccagcaaagattgtaataacacatttatgttctcgtttttctacagatataagtaaatttatatataaaaataccaaaaagaggctgggcgtggtggctcacgcctgtaatcccagcactttgggaggccgaggcaggtggatcacctaaggtcaggagttcgagaccagcctggccaatatggtgaaaccccatctctactaaaaatacaaaaattagccgggtgtggtggcgtgcgcctgtagtcccagctactcgggaggctgaagcagaagaatcgcttgaacccgggaggcggaggttacagtgagctgagattgtgccactgcactccagcctgggtgacagagtgagattccgtctcaacaagaaaaaaaaaaaagaatatatatatatgtatgtatgtatgtatgtaaacacacacactaatttgagaggacccgtagggtgtctgagcccagccacctgagtttttagtactgtgttgtcaggctcttcccaggcctcaggtgttgtcttttgtgctgtgtggggatgcattgctgcctgtatttatgatcttttgccgtggttctgagcattcacctcaccatgtttacaaagaactgttttgtatatagacattttcaggcacgtgctttgcaccaaccctgcgtggctcttgtctgtgttagctgtcacggtgtgcacactaatctctgttaaagttgtctatggctgttctacttgtaagatagttttctatttccttcagtaatgtgtccacagtaccctgtatttcgagttccattatactgaagtactcatgttttaatagtgcctctccaaaggcctcaccttggacagaggtcaatccttgatgctccagcacaggtgacgtcactaattgtcactttccagtttgtttttctctattaaggaagacattttctaattgcatctccatgggctgtgagactgtgtgaagccgtttgtgtggtctccatgtaggtgctgtgttcccggcaccgccttgctctgaacactggtaattccaggtgctgcgcttggcagaggggtctcgccaaagcgcatgtgtgtgcatgtgtgaacgtgtgtgtcctttgcatggttgggcgtgggtgccttgctagggcatcagcaggacattgtgtgtatagttacaatgcttccaaactggaactctacattttgtatcttttaaagctcctataagtaaaataactattggctttattaaaaatatacatttaataata

SEQ ID NO: 3783 - DNA, 7431 bp, Homo Sapiens
  NM_014689
cgcgcgcccgggggagcgcagagtttggaaagtcttcgagaagcttcagaggagggaagggggtgggaagagtgggggtgcaagagagaaaaacccgcctcttgcgagttgagcgaggaagaggggggggaaggctccgagttccgcttcctgaacggcgggtggatagagaaggttggcgcggggaagaccggcgggaggcgcgccccgggcccgcggcgcgattggcgtgaccggcgatggccggtgagcggacccgcaggttcacccggagcctgttgagacctgggcaggcggccgagctccggcacagcgccgcgtccgccgccgcggtggcagtcagcagccggcagcagcagcggcaagaaaagcctaggcttctcgagcctttggattatgagactgtcattgaagaacttgaaaagacctaccggaatgatcctcttcaagatctcttgttcttccccagtgatgacttttcagcagccacagtttcctgggatatccgcacgttgtactcaacagtacctgaagatgcagagcacaaggcagaaaatttactggttaaggaggcttgtaaattttatagttcccagtggcatgtggtaaactacaaatatgaacaatattctggagacattcgacagctaccccgagcagaatacaaaccagagaagcttccttcacattcctttgagattgaccatgaagatgctgataaggatgaagataccacttcccactcgtcttccaaggggggtggaggagcgggaggaactggtgttttcaagtccggctggctctacaaggggaattttaacagcaccgtgaacaacaccgttactgttcggtcattcaaaaagcgctacttccagctgactcagttaccagataactcctacattatgaacttttacaaagatgagaaaatatccaaagaacccaaaggatgcatctttttggattcctgtacaggagtggtgcagaataacagactaagaaaatatgcctttgaattgaaaatgaatgatctgacctattttgtgctggcagctgaaacagagtcagatatggatgaatggatccacaccctcaaccgcattctgcaaatcagtcctgaggggcccctccaagggaggaggagcacagagctcactgatctgggtctggattcgctggataattctgtaacttgtgaatgcacgccagaggaaacagattcttcagagaacaacctacacgcagactttgcaaagtacctcacagaaacagaagatactgtaaaaacaactcgaaacatggagaggctaaatctgttctctctagatccagacatagataccttgaaacttcaaaaaaaagatctcttggaacctgagtctgtgatcaaaccatttgaagaaaaagctgccaagagaatcatgatcatctgtaaagccctcaactcaaatcttcagggatgtgttacggagaatgaaaatgatccgataacgaatattgagcctttttttgtgagtgtggcactttatgacctcagagacagcaggaagatttctgctgattttcatgtggatctaaaccatgctgctgtcagacagatgctcttgggggcttctgtggctttggaaaatggcaacatcgacaccatcactccaagacaatcagaagaacctcacatcaagggacttccagaggaatggctaaaatttccaaagcaggctgtattttctgtaagcaatccacattctgaaattgttttggtggccaaaatcgaaaaagtcttgatgggaaacattgcaagtggtgccgaaccttatattaagaacccagactccaacaagtatgcacaaaagatactaaaatccaacagacaattctgcagcaaattgggaaaataccgtatgccttttgcttgggcagtaagatcagtatttaaggacaaccagggaaatgtggacagagactcaagattttcaccattgtttagacaagaaagtagcaagatttcaactgaggacctagttaaactagtatcagattatagaagggccgacagaataagcaaaatgcagaccattcctggaagcctggatattgctgttgacaacgttcccttggagcatccaaattgtgtaacatcgtcctttatccctgtcaagcctttcaacatgatggctcaaacagaacccacagtggaggtggaagaatttgtttacgattcaacaaagtattgtcggccttacagagtatataaaaatcaaatttatatttaccccaaacacctcaagtatgatagccagaaatgcttcaacaaggcacggaatataactgtgtgcattgaattcaaaaattcagatgaagaaagtgccaagcccctgaagtgtatttatggaaaacctggagggcccctcttcacctcagccgcctacacagcagttctgcaccactctcagaatccggatttctcagatgaggtgaaaattgagctaccaacacaactccatgagaaacaccatattttgttttctttttatcacgtcacctgtgacatcaatgcaaaagctaatgccaaaaagaaggaggctctggaaacgtcagttggatatgcttggcttcctctgatgaaacacgatcagatagcttctcaagagtacaacatcccaatagcaacaagtctgcctcctaattatttaagctttcaagattctgcaagtggaaagcatggtgggagtgacattaaatgggttgatggtggcaaaccacttttcaaagtgtcgacatttgttgtatcaacagtaaatactcaggatccacatgtgaatgcatttttccaagagtgccaaaaaagagagaaagatatgtctcagtcacctacctcaaatttcatccgctcttgtaagaacttattgaatgtggaaaagattcatgcaatcatgagttttctgcctataattttgaatcagctcttcaaagttctggtacagaatgaggaagatgaaataactacaactgtcaccagggttctgaccgacattgtggccaagtgccatgaggagcagctggatcattctgtccagtcatatattaagttcgtgttcaagaccagggcatgcaaggagaggactgtacatgaggaactggctaaaaatgtgactggtcttttgaaatcaaatgactcaacaacagtaaagcatgtcctaaagcattcctggttcttctttgcaattatcctaaaatcgatggcacagcacttgattgacacaaataaaatccagcttccccggcctcagagatttcctgaatcttaccaaaatgaattggacaatcttgtcatggtcctatccgaccatgtgatttggaaatacaaggatgcacttgaagaaacaagaagggcaaaccacagcgttgccagatttctcaagcgctgctttacatttatggaccgagggtatgtgtttaagatggtcaacaattacatcagcatgttctcctccggtgaccttaagaccttgtgccagtataaatttgattttcttcaagaagtatgtcaacatgaacactttatccctttgtgtctgcccataagatcagcaaacattccagatcctttgacaccttcagaatcgactcaagagttacatgcatcagatatgcctgaatattcagtcacaaatgaattttgtcgcaaacacttcttaatcggaattctgctccgagaagttggctttgccctgcaggaagaccaagatgtcagacacttagctttagctgtcctaaaaaatctaatggctaagcattcatttgatgatcgatacagagagccaagaaagcaggcccagatagcaagtttatacatgcccctgtacggcatgctcctggacaatatgccaaggatttatctgaaggacctgtatccttttactgtcaatacatctaatcaggggtctagagatgatctaagcaccaatggaggatttcaaagccagacagctatcaaacatgcaaactctgtggatacatcattttctaaagatgttttaaattccatagcagcattttcatcaatagctatttctacagtaaaccatgctgactccagagcatctttagcaagtcttgactccaatccaagtaccaatgagaagagcagtgagaagacggacaactgtgaaaagatcccaagacccttgtctttgattggctcaactcttcgatttgacaagttagatcaagcagaaaccaggagtctcctgatgtgttttcttcacattatgaaaacgatttcgtacgagactctgattgcctactggcagagagctcccagcccagaggtgtccgacttcttcagcatcttggacgtttgtcttcaaaatttcagatacctaggaaaacgcaacataataagaaaaattgctgctgcatttaaatttgtgcagtccacccagaacaatggaactctcaaaggatccaatccttcctgccagacatcaggtctcttgtcacaatggatgcactccacttccagtcatgaaggccataagcagcacagatcacaaactttacctataattcgaggcaaaaatgcactttctaaccccaaactcttacagatgttagacaataccatgaccagcaactccaatgaaatagacatcgtgcatcatgtagacactgaggccaatatagctacggaggtttgcctcactattctggacctgttatccctcttcacacagactcatcagagacaactccaacaatgtgactgtcaaaattcattgatgaaaagggtctttgatacctacatgctctttttccaagtcaatcagtcagccacagcgctgaagcatgtgtttgcctccttgagactgtttgtatgcaagtttccttcagcgttctttcaagggcctgctgacctctgtggatcattctgttacgaagtcctaaaatgctgtaaccacaggtcacggtcaactcagacagaagcctcagcccttctgtactttttcatgaggaagaattttgaatttaacaagcagaagtcaattgtccggtcccacttacaactcatcaaagctgtgagccagttaatagccgatgctgggattggaggctctcggtttcaacattcgcttgcaattaccaataatttcgccaatggagataagcaaatgaaaaacagcaatttcccagcagaggtgaaggacctgactaagcgtataaggactgttttgatggccacagctcagatgaaggagcacgagaaggaccccgagatgctggtggatctccagtacagcctggcaaactcctacgcaagcactcctgaactacgcaggacctggctggaaagtatggccaagattcatgccagaaacggagatttatctgaggctgccatgtgttacatccatattgctgctctcattgcagagtatctgaaaagaaagggttactggaaagtggaaaagatttgcacagcatccctgctctcggaggatacccacccctgtgatagcaactcattactaacaactcccagtggaggaagcatgttctctatgggatggccagcttttttgagcattacaccaaacattaaggaagaaggagcgatgaaagaggattctggaatgcaagatacaccatacaatgagaatatcctggtggagcagctatacatgtgtgtggagtttctctggaagtctgagcgatatgaactcattgctgatgtcaacaagcccatcattgctgtctttgagaaacaacgagacttcaaaaaattgtcagatctctactacgacattcatcggtcatatctgaaagtggcagaggtggtgaattcggagaagcggctgtttggtcgctactatcgtgtggcattttatgggcagggcttttttgaagaagaagaaggtaaagagtatatttataaagagcctaagctgacaggtctgtccgagatttcccaaagattactcaagctctatgcagataaatttggagcagacaatgtgaagataatccaggattccaacaaggtaaaccccaaggatttggaccccaaatatgcctacatccaggtgacctatgtgacgccgttctttgaggaaaaggaaatcgaagaccggaagacagatttcgaaatgcaccacaacatcaaccgctttgtcttcgagacacccttcacgctgtcgggcaagaagcacggtggggtggcggagcagtgcaagcggcggacgatcctgacaacgagtcacctgttcccctacgtgaagaagagaatacaagtaattagccaatcgagcacagaactgaatccaattgaagtggcaattgacgagatgtccaagaaggtttctgagcttaatcagctttgcacaatggaagaagtggacatgatcagactgcagctcaaactgcaaggaagtgtcagcgtgaaggttaatgctgggccaatggcctatgcacgagcttttcttgaagaaaccaatgcaaagaagtaccctgacaaccaagtaaagcttttgaaggagatcttcaggcaatttgcagatgcatgtgggcaggcccttgacgtgaatgagcgcctcatcaaagaggaccagctggagtaccaggaagaactgaggtcccactacaaggacatgctcagcgaactctccacagtcatgaatgagcagattacgggcagggacgacctgtcaaagcgcggagtggaccaaacctgcactcgagtaattagcaaagcaactccggccctacccacggtctccatctcatctagtgctgaagtctgagggctctgcagcatcagacccacctctaagagaactttctgaatttgcagctaatctcggggaagagaaagataggtttaatttatttgaagttttcatggtgttaatatttttgtttacctcgctagcttcagaattttgccaacctctgaatttgcacattttgtataatttttttttctttgagcagtgttgatcaagccaggttgaatatttgccatgaaattccagtgaatgtgtagctcaaatgcaaaccctaagtttgctgtcagttattgtatggtcagtaccccagtcctagtacacatattttaaaggttaaagtgaatgtttttgtaacatttaagcatatttcagatgtaaataaaagattgtaaaatatacggtttttaccaaatttaaaagatcctttttagttaatactatgacagtactaaaaatatatgaataacatttcagataccattatattaaaatatttgtgtatgtgtacaaaagcgttgataaatactaatctttaaagtttgtggagttcctttatttgtaatatatgtgctcttaaaagcaatgggatgtgaaattatgaaagtattttattgttcatagaaataaaaaacacagttactttgca

SEQ ID NO: 3784 - DNA, 5106 bp, Homo Sapiens
  NM_014691
gaacgcttgggctgttgtacgggttccctacgggactctgaaggctgaggatatccggcccggagcgtttgtgcggcgcggagttaagcgccccggcagtaacttaagggaagtggaccagggttgccgctgcccagagcggtcctttagtttccactggagtggagggaagagtgctgccatggcagcccctgcgcagcccaagaagatcgtggcccctacggtgtcccaaatcaatgcggagttcgtgacccagttagcatgtaaatactgggctccccacatcaagaagaaatcaccttttgatataaaggttattgaagatatatatgaaaaagagattgtcaaatcaaggtttgctattagaaagataatgctcttggaatttagccagtatcttgaaaattatctctggatgaattattctcctgaggtatctagcaaggcctatttaatgtcaatctgctgtatggtgaatgagaagtttagagaaaacgtgcctgcatgggagatttttaagaagaagccagaccacttcccattcttttttaaacacatcttgaaggcggcattagctgaaactgatggtgaattttcacttcatgaacagacagtcttactactttttcttgatcattgcttcaatagtttggaagtagacttgatacgaagtcaagtacagcagcttatctccctcccaatgtggatgggcttacagctggcacgattggaattagaattaaaaaagacacctaagctaagaaaattctggaacttgattaaaaagaatgatgaaaagatggatccagaagcaagagaacaggcatatcaagagaggagatttctttcacaactcatccagaagtttatctctgtgctgaaatcagtcccactttctgaacctgtcactatggacaaagttcattactgtgaaagattcattgaacttatgattgatctagaggccctgctacccacaaggcgctggtttaataccatcctggatgattcccaccttctggttcactgttacctttccaatcttgttcgtagagaagaggatggccatcttttttcccagcttttggacatgcttaaattctatactggttttgaaattaatgaccaaactggaaatgctctgacagagaatgagatgaccacaattcactatgatagaattacttctctacagagagctgcttttgcacattttcctgaactctatgattttgccctctcaaatgtggcagaagtagatactcgggagtccttggtcaagttttttggacctcttagttcaaacacactccaccaggtggcatcatacctctgcttgttgccaactcttcctaaaaatgaagacacaacttttgataaagaatttcttctagaattgctggtatctcgtcatgaacgtcgaatttctcagattcagcagttgaaccagatgcctttgtatccaactgagaaaattatatgggatgaaaatattgtcccaactgagtactattctggagaaggttgtcttgctcttcccaaattgaatttgcagtttttgactcttcatgactacctgctaaggaactttaacctcttccgcttagaatcaacttatgaaattcgtcaggacattgaagatagtgtcagcagaatgaagccatggcaatctgaatatggcggtgtagtgtttggtggttgggcgcgaatggcccagcccattgtggctttcactgtcgttgaagtggccaaacccaacataggtgaaaactggccaacccgagttcgtgcagatgttaccataaatctcaatgtcagagatcacatcaaagatgaatgggaaggtcttcgtaagcatgatgtatgctttttaattaccgtacgtcccacaaaaccttatggcactaagtttgaccggaggagaccttttattgagcaggttggcctggtttatgtcagaggctgtgaaattcagggcatgctggatgataaaggacgtgtcattgaagatggacctgaacccagacccaatcttagaggagaatcaaggacatttagagtgtttttggatccaaaccagtatcaacaagatatgaccaatactatacaaaatggagcagaggatgtgtatgaaacttttaatataataatgaggagaaaaccaaaggaaaataactttaaggctgtgctggagactattcggaacctgatgaatactgattgtgtggtacctgactggctgcacgatatcattttaggttatggggacccaagtagtgcacattattcgaaaatgcccaatcagattgccacccttgatttcaatgatacatttctctccattgagcatttaaaagccagcttccctggtcataatgttaaagtaactgtagaagaccctgctctacaaataccccctttcaggataacttttccagtaagaagtggaaaagggaagaaaaggaaagatgcggatgtggaagatgaagacaccgaggaagcaaaaaccttaattgttgagccccatgttattcctaataggggtccttatccttataatcaacccaaacgtaatacgattcagttcactcatacacagatagaagccatccgtgctggaatgcagcctgggctgactatggttgtgggcccacctggtacaggcaaaacagatgtggcagttcagatcatatccaacatctaccacaacttcccagaacagaggactctaattgttactcattccaatcaggccctaaaccagttgtttgagaaaatcatggcattagacattgatgagcgccacctactgcgtcttggtcatggagaagaagagctggagacagagaaagatttcagcaggtatggaagagttaattatgttctggctcgaagaatagaacttttagaagaagtcaaacgattgcaaaagagtctaggggttccaggagatgcctcatatacctgtgaaactgcaggctatttcttcttataccaggtaatgtctcgctgggaagagtatatcagcaaagtgaaaaataaaggtagtacattgccagatgttacggaagtctccactttcttccctttccatgaatactttgcaaatgctcctcaacccatttttaaaggaagatcttatgaagaagacatggaaattgctgaaggatgtttcaggcatattaagaaaatctttacgcagcttgaggaattcagagcctctgaattgcttcgaagtggactggacagatctaaataccttttagtgaaagaagccaaaattattgctatgacctgtactcatgctgccttaaaacgacatgacttggtcaagctaggtttcaagtatgacaacattttgatggaagaggctgctcagattctggagatagaaacttttatccctcttcttctacagaatcctcaggatggatttagccgactaaaacgatggattatgattggcgatcatcaccagttacctccagttattaagaacatggcctttcaaaagtactcaaacatggagcagtctctcttcactcgctttgttcgcgttggagttccgactgttgaccttgatgctcaagggagagccagagcaagcttgtgcaacctctacaactggcgatacaagaatctaggaaacttaccccatgtgcagctcttgccagagtttagtacagcaaatgctggcttactgtatgacttccagctcattaatgttgaagattttcaaggagtgggagaatctgaacctaatccttacttctatcagaatcttggagaggcagaatatgtagtagcactttttatgtacatgtgtttacttggttaccctgctgacaaaatcagtattctaacaacatataatggccaaaagcatcttattcgcgacatcatcaatagacgatgtggaaacaatccattgattggaagaccaaacaaggtgacaactgttgatagatttcaaggtcaacagaatgactatattcttctttctctggtacgaaccagggcagtgggccatctgagggatgtccgtcgcttggtagtggccatgtctagagccagacttggactttatatcttcgccagagtatccctcttccaaaactgttttgaactgactccagctttcagtcagctcacagctcgcccccttcatttgcatataattccaacagaacctttcccaactactagaaagaatggagagagaccatctcatgaagtacaaataataaaaaatatgccccagatggcaaactttgtatacaacatgtacatgcatttgatacagactacacatcattatcatcagactttattacaactaccacctgctatggtagaagagggtgaggaagttcaaaatcaagaaacagaattggaaacagaagaagaggccatgactgttcaagctgacatcatacccagtccaacagacaccagctgccgtcaagaaactccagcctttcaaactgacaccacccccagtgagacaggagccacttccactccagaagccatccctgctttatctgagaccacccctactgtggtaggagctgtatctgcaccggcagaagctaacacacctcaggatgccacatctgccccagaagagaccaagtagccaaactgtagtccttctaaaggaggacatggcagtcaaaaagtctgagtaaagctgttttttgtattttatatttgcttctgccattttactgtcactaattaatgtttagttcttatatttgttaactgatttcggtgtcttgaatatatttttttaaattatgtgtatgaacaattctagtttcatttgttcaatcagaagagcaaataaccattcctttcatgttttgatcactgagtgtgtctgtaatcatacctacattaaaatcattttctatgaatatataatatatacttcacatttttagtgaacttctctaaagaagaggacagaatatactggacttaaccacgaatacccttgagtgtccaaattgggaaggaacttgtttcttctgttatactatcaaatgcttaaattctgtttccttttttcttaaaaaaaaaaaaaaaaaaaaaaaaaaa

SEQ ID NO: 3785 - DNA, 4464 bp, Homo Sapiens
  NM_014697
ttcgtcccgggcggtgcgttccactgctctggggccggcgccgcgcccagtcccgcttcgggccgcaagccccaccgctcccctccccgggcaggggcgccgcgcagcccgctcccgccgccacctcctcccctgccgccctcctagccggcaggaattgcgcgaccacagcgccgctcgcgtcgcccgcatcagctcagcccgctgccgctcggccctcggcaccgctccgggtccggccgccgcgcggccagggctccccctgcccagcgctcccaggccccgccacgcgtcgccgcgcccagctccagtctcccctccccggggtctcgccagccccttcctgcagccgccgcctccgaaggagcgggtccgccgcgggtaaccatgcctagcaaaaccaagtacaaccttgtggacgatgggcacgacctgcggatccccttgcacaacgaggacgccttccagcacggcatctgctttgaggccaagtacgtaggaagcctggacgtgccaaggcccaacagcagggtggagatcgtggctgccatgcgccggatacggtatgagtttaaagccaagaacatcaagaagaagaaagtgagcattatggtttcagtggatggagtgaaagtgattctgaagaagaagaaaaagcttcttttattgcagaaaaaggaatggacgtgggatgagagcaagatgctggtgatgcaggaccccatctacaggatcttctatgtctctcatgattcccaagacttgaagatcttcagctatatcgctcgagatggtgccagcaatatcttcaggtgtaacgtctttaaatccaagaagaagagccaagctatgagaatcgttcggacggtggggcaggcctttgaggtctgccacaagctgagcctgcagcacacgcagcagaatgcagatggccaggaagatggagagagcgagaggaacagcaacagctcaggagacccaggccgccagctcactggagccgagagggcctccacggccactgcagaggagactgacatcgatgcggtggaggtcccacttccagggaatgatgtcctggaattcagccgaggtgtgactgatctagatgctgtagggaaggaaggaggctctcacacaggctccaaggtttcgcacccccaggagcccatgctgacagcctcacccaggatgctgctcccttcttcttcctcgaagcctccaggcctgggcacagagacaccgctgtccactcaccaccagatgcagctcctccagcagctcctccagcagcagcagcagcagacacaagtggctgtggcccaggtacacttgctgaaggaccagttggctgctgaggctgcggcgcggctggaggcccaggctcgcgtgcatcagcttttgctgcagaacaaggacatgctccagcacatctccctgctggtcaagcaggtgcaagagctggaactgaagctgtcaggacagaacgccatgggctcccaggacagcttgctggagatcaccttccgctccggagccctgcccgtgctctgtgaccccacgacccctaagccagaggacctgcattcgccgccgctgggcgcgggcttggctgactttgcccaccctgcgggcagccccttaggtaggcgcgactgcttggtgaagctggagtgctttcgctttcttccgcccgaggacaccccgcccccagcgcagggcgaggcgctcctgggcggtctggagctcatcaagttccgagagtcaggcatcgcctcggagtacgagtccaacacggacgagagcgaggagcgcgactcgtggtcccaggaggagctgccgcgcctgctgaatgtcctgcagaggcaggaactgggcgacggcctggatgatgagatcgccgtgtaggtgccgagggcgaggagatggaggcggcggcgtggctggaggggccgtgtctggctgctgcccgggtaggggatgcccagtgaatgtgcactgccgaggagaatgccagccagggcccgggagagtgtgaggtttcaggaaagtattgagattctgctttggagggtaaagtggggaagaaatcggattcccagaggtgaatcagctcctctcctacttgtgactagagggtggtggaggtaaggccttccagagcccatggcttcaggagagggtctctctccaggactgccaggctgctggaggacctgcccctacctgctgcatcgtcaggctcccacgctttgtccgtgatgcccccctaccccctcactctccccgtctccatggtcccgaccaggaagggaagccatcggtaccttctcaggtactttgtttctggatatcacgatgctgcgagttgcctaaccctccccctacctttatgagaggaattccttctccaggcccttgctgagattgtagagattgagtgctctggaccgcaaaagccaggctagtccttgtagggtgagcatggaattggaatgtgtcacagtggataagcttttagaggaactgaatccaaacattttctccagccggacattgaatgttgctacaaagggagccttgaagctttaacatggttcaggcccttggtgtgagagcccagggggaggacagcttgtctgctgctccaaatcacttagatctgattcctgttttgaaagtcctgccctgccttcctcctgcctgtagcccagcccatctaaatggaagctgggaattgcccctcacctcccctgtgtcctgtccagctgaagcttttgcagcactttacctctctgaaagccccagaggaccagagcccccagccttacctctcaacctgtcccctccactgggcagtggtggtcagtttttactgcaaaaaaaaaaaaagaaaaaagagaaagaaaaaaaagaatgaatgcaagctgatagctgagactgtgagactgtttttgtccactcttctgaatcactgccacttgggtcagggaccacagccattgccacccttggcccatctctctgcgtgcgtgccttgagcacacatataaaaagtgccatgtgcaattgtcttatcttttatgatctaggctttgcctagggatcactactccttaacgggctggctggggcaatgaggaaaagctcctttgctcctgtaaggccataagtggctgttaacagattttcaaatgcctgaagagattgctgagacctgctagagtcatatgttcggggaattaagtctttatcctagacaacaaggtacagatgcaaactgcagtgttattggagggtcaatcggcaaggatatgattatcccaaaatggagttcatcgaccctagctttcctttagattatatataaataaaagtgcagtcctcttctaatggccacagttggttttcttgtagcccagaaagtccaaattaaaggaaataaattcagttttatgttagccttccttggtgcatcagggtgtcagtggaaataggatcaggtggtgtgtgtgtgtgtgttttgtgtgtgtgtgtacacatgtgtttatatatacatgtgtgagggaaagtgtgtacatatatgtaggattgtaaccagacggaaaagaacgaggatctccagggtgtttgaatcagcaacagatttgtgttttctaacatgcatttagttggagaggcatggttctgtttgttttgttttgatctaatttgccattggaaataggtacagttacacagagaaggaagaaccaggaaagtgagatccatgaaactaaatgagcagctgtcagaatccagtgtggctgagcctacctagcttatgaaatctaacccagggttccctgagtccaagaccacttagattattaagattttgaacgtccagaggagtgaaaagtctgttttctgacgtaagccggagctgaggataaagccagaggccagtggattaggtgtatggaatgtggatggagagggcttgtgtgggatgtggccagggagtgggtgaggaaggccgcttctaaatggcctgtaaaaacttgagattggatagacgaaaggaaatggagaaattaaagaattggagaaactagttatctgtgttgctgactttgggacccatccaagactcctgcccttggggtgttccatggtggtttcttcctgcctgggcgccaccctttccccagttcaggccctccctggaggactagtttgtgtattggtatcctccccagtggacccaaaccagcgcatacttggtgtgtggagatgggagacaaaggacagatctaggagccttgaaggatcaccagccaccgaccctccatcagggccaactgggcaggaaagggaacattgcagacctgatttcccgacgatgtcaccctgtcctccctccttgcttcttgctctgctaactcaactctgccttcctctttttcattcttctactctgcc

SEQ ID NO: 3786 - DNA, 4273 bp, Homo Sapiens
  NM_014700
tcctgcttcacaggctccgcggcctccggcctcctcggcccccgtcccccggcctcctcggcccccgtcccccgccatccgccgcccggatcctcgccgccctccctaggccgccccgccgccatgggcctgcgcccgccgcgccgccgggccgagggcagctgaggcgcggtgcgaagatgggcgaggacagagcagggcccgagcgccagccccagcagcccgggcgccccgcgcgcgcccgcccgcgccgccgaggggatgcccgcgcccgccgccgcgccctgagcgcctttgtctgccgcccgcgcccttccgcaccactagcctctcgggagcatggcgtcggccccgccggcctcgcccccgggctcggagccgccggggcccgacccggagccgggcgggccggacgggccgggggcggcacaactggctccgggccctgcggagctacgcctcggagcgcccgtcggcggccccgacccgcagtccccgggcctggatgagcctgcgcccggggccgctgcagatggcggggcgcgttggagcgccgggccggccccggggctggagggaggcccgcgagaccccgggccgtccgccccgccgccgcgctccggcccgcgggggcagcttgcgagccccgacgccccgggcccagggccgcgctccgaagcgccgcttccagaactcgacccgttgttctcctggactgaggagcccgaggagtgtggccccgcgagctgcccggagagcgcgcctttccgcttgcaggggtccagcagcagccaccgagcgcggggcgaggtcgacgtcttctctcccttccccgcgcccacggcgggcgagctggcgctggagcaaggtcccgggtccccgccgcagccctcggacctcagccagacccacccccttccgagcgagcccgtggggagtcaggaggacggcccccgcctccgagccgtgttcgatgccctggacggggatggggacggtttcgtccgcatcgaggacttcatccagtttgctacggtctacggggcagagcaggtgaaggacttaactaagtacttggatcccagtgggctcggcgtgatcagctttgaagacttctaccaagggatcacagccatcagaaacggagatcctgatggccagtgctacggtggtgtcgcttctgcccaagatgaggagcccctggcctgcccggacgagttcgatgacttcgtcacctatgaggccaacgaggtgacggacagcgcgtacatgggctccgagagcacctacagtgagtgtgagaccttcacggacgaggacaccagcaccctggtgcaccctgagctgcaacctgaaggggacgcagacagtgccggcggctcggccgtgccctctgagtgcctggacgccatggaggagcccgaccatggtgccctgctgctgctcccaggcaggcctcacccccatggccagtctgtcatcacggtgatcgggggcgaggagcactttgaggactacggtgaaggcagtgaggcggagctgtccccagagaccctatgcaacgggcagctgggctgcagtgaccccgctttcctcacgcccagtccgacaaagcggctctccagcaagaaggtggcaaggtacctgcaccagtcaggggccctgaccatggaggccctggaggacccttcccccgagctcatggagggcccagaggaggacattgctgacaaggttgtcttcctggaaaggcgtgtgctggagctggaaaaggacacggcagccaccggtgagcaacacagccgcctgaggcaggagaacctgcagctggtgcacagagcaaacgccctggaggagcagctgaaggagcaggagctgagagcctgcgagatggtcctggaagagacccggcgtcagaaggagctcctgtgcaagatggagagggagaagagcattgagatcgagaacctgcagaccaggctacagcaactggacgaggagaacagtgaactccggtcctgcacgccctgtctgaaggccaacattgagcgtctggaggaggagaagcagaagctgttggatgagatagagtcgctgacgctgcggctcagtgaagagcaggagaacaagaggagaatgggggacaggctgagtcacgagaggcaccagttccagagggacaaggaggccacccaggagctgatcgaggacctccgaaagcagctggagcacctgcagctcctcaagctggaggccgagcagcggcggggccgcagcagcagcatgggcctgcaggagtaccacagccgcgcccgggagagcgagctggagcaggaggtccgcaggctgaagcaggacaaccgcaacctgaaggagcagaacgaggagctgaacgggcagatcattaccctcagcatccagggcgccaagagcctcttctccacagccttctctgagtccctggctgcagagatcagctccgtctcccgagatgagctcatggaggcgattcagaagcaggaggagatcaacttccgcctgcaggactacatcgacaggatcatcgtggccatcatggagaccaacccgtccatcctggaggtcaagtagaggcaggaaggtccagcctgagctggattcgggactccaacaccctggagtggttccgtcagaccatgaggagccaagaccagcaggtcccacagccgacagtgcccagagcatgcagggaaccctcgtgcagctgagctggggccgccaaagaccggggctgccaaaggggcagagggtggtggagaggagagggagaaagggaagtcccagggcccggggtccacagaggatgagggttgtggcagggccgtccatcagcgctgaccttccgggggcccagagcttcccagccctgagtcaagctggccatgaacgcgtacacttcagttcagcaggatgggctggagagcctctctgtgcagcggtgtggggtgagccctgctgtggcctccttgtggtggtccctcttcccacgtgcagccctgttgggaagaaaggaagaaaacaggtccctccaggggtgctgctgcctaagccacccacataagtacgctggtgccgtgtcacccatgttgagccgctcctgatggctgacgggctcccagaccctcacctcggacatggtggtgggggaaggacgggtgggcaaggctggtgcgttccccagctctccctacgctgctcgggccattgcccagccagatgtggtcacctcagtccagctctggggcctccaggccatgtggctgttcccacggcccagtcctcgctgcagtaacccctgggggctctgaccacctatgggggccgggcaggagcctctggggcctccactccgacatcaggacctgagatgaccgctgtgtggcgctctctccctgggcagggtggatgccacaggcccctctggctcccaggtgctgcttctccacaggtgcggcctggcccggcctcctaaaggccacaccctccccacgcacttcccaggccagaatccaaacatcgggaaccctgttttcttctgggtgtgtctcacttagaaatcgtggttcttccccgagggtgcatgttgcaggagggagagggcagggaagactcacagcagagcaggagggggcctgtgcttctcggggtctgcaccccaggcacagcggtgtcaccccgcaggaccgcgggcctgccccaacccccagcattcccgggtgggcccagaccccatcaccaagactggccacccgctgcgtgtgtgtgcgcgcgcgtgtacgtgtggccccacatccgccgccttccacgctaggatgtaagaggtcgcctcctattgtacatttggggaaagccttgggtgtaaatcagtgtaaacttggaggagagatttttctatcatgtagagtaggtattttttatagattgaaggttgatcaattttttaatactttcaagagaaaactgtgtatacacatgaaatatatatatatatatatatatatatatgtataatatataaagactggcaccctgcctctctgtgcccaggcccagccctggtgacatggcaccactcagcagtgctgtcactgtaagcatggactcccaggagacagtgtgggaaacgctcctgctttaattccccgagaaacggctcttcctgcctggatgcaggagggcaggggccaccacagattaaagctgttactgcacaaaaaaaaaaaaaaaaaaaaaa

SEQ ID NO: 3787 - DNA, 6001 bp, Homo Sapiens
  NM_014703
cgctgtggagccgtggtcgcgctgtgtgtgtgtgtgagtggagagtgagtgcgggacctgaggctgtgtgtgtgtgaactgtggccactggcggggtcgggggggggcagcggcggagccgcctcggacgataaggaaattgagatttggagaagttaaataaccaagacttcacaggcaaagccatgactacagtagtggtacatgtggactccaaagctgagctcactaccctgctggagcagtgggaaaaggaacatggcagtgggcaggacatggtacctatccttaccaggatgtctcaattgattgaaaaagaaactgaagagtatcgtaaaggggatccagacccatttgatgatcgacatcctggtcgagctgatccagagtgtatgctgggccacttgctgagaatactcttcaagaatgatgatttcatgaatgcactggtgaatgcatatgtgatgacaagccgagagccccctttaaacactgcagcttgcagactcctattagacatcatgccagggctggaaactgctgtcgtctttcaagaaaaggagggaattgtcgagaatcttttcaaatgggcccgagaggccgatcaaccattgaggacatattctactggactgttaggaggtgctatggaaaatcaagacattgctgccaactatagagatgaaaattcacagctggtggcaatagtgcttcgaagactgagggagctacagctacaggaagtggctttgcggcaggaaaacaagcgtcccagtccacggaagctctcttctgaaccccttttgcctctggatgaggaggctgtggatatggactatggtgacatggctgtagatgtagtggatggagaccaagaggaagcttctggagacatggagatctcctttcatcttgattcaggccacaagactagtagcagagtgaactcaacaaccaaacctgaggatggaggattaaagaaaaacaagtcagcaaaacagggtgacagagagaactttaggaaagccaagcaaaagttgggtttctcatcttctgatccagatcgcatgtttgttgagctgtctaatagcagttggtcagaaatgtctccctgggtgattggcaccaattataccctttatcctatgactcctgctatcgagcagcgactcattctccaatatttgacccctctaggagaatatcaggagctacttcccatattcatgcaacttggatcacgggagctgatgatgttctatattgacctgaagcaaactaatgatgtcctgcttacatttgaggcactaaagcacctagcatctctcctgctccataacaaatttgccacagaatttgttgcgcatggtggagtacagaaattactggaaatacctcgtccttctatggctgcaaccggtgtgtctatgtgtttgtattacctatcctacaatcaggatgccatggaaagagtttgcatgcatccccacaatgttctgtctgatgtggtgaactataccctgtggttaatggagtgttctcatgcttcaggatgctgccatgctaccatgtttttttcaatttgcttctcatttcgggccgtcttggagctctttgaccgctatgatggtcttcgtcgtctggtgaacttgatcagtactttggagattctaaatttggaagatcagggtgcacttctgagtgatgatgaaatatttgctagccgccaaactgggaaacatacctgcatggccttgcgcaaatactttgaggctcacctggccattaaattggaacaagtgaagcagtcacttcagaggactgagggtggcattcttgtccacccacaacccccgtacaaggcatgctcatatactcatgaacagattgtggaaatgatggaatttttgatagaatatggcccagcgcagctatattgggaaccagctgaagttttcctcaaactttcttgtgtgcaactcttgttgcagcttatttctattgcctgcaattggaagacctattatgcaaggaatgacactgtgcgctttgctttggatgtcctggctattcttactgtggtgccaaaaatccagctccagttggcagaatcagtggacgtgttggatgaggctggatctacagtctctactgtaggtatcagcattattttgggagtggctgagggtgagttcttcatccatgatgctgaaattcagaagtcagcacttcagattatcatcaattgtgtgtgtggcccagataaccgaatatccagtattggtaaatttatctctggtactcctcggagaaagctgcctcagaaccctaaaagcagtgagcacaccctggccaagatgtggaatgtggttcagtccaacaacggcatcaaggtgctcctgtccttactgtccattaagatgcccatcacagatgcagaccaaatccgggccctggcctgcaaagccctagtgggcctgtctcgcagtagcactgtccggcagatcatcagtaaactgccccttttcagcagctgccagatccagcagctgatgaaggagcctgtgctgcaggacaagcgcagtgaccatgtcaagttctgcaagtatgctgctgaactcattgaacgggtgtcaggaaaaccacttctcattggcactgatgtttccctagcacgactgcagaaagcagatgttgttgcccagtcaaggatctccttccctgagaaagagctgcttttgttgatacgaaaccatcttatttctaaagggcttggagaaacagcaaccgtgctgacaaaagaggctgacctgcccatgactgctgcctcccattcttctgcctttaccccagtcactgctgctgcttctcctgtctctctaccccgaacccctcgtatcgctaatggcattgcaactcgtctgggcagccatgctgctgtgggtgcctctgcgccttctgcccctactgctcatcctcagccacggcccccccagggtccgctagctctgcccggcccatcttatgcaggcaactcccctttgattggtagaatcagttttatcagagagaggccatcaccctgcaatggcaggaaaatcagagtgttgcggcagaagtcggaccatggtgcctacagccaaagcccagccataaaaaaacagctggacagacatcttccttccccacctacgctggacagtataatcacagagtatcttagagaacaacatgctcgctgcaagaatccagttgccacctgcccacctttctccctctttactcctcaccaatgtcctgagccaaaacagaggcggcaagcgccaataaactttacgtcaaggctaaaccgcagggcatcatttccaaagtatggaggggtggatggcggatgctttgataggcaccttatctttagcagattccgtcctatttcagtgttccgggaagccaatgaagatgagagtggcttcacctgctgtgcattctcagcacgggagcggttcctgatgcttggcacctgcacagggcagctgaagctctataatgtgtttagtggacaggaggaggccagctataactgtcacaactcagccatcacacatcttgaaccttccagggatgggtccttgctgctgacatctgctacttggagccagcctttgtctgcactttggggaatgaagtcagtatttgatatgaagcattccttcacagaagatcactatgttgagttcagtaagcactcccaggatcgggtcatcggcacaaaaggagacattgcccacatttatgatattcagactggcaacaagctgttgactctgtttaacccagatcttgccaacaactacaagaggaactgtgccacctttaatcctacagatgatcttgtcttaaatgatggcgtcctctgggatgtccgctctgcacaggccatccacaagtttgacaagttcaatatgaacatcagtggtgttttccatccaaatggactggaggtgatcattaatactgagatttgggaccttcgaacttttcatcttttgcatactgttcccgctctggatcagtgtcgcgtggtgttcaatcacacgggaacagtgatgtatggagctatgttgcaggcagatgatgaagatgacttaatggaagagaggatgaaaagcccctttgggtcatccttccgaacatttaatgcaactgactacaaacctatagcaaccattgatgtgaaacggaacatctttgacctgtgtacagacaccaaagactgctatcttgctgtcattgagaatcaaggcagcatggatgccctgaacatggacacagtatgcaggctgtatgaagtgggcaggcagcgtctggcagaggatgaggatgaagaggaggaccaggaagaggaagaacaggaggaagaagatgatgatgaagatgatgatgacaccgatgatttagatgagcttgacactgaccagttgctggaggcggagttggaggaggacgacaataatgagaacgcaggggaagatggggacaatgacttctctccctctgatgaggagctagcaaaccttctagaggagggagaggacggggaggatgaagactctgatgcagatgaggaggtggaactgatcctgggggacactgacagctctgacaactctgatttggaagatgacatcatcttatctctgaatgagtgaggagccatcactgcttggaagagattcttggcagagagaagaggggacaaatttggttgtgaagtaaacaagaaacacaagacggctaaaactctccaggggcaggtaaagccctgctgggctcagaagcactatagaatttgctgtacacactgaagtgggtctgtgtcacacaggtatttcttggtcctctggagagcagaggactcactcagctctttgcttcatgcctcgctttaatggtagtaaacacttaaccagtggaatagtctgactgctggtactgatggcatcagaagaaaacaggttaacaatcaagtagtgaaagcactatattctagtcattaactcaacggagccagtctcaactctgctgggagcacccacaggtctctgtgggggagacagggactataacagggaggcagaattcaggttggcttgacaacacaccttaggaacatgtgctaaggggctaaggaggcatcagctgtcttccttattctaccagggctgaaaatcggagtcacttaggaggcagcatgagaacagtggcacaccaccagtgaggcacatgttgcctttttgtctttaagcaacaccttagacagggcctgaaccctgggtgggggcactggatgcctgaagtaagtaagttttctcagtggggcagtctcataaaatcaccaggacattgaccacctgacctcccctaactagtgctggccaaggcctgagagttcacagaacctgctaggtcttaagagccaaaggaaggaagtggttgagggccaggaaagagaaggaatgtcatgccagggtgttactcctcaccaaaacttggcagttctttttggggccatgggacacctttctctgaagaggggttggataaggcaaaggttgaagtgtcttctctaggcacgttttctagcatgtttccttttacttggttctgtctcacaaagctgggaggtagatgattcttccgggtcctgagcacctgcttcatgaaggaagataggtagcccagagaagaagttttggacttaacaacataccaaggcagctctggcctgtgactcaggcgtttgttggagagctgcaggaaaaccactgcagtgtgcctgcaacaggacaagacccactcctgtttctggcggtaccagctaccctggaatggtggcgtgtcctgctgtacccaactgacttgcttaggtacctggcagctgtgaccacagctcaagtaaaaaaacaaaaacaggcaaataaataaacatgcttaacatgtc

SEQ ID NO: 3788 - DNA, 4377 bp, Homo Sapiens
  NM_014706
agttgtgacggaacgcatgccattataatgagtttttatatctggtgggagcttttacagggtataaaataatgtgaatttagtgtatgtggagattttcctgttatctaagttcccagtttctctttcaatggcaagaaaacgggtttttgataaggcgcgcgccgcgggcagcttctgcctcagcgggtcttcggcggccgcgggaagacccgagagtcattagaagcgcaagatggcgactgcggccgaaacctcggcttcagaacccgaggctgagtccaaggctgggcccaaggctgacggagaggaggatgaggttaaggcggctaggacaaggaggaaggtgttatcgcgggctgtggccgctgcgacatacaagaccatggggccagcgtgggatcagcaggaggaaggcgtgagcgagagcgatggggatgagtacgccatggcttcctccgcggagagctcccccggggagtacgagtgggaatatgacgaagaggaggagaaaaaccagctggagattgagagactggaggagcagttgtctatcaacgtctatgactacaactgccatgtggacttgatcagactgctcaggctggaaggggagcttaccaaggtgaggatggcccgccagaagatgagtgaaatctttcccttgactgaagagctctggctggagtggctgcatgacgagatcagcatggcccaggatggcctggacagagagcacgtgtatgacctctttgagaaagccgtgaaggattacatttgtcctaacatttggctagagtatggccagtactcagttggtgggattggtcagaaaggtggccttgagaaagttcgctccgtgtttgaaagggctctctcgtctgttggtttacatatgaccaaaggactcgccctctgggaggcttaccgagagtttgaaagtgcgattgtggaagctgctcggcttgagaaagtccacagtcttttccggcgacagttggcgatcccactctatgatatggaggccacatttgcagagtatgaagaatggtcagaagacccaataccagagtcagtaattcagaactataacaaagcactacagcagctggagaaatataaaccctatgaagaagcactgttgcaggcagaggcaccaaggctggcagaatatcaagcatatatcgattttgagatgaaaattggcgatcctgctcgcattcagttgatctttgagcgcgccctggtcgagaactgccttgtcccagacttatggatccgttacagtcagtacctagatcgacaactgaaagtaaaggatttggttttatctgtacataaccgcgctattagaaactgcccctggacagttgccttatggagtcggtacctcttggccatggagagacatggagttgatcatcaagtaatttctgtaaccttcgagaaagctttgaatgccggcttcatccaggccactgattatgtggagatttggcaggcataccttgattacctgaggagaagggttgatttcaaacaagactccagtaaagagctggaggagttgagggccgcctttactcgtgccttggagtatctgaagcaggaggtggaagagcgtttcaatgagagtggtgatccaagctgcgtgattatgcagaactgggctaggattgaggctcgactgtgcaataacatgcagaaagctcgggaactctgggatagcatcatgaccagaggaaatgccaagtacgccaacatgtggctagagtattacaacctggaaagagctcatggtgacacccagcactgccggaaggctctgcaccgggccgtccagtgcaccagtgactacccagagcacgtctgcgaagtgttactcaccatggagaggacagaaggttctttagaagattgggatatagctgttcagaaaactgaaacccgattagctcgtgtcaatgagcagagaatgaaggctgcagagaaggaagcagcccttgtgcagcaagaagaagaaaaggctgaacaacggaaaagagctcgggctgagaagaaagcgttaaaaaagaagaaaaagatcagaggcccagagaagcgcggagcagatgaggatgatgagaaagagtggggcgatgatgaagaagagcagccttccaaacgcagaagggtcgagaacagcatccctgcagctggagaaacacaaaatgtagaagtagcagcagggcccgctgggaaatgtgctgccgtagatgtggagcccccttcgaagcagaaggagaaggcagcctccctgaagagggacatgcccaaggtgctgcacgacagcagcaaggacagcatcaccgtctttgtcagcaacctgccctacagcatgcaggagccggacacgaagctcaggccactcttcgaggcctgtggggaggtggtccagatccgacccatcttcagcaaccgtggggatttccgaggttactgctacgtggagtttaaagaagagaaatcagcccttcaggcactggagatggaccggaaaagtgtagaagggaggccaatgtttgtttccccctgtgtggataagagcaaaaaccccgattttaaggtgttcaggtacagcacttccctagagaaacacaagctgttcatctcaggcctgcctttctcctgtactaaagaggaactagaagaaatctgtaaggctcatggcaccgtgaaggacctcaggctggtcaccaaccgggctggcaaaccaaagggcctggcctacgtggagtatgaaaatgaatcccaggcgtcgcaggctgtgatgaagatggacggcatgactatcaaagagaacatcatcaaagtggcaatcagcaaccctcctcagaggaaagttccagagaagccggagaccaggaaggcaccaggtggccccatgcttttgccgcagacatacggagcgagggggaagggaaggacgcagctgtctctactgcctcgtgccctgcagcgcccaagtgctgcagctcctcaggctgagaacggccctgccgcggctcctgcagttgccgccccagcagccaccgaggcacccaagatgtccaatgccgattttgccaagctgtttctgagaaagtgaacgggacgctgggagacaggaaatgccttacttcactctggcccggcggacctcccaccacccagcagtgcactggggatggacaggcctggtgtgctgcgtgctcgcaaccacagatggctcctcggctttagacagaaaggggaaggggttctaagtcaagagcctttcagtgctccctcatattgagggcagtggcagaaaagtgaccactctgcaggctgggcccaggatgtggtgtcctgagatagttttgtatcttaaagactgaggcacagaagcgaaacgagaacacactgtttttgagacacagttgtccaaatgtttctggccagctccggcccctttttgtatgacacttctcttccaccctgcacagcacatgtgcccgtcattcttttaattttaaaagatgaaatggcagatgctagtaattcacagaatggcctcttgtgggggtgggtctgagggaagtcagctataaaacatttgctggagttttgttcaatggggctgtgcatttttatattatgtgtttgtaaatgacatgtcagccattgtttcatgtttcctaaaagcagaatatttgcaacatttgttttgtataggaattatttgtgccacctgctgtggactgttttctttgcctagtgactagtgacctgtgttgtctaaacatgagtttcagccctttggttttgtttaataccatgtcaaatgcaaacttcaattctccccatttagctttattaaactgacgttctcttcaaaacttcttgctgaatggtactcagatgtgcattcacatacagatgtgttttgaagtgggtgtaccttgctttacctaatagatgtgtaaatagaacttttgtaagtcaaatcccattgtcactttgatttaaattattccagctgtgatgtgtcttcattttatagcagtttgacactggagcttttgagcttttttacctcacatcttttatcaaataatatttactgctttgaaaacagcaacagcattggccagttcagtaggggaagcttgctttattaagacactctggagaaagacgtcagggaatccttgtatatgtcgtgggaatcaactcctcatttatctgttgcgtaagtttaagtttttgtgcatcagtcgggttttctatatttttttaacttaacattttttaatataaccgattaaaaagtagacagaacagtaaaataaactcctgtgtgcctaccaaaaaaaa

SEQ ID NO: 3789 - DNA, 6965 bp, Homo Sapiens
  NM_014708
ggcatggaacctaaagactagaggcggttgtgtgagtcaggaagaggggccagatatctgagtgttcctctttagtttcttcaattgcagataatatggtgtctaattttatgttgttcaggaaagacagtggttcctgactcaggaagacagtctcagaaacatgtggaatgatattgagctgctaacaaatgatgataccggaagtgggtacctgagtgtcggttcaagaaaagaacatggaactgctttatatcaagtagatttgctagtgaagatctcttctgaaaaggcctcattaaatccaaagatacaggcatgcagcttaagtgatgggtttattattgtagccgaccaatcagtgatattgcttgacagtatttgtagatcacttcaattgcatcttgtctttgatactgaagtggatgtagttggcctttgtcaagaaggaaagtttcttttggttggcgagagaagtggcaacctacatcttattcatgtaacatcaaaacaaacactactcactaatgcatttgttcagaaagctaacgatgaaaatcggcggacttaccagaatcttgtcattgagaaggatggttcaaatgaaggtacctattatatgctacttcttacatacagtggatttttttgtattacaaaccttcagcttttaaaaattcaacaagcaattgagaatgtagacttcagtacagcaaaaaagttacaaggacaaatcaagtccagttttatttctactgaaaattatcatactcttggttgtctcagtcttgtggctggagatttagcaagtgaagttcctgtgataattgggggaaccggtaattgtgcattctcaaaatgggaaccagattcttccaagaaaggaatgacagttaagaaccttattgatgcagagattattaaaggtgcaaagaagttccagctgatagacaatctactttttgttcttgatactgataacgtgctgagtttatgggatatttacactctaactcctgtatggaactggccctctcttcacgtagaagagtttcttcttactacagaagcagactctccttcatcagtcacgtggcaaggaattacaaatctcaaattaatagctctgacagcttcagctaataagaagatgaaaaacctcatggtttattcattacctacaatggaaatactatattctttggaagtatctagtgtttcttctctggtccaaacaggaattagcacagataccatataccttttagaaggagtttgcaaaaatgatccaaaattgtctgaagactcagtctctgtgttagtactcagatgtcttacggaagctttaccagaaaacagattgagtcggttacttcacaaacacagatttgctgaagctgagagttttgccattcagtttggactagatgttgagcttgtttacaaggtcaagtcaaatcatatattggagaaactggcattgagttctgtggatgccagtgaacagaccgaatggcaacaacttgtagacgacgctaaggaaaatctacataagatccaggatgatgaatttgtggtgaattactgcctgaaagctcagtggataacctatgaaaccactcaagagatgctgaattatgccaaaaccaggcttttgaagaaagaagataaaactgctctcatttattctgatggcttgaaagaggtgctaagagctcatgcaaaattgactactttttatggagcatttggaccagaaaaattcagtggcagttcttggattgaatttctaaataatgaagatgatcttaaagatatttttttacagctaaaagaaggaaaccttgtttgtgcacagtatctttggcttcgacatcgggcaaactttgaaagcagatttgatgtgaaaatgctggagagcttgctcaactcaatgtctgcatcagtctctttgcaaaagctgtgtccatggtttaaaaatgatgtgattccatttgtaagaaggactgtgcctgaaggacagataattcttgcaaaatggttggaacaagcagccaggaaccttgaattaactgataaggcaaattggccagaaaatggacttcaattggcagagatattttttacagcagaaaaaacagacgagttgggattggcatcttcctggcattggatttccttgaaagattatcagaacacagaggaagtatgtcagctaaggactttggtaaataacttgcgagagttgatcacgttgcataggaagtacaactgcaaattagccctctctgattttgagaaggaaaatacaaccaccatagtgttccgaatgtttgataaagtgctggccccagagcttattccctccatcttagagaagtttataagagtttacatgagagaacatgacttgcaagaggaggaacttctcttgctgtacatagaggatttactgaatagatgcagctcaaagtccacatcactctttgaaacagcatgggaagcaaaggccatggcagtaatagcgtgtttatctgacacggacctcatatttgatgccgtgctcaagatcatgtatgcggcagtggttccttggagtgcagctgtggagcaactggtgaaacagcacctggaaatggaccatcccaaagtcaagttattacaggaaagttacaaactaatggagatgaaaaaacttttacgaggctatggaataagagaggtaaatctcttaaacaaggaaataatgagagtggttagatacattctcaaacaagatgtcccatcttctttagaagatgctttaaaggtagcccaagcgtttatgttatctgatgatgagatctacagtctaagaattattgacctgattgatagagaacagggtgaagactgtctccttctgttgaagtctttgcctcctgctgaagctgagaaaactgcagaaagagtcatcatatgggcacgactggcattacaagaagagccagatcattctaaagagggcaaggcctggagaatgtctgtagcgaagacatccgtggacattcttaagatactatgtgacattcagaaagacaatctgcagaagaaggacgaatgtgaagaaatgttgaaactatttaaagaggttgctagcttacaggagaactttgaggtctttctttcatttgaagattatagcaatagttccctggtagcagatctccgtgagcagcacattaaagctcacgaagttgcacaggcgaaacacaaacctgggagcaccccagagcccatagctgctgaggtgaggagcccaagcatggaatcaaagctgcacagacaggcactggccctgcagatgtccaaacaagagctggaggcagagctgaccttgagagccttaaaagatgggaacatcaaaacagcactgaaaaaatgcagcgacttgtttaagtatcactgcaatgctgacactgggaaattgctatttctgacatgtcagaagctttgtcagatgttggctgataatgtcccagtgacagtgcctgtgggactgaatcttccttccatgatacatgatctagcaagccaagctgccaccatttgcagtccagattttttactagatgctttagaactatgtaaacatactttaatggctgtagagctttccagacaatgccaaatggatgactgtggaatcctcatgaaagcttcttttgggacacataaagatccatatgaagagtggtcttacagtgacttcttcagtgaagatggaattgttcttgagtcacagatggtgcttccagtgatttatgaactgatttcatctcttgtgcctctagctgaaagcaagagatatcccttggagtctaccagtttgccatactgctcccttaatgaaggagatggccttgttttacctgttataaattccatctctgccctgcttcagaatcttcaggaatctagccagtgggagctagccctaagatttgtggttggttcatttggtacctgtcttcagcactctgtgtcaaacttcatgaatgccactttgagtgaaaagttatttggagagactacattagttaaatcaaggcatgttgttatggaattgaaagaaaaagctgttatatttatcagggaaaatgctacaacactactgcacaaagtatttaattgtcgcttggtagatcttgacctggcgttgggttactgcactctcttacctcaaaaagatgtgtttgaaaatctctggaagctcatagataaagcatggcagaattacgacaaaatcttggcaatatctctggtgggctctgagctggcaagtctctatcaggaaatagaaatggggcttaagttccgtgaactcagtactgatgcccagtggggcattcgtcttggtaaacttggtatttcttttcaaccagttttcaggcaacattttctcaccaagaaagacctcattaaagctcttgtggagaatatagatatggacacaagcctcattttggaatattgcagcacatttcagttggactgcgatgcagttcttcagctcttcattgaaacgctgctccacaacacaaatgccggccaaggccagggagatgcaagcatggactctgcaaagcggcggcatcccaaactcctggccaaagcccttgagatggttcctttactgacgagcacaaaagatttggtcatcagtcttagtggaatactacataagttggatccttatgactatgaaatgattgaagttgtcttgaaagttatagaacgagctgatgaaaagataaccaatattaatattaatcaggcattgagtattctgaaacatttgaagtcatacagaagaatttctcctcccgtggatctagaatatcagtatatgttggaacatgtcataactttgccatcagctgcccaaactagactgccttttcacctgatattctttggcacagcacagaacttctggaaaattctctctacagaactcagtgaagaatctttcccaacattgctcttaatttcgaaattaatgaagttctctctggacactctgtacgtgtctacagcaaaacacgttttcgaaaaaaaactgaagccaaagctcctgaagttaacacaagctaaatcctcaacactgattaacaaggaaataactaagatcacgcagaccatcgaatcctgcttactctctatagtcaacccagagtgggctgtagctattgccatcagccttgcccaggatatccctgaaggttccttcaagatatctgctttgaaattctgcctttatttagctgagagatggctacagaatatcccatcgcaggacgaaaaacgtgaaaaagccgaggctttgttgaagaagcttcatatccagtaccggcgatcgggcacagaagctgtgctcatagcccacaagctgaacactgaggaatatttaagagtgatcggaaagccagcacatcttattgtcagtctctacgaacatcctagcatcaatcaaagaattcagaattcatctggcacagattatcctgatattcatgcagcagctaaagaaatagccgaagtcaatgaaattaatttggaaaaagtctgggacatgttgttggaaaaatggctatgcccttcaacaaaacctggtgaaaaaccatcagaattatttgaacttcaagaagatgaagccctacgaagagtgcagtatctcctcctgtctcgtccaattgattatagttcaagaatgctgtttgtatttgcaacatcaactacaaccacattaggtatgcatcagttaacttttgcccatagaactcgagctcttcagtgtctcttctatttggctgacaaggaaactatagaatctctctttaaaaaacccattgaagaagtgaaatcttatttgagatgtataacttttctggcatcatttgagactttgaatatccccatcacatatgaattattttgcagcagtcctaaagaaggaatgattaagggtctgtggaaaaaccacagccacgagtccatggcagtaagattggtgactgagctgtgtttagaatacaaaatctatgacctgcagctttggaatggactcttgcaaaagcttctgggcttcaatatgattccttatctaaggaaagttttaaaagccatctccagtatccattctttatggcaggttccctacttcagcaaagcgtggcagcgtgtgatacagataccactgctttcagcctcttgtcctttaagtcctgatcagctgtcagattgttctgagagtctcatcgctgtcctcgaatgtccagtctcaggtgatcttgacctgatcggagtcgccaggcagtatatccagttagaacttccggcttttgcattagcttgtctgatgctcatgccccactcagagaaaagacaccagcaaattaagaattttctgggttcctgtgaccctcaggttattttaaagcaattggaagagcatatgaacacgggccagctagcaggattttcacatcaaattagaagtctgattttgaataatatcatcaataagaaggagtttgggattttggcaaagaccaaatactttcaaatgttgaagatgcatgcgatgaataccaacaatatcactgagctagtgaactatttggcaaatgacttaagtttagatgaagcttcagtcttgataactgaatattcaaagcactgcgggaaacctgtgcctccagacactgctccctgtgaaattctgaagatgtttcttagtggattatcgtaaatcactgaacctttttttcaagaaggacaagaattttggagtctgctattaatggaccatatttattacagtttttaaattgtacaatctctgtattatagctatttgtctaacattaccccacatgtaataaataaaacaatatgagcataattgccccataaagaactca

SEQ ID NO: 3790 - DNA, 5515 bp, Homo Sapiens
  NM_014711
cagcccgggaatcaaccaccggaagtgccggccctgagaggtggagtcggggtggcagcggcggcggttgccaggagcccgcgttgcagcctgagatccgtaatatggcggggaggaggaggagaaggcggcggcggaccgagctgcgctctgtcagtaccatttgagccattcgcttcctgacaaggcccgtggcgaggggagaggagctgaaggggccgtgggggatcagtgcctgctgtgtgctgatactgttctgtgtaatggggattcagtgaacaagactgaaaaggtacctgtacttatggcgcttacattttggtggaggaagacagacaaaaatcaaggaaataaacacgataatttcagatagtgtgtgactgtgggaagatggaggagtatgagaagttctgtgaaaaaagtcttgccagaatacaagaagcatcactatccacagagagctttctccctgctcagtctgaaagtatctcacttattcgctttcatggagtggctatcctttctccactgcttaacattgagaaaagaaaggaaatgcaacaagaaaagcagaaagcacttgatgtagaagcaagaaagcaggttaacaggaagaaagctttactgactcgtgtccaggagattcttgacaatgttcaggttagaaaagcacctaatgccagtgattttgatcagtgggagatggaaacagtttactctaattcagaagtcagaaacttgaatgttcctgctacatttccaaatagctttccaagccatacggaacactctactgcagcaaagcttgataagatagctgggattttgccattggataatgaggaccaatgtaaaactgatggaatagacttagctagagattcagaaggatttaattctccgaagcaatgtgatagttccaatattagtcatgtagaaaatgaagcttttccaaagacctcttcagcaaccccacaagaaactcttatttctgatggtcccttctcagtaaatgaacaacaggatctaccacttttggcagaagtcatcccagatccctatgtaatgagtcttcagaatctgatgaaaaagtcaaaggaatatatagaaagagaacaatctagacgcagtctgagaggtagtatgaacagaattgttaatgagagtcatttagacaaagaacatgatgctgttgaagtggctgactgtgtaaaagagaaaggccagttgacaggcaaacactgtgtctcagttattcctgacaaaccaagccttaataaatcaaatgttcttctccaaggtgcttccactcaagcaagcagcatgagtatgccagttttagctagcttttcgaaagtggacatacctatacgaactggccatcccactgttctagagtctaattctgattttaaagttattcccacttttgttaccgaaaataatgttatcaaaagtcttacaggttcatatgccaaattacctagtccagagccaagtatgagtcctaaaatgcaccgaagacgttccaggacatcatcagcgtgtcatatacttataaataacccaataaatgcctgtgaattaagccctaaaggaaaagaacaggcaatggacttaattattcaagatactgatgaaaacacaaatgtgcccgaaattatgccaaagttaccaactgatttagcgggagtttgttcaagcaaggtttatgtgggcaaaaatacatctgaagtcaaagaagatgtggttttaggtaaatcaaatcaggtatgtcaatcttcaggaaatcatttagaaaataaagttactcatggacttgttactgtggaaggtcagttaacatccgatgagagaggcgcacacataatgaacagtacctgtgctgcgatgccaaagctgcatgaaccatatgccagcagtcagtgtatagcaagtccaaactttggaactgtgagtggactcaagccagccagtatgttagagaaaaactgcagtttgcaaacagaactgaataagtcttatgatgtaaaaaacccttctcctttattgatgcaaaaccagaatacgagacagcagatggacacacctatggtgtcctgtggaaatgaacaatttttggataacagttttgagaaagttaaacggagacttgatttagatattgatggtttgcaaaaagaaaactgcccttatgtcataacaagtggaataactgaacaagaaaggcaacatttgccagaaaaaagataccctaagggatctggcttcgttaacaagaataaaatgttaggaactagttccaaagaaagcgaggagttactaaaaagcaagatgttagcttttgaagaaatgcggaagagactagaagaacagcacgcccagcaattatcactactcatagctgagcaggaaagggaacaagaaagactgcaaaaggaaatagaagagcaggagaaaatgttaaaagagaagaaggcaatgacagcggaagcctctgagttggacattaacaatgcagtggaattagaatggagaaaaataagtgactctagtttgctggaaacaatgctgtctcaagcggactcactccatacttcaaattcaaatagttctggtttcacaaattctgccatgcaatatagctttgtttctgcaaacgaagcaccattctacctctggggatcatcaactagtggcttgaccaaactctcagtaacaaggccttttggaagagccaaaactagatggtctcaagtttttagtctggaaatacaagcaaaatttaacaaaataactgcagtggcaaaaggatttcttactcgtagacttatgcagacagataagctgaagcaacttcgacaaactgtaaaagatactatggaattcataagaagttttcagtcagaagcaccattaaagagaggcattgtttcagctcaagatgcttcacttcaggaaagagtgttagctcagttgcgagctgccttgtacggtattcatgacatattctttgtaatggatgcagctgaaagaatgtctattctacatcatgatcgagaagttcgcaaagagaaaatgctcaggcaaatggataaaatgaaaagtccacgagtggctctttcagctgcaacacagaagtctcttgataggaagaaatacatgaaagctgctgaaatgggaatgccaaataagaaatttctggttaaacaaaatccttctgaaacaagagtccttcagccaaaccaaggacagaatgcacctgttcataggctacttagtagacaagggagtatatgcaggaaaaatccaaagaaagcggccaaatgttgcgacaatttaagaagacaacattcattaggataaaatggggggaaggattattattcatgttattttccctgcccaagactttatttaaccctggactccgtttacacagacaaagtgacatcagaaggctgagcacttatctggatcatttggtcagtttggtaattcctgctccacacccctattttcctcttaataatacgtttgggtgaagacaaattagtgtttagtaattgcatcatctctgtgcttacctatacaaacataagtttattttatatgcccagatgtctacagagaccctttttgtaaatgtcaaggacatttggatttacttttacagaatattgaaaagataagacaaattataaataagttctaaaacataaatttaattcatctctgcatagtgatttttgaatttgattcaaagggaaattattgcagaagaatgcctttccctcattttataactttaaaaacttggattaaccactcaatgtccactttctttgacttacagtataaccatgtagccaattgtggcccactaaaatctacagaagttaatgtgggtcaccattttggtcagaagcatacattcctgtcagacaactagttgtctgacagaaatgttaggcttcatgtatgttaccccagtactgttagaaacatttgtactaggttataagatctttctgtgacaggtaacaaatttggggaagacagcacaatcttcttgaatgtagctcttgggaatgcattattacatccatttctgtaacataataatatgttgcatgcagttatattttctatttagtctgtatattttgttcttcatagtctgttttttctagcatgcttgatttaggagagaataaagggctatataataataaatccagatttccggataagaatattgcctggttaaaattctgcattgcttaaagacacccatgtttaagatttttcatcactaacatatccattaaaagtatcaactggccaggcagggtggctcacgcctgtactcccagcattttgtgaggccaaggtgggtggatcacctgaggtcaggagtttgagaccagcctgaccaaacatggcgaaaccccatctgtactgaaaatacaaaaattaggcatggtggtgcatgcctgtagttccagctacttgggaggctgagacaggcgaattgcttgaacctgggaggcagaggttgcagtgagctgagactgtgccattgcactccagtcgggttaacagagcaagacactgtctcaaaaaaaaaaaaaaaaaaaagtatcaaccaacaaatgttaccaagataacgtgacttcatgagggagaatgtcactattaatttatcataccatttccaaaaagggctttgtgcttttcacataaaattgagacagtgtatatttaatctaatttaaattttaaagagatactggtattttgaaaatgcaacctatatatattcttaatatccttttaagaatatggagatgaagattgttttctccaattttctgtgccattttaaatttaactttgacatccagctatagacagaaataataagccaccctgggtgtaaacttgattttctttattgagatgtatcatgtattgaatgagtgaaccagaaaattagaagatggtcaaaaaaagtccaagttaccaattttttaaaatttataggcaaagtatcaaattgtcttcttaatatgataaactgtgctttatcattctgaaaactcaggatacagcttattcatagcattgtgggtctctccagtaagaaagatgctaaaagttttgtgcactttttgtgtgtgtaatgcaaattagttaaaacaaatagttttggagaaagttaaaactagctttagagtaaggatgagaaacttgagtgtttttaatttaaagataaaagcctgtgttttacacattcttttttggtgttcatagcttcttctcatacaggtgccagacactgtttgtgcttttgatggatttttatttatatactttttttgcttatttttactttgagtggaatgttcattaatgtaaattgtatttatttttatacttttattttcactagttttgcttctaggcaaaaagcaaaataaacttttcatcttaaagaaaaaaaaaaaaaaaa

SEQ ID NO: 3791 - DNA, 6447 bp, Homo Sapiens
  NM_014712
atcctcagaattcctcgggtccctcgatactcggctgaaaattctcatcggactctgagaggagcgctgggctggaggcattttccccagggacagaagcgggctattctctcacttgggccagtaagaaaaatccaaaaaaagttgtcgactctgccagcagggattggctaacgggccgttattttcttgactccaccaaggcggatgaaggggaggctacggctgaggccgggaacagtggcgaatctgcagcctctcagaatttggcagtgcaaggaagggacggggaagagaagcaaagcggcgcgcatcctgtccagcgattcgccccgcccgcccggtgaatctgcgtctgcagaacgcgccactgaaggttccccagcgctggctggcctcctcccctccgccccgccccttttcctcagggactagtcgcagctttcgtcgccgccgattcgtcaaggtcccgggccgcagcatctagatcgtcgtggcgaagccgactctccgggggatgcggccaatctccaagctccctgggccgcaacttccgagcctcccagggcgccggccgaggcgaagccgctaccctcggccccgtgggtcccccggcagcgcctgtggcgaaagtgcgaatgcagaccctgtgcccgctgggcctcgcgcagtgtaaatgagcaaagatggatcaggaaggtgggggagatgggcagaaggccccgagcttccagtggcggaactacaagctcatcgtggatcctgccttggaccctgccctgcgcaggccttctcagaaggtgtaccgctatgatggagtccacttcagtgtcaacgactcaaagtatataccagtcgaagacctccaagacccccgttgccatgtcaggtccaaaaacagagacttttccctcccagtccctaagtttaagctggacgagttctatattggacagattccactgaaggaagtgacttttgcaaggctgaatgacaacgtgcgggagaccttcctgaaggatatgtgccgtaagtacggtgaggtggaagaggtagagatcctccttcacccccgtacgcgcaagcacctgggcctggcccgtgtgctcttcaccagcactcggggcgccaaggaaacggtcaaaaacctccaccttacctccgtcatgggcaacatcatccatgcccagcttgacatcaaaggacaacaacgaatgaaatactatgaactaattgtcaatggctcctacacccctcagactgtgcccactgggggcaaggccctgagtgagaagttccaaggctcgggtgcagccactgagacggccgaatcccgccgccgctcttcctctgacacagctgcctacccagcaggcaccactgcggtgggcactcctggcaacggcaccccctgctcccaggacacaagcttctccagcagccgacaagataccccatcttcctttggccagttcacacctcagtcctcccaaggaaccccctacacgtctcggggcagcaccccctactctcaggactctgcctactccagcagcaccacttcaacctccttcaagccccggcggtcagagaacagctaccaagatgccttttcccgccgccacttctctgcatcttcagcctccacaaccgcctccacggccatcgccgccaccactgcagccactgcctcatcctccgcctcttcctcctcattgtcctcgtcctcctcgtcatcctcttcctcctcgtcctctcagtttcgtagttctgatgcaaactacccagcgtattatgaaagctggaatcgctaccagcgccatacttcctacccaccacgccgggccacacgggaggaaccccctggagccccttttgctgaaaatacagctgagcgcttcccaccttcttacacctcctacctgccccccgagcccagccggcccaccgaccaggactaccggcctcctgcctcagaggctccacccccggagcctccagaacctggtggaggcgggggtggaggagggcccagccctgagagagaagaagttcggacttccccccgcccagcctcccctgcccgctctggctccccagccccggagaccaccaatgagagtgtgcccttcgcccagcacagcagcctggattcccgcatcgagatgctgctgaaggagcagcgctccaagttttccttcttggcctctgacacagaggaggaggaagagaacagcagcatggtccttggggccagagatacagggagtgaggtgccttctgggtcagggcatgggccctgcacaccccctccggccccagctaattttgaggatgtggcacctacagggagcggggagccaggggctacccgggagtctcccaaggcaaatggacagaaccaggcttctccatgctcttctggagacgacatggagatctccgacgacgaccggggtggctcaccccctccggccccgacgccccctcagcagcctccgccacctccccctcccccgccgcctcctcctccctacctggcgtcccttcctcttggttatcctccccaccaacctgcctacctcctcccacccagacctgatgggccgccgccccctgagtaccccccacctcctccaccacccccgcacatctatgactttgtgaactccttggagctcatggaccgacttggggctcagtggggagggatgcccatgtccttccagatgcagacccagatgttaactcggctccatcagctgcggcagggcaagggattgattgccgcctcagctggcccccccggtggggcctttggggaggccttcctcccgtttccacccccgcaggaggcagcctacggcttgccgtatgctctatatgcacaggggcaggagggcagaggggcatactcacgggaggcctaccacctgcccatgccaatggcagccgagcccctgccctcctcctcagtctcgggagaggaggcccggctgccacccagggaagaagcagagctggcagagggcaagaccctcccgacagcaggcaccgtgggccgtgtgctcgccatgctggtccaggagatgaagagcatcatgcagcgagacctcaaccgcaagatggtggagaacgtggccttcggagcctttgaccagtggtgggagagcaaggaggagaaggccaagccattccagaacgcggccaagcagcaagccaaggaggaggataaagagaagacgaagctgaaggagcctggcctgctgtccctcgtggactgggccaagagcgggggcactacgggcatcgaggctttcgcctttgggtcagggctgagaggggccctgcggctgccttcattcaaggtaaagcggaaagagccatcggaaatttccgaggccagtgaggaaaagaggcctcgtccctccactcctgctgaggaagatgaagacgaccctgaacaagagaaggaggctggagagccaggacgtccggggaccaagcccccgaagcgggacgaagagcgaggcaagacccagggcaagcaccgcaagtcctttgctctggacagcgaaggggaggaggcatcccaggagtcctcctcggagaaggatgaggaggatgacgaggaagatgaggaagatgaagatcgagaggaagctgtggataccacaaagaaggagacagaggtgtcggatggcgaggacgaggaaagcgattcgtcttccaaatgttctctgtatgctgactcagatggcgaaaatgacagcacatcagactccgagagcagcagctcttccagctcctcatcctcctcctcctcctcgtcctcatcctcctcgtcctcttcatcctctgagtcctcctctgaagatgaagaggaagaggagcggccagcagcccttccctcagcctccccgccccccagagaagtcccagtgcccacgccagcacctgtggaggtgccagtgccggaaagggttgcaggctccccagtcacacccctgcccgaacaggaggcgtctccagcaaggcctgcaggccccacggaggagtcaccccccagtgcgcctctgcgtcccccagaaccacctgctgggcccccggcccctgccccacgccccgatgagcgtccctcttctcccatccccctcctgcccccacccaagaaacgccggaaaactgtctccttctctgccatcgaggtggtgccagccccggagccccctccagccacaccgccgcaggccaagtttcccggcccagcctcccgcaaggctccccggggcgtggagcggaccatccgcaacctgcccctggaccacgcatctctggtcaagagttggcccgaggaggtgtcccgaggaggccggagccgggctggaggccgaggccgcctcaccgaggaagaggaggctgagccagggacagaggtggacctggcggtcctggccgacctggccctgacccctgcccggcgcgggctgcctgccctgcctgctgttgaagactcagaggccacagagacatcggacgaggccgagcgccctaggcccctgctcagccacatcctcctggagcacaactatgccctggccgtcaagcccacgccccctgcgccagccctgcggcccccggagccagtgcccgcacccgccgccctcttcagttccccagctgatgaggtcctggaggcccccgaggtggtggtggctgaggcggaggagcccaagccgcagcaactgcagcagcagcgggaggagggcgaagaggagggggaggaagagggggaggaagaggaggaggagtcctctgacagcagcagcagcagcgatggggagggcgccctccggaggcgcagcctccgctcccacgcccggcgccgccgccctccgcccccacccccgccgccaccgccccgcgcctacgagccacgcagtgagtttgaacagatgaccatcctgtatgacatttggaactcgggcctggactcagaggacatgagttacctgcggcttacgtacgagcggctgctgcagcagacaagcggggctgactggctcaacgacactcactgggtccatcacacaatcaccaacctgaccaccccaaaacgcaagcggcggccccaggatgggccccgggagcaccagacaggctcagcccgcagcgaaggctactaccccatcagcaagaaggagaaggacaagtacctggacgtgtgcccagtctcggcccggcagctggagggcgtggacactcaggggacgaaccgcgtgctgtccgagcgccggtccgagcagcggcggctgctgagcgccatcggtacctccgccatcatggacagtgacctgctgaaactcaaccagctcaagttccggaagaagaagctccgatttggccggagccggatccacgagtggggtctgtttgccatggaacccattgctgctgacgagatggtcatcgaatacgtgggtcagaacatccgtcagatggtggccgacatgcgggagaagcgctacgtgcaggagggcattggcagcagctacctgttccgggtggaccacgacaccatcatcgatgccaccaagtgtggcaacctggccagattcatcaaccactgctgcacgcctaactgctacgccaaggtcatcaccatcgagtcccagaagaagatcgtgatctactccaagcagcccattggcgtggacgaggagatcacctacgactacaagttcccactggaagacaacaagatcccgtgtctgtgtggcacagagagctgccggggctccctaaactgaggtggggcaggatgggtgcccacacccctatttattccccctggtgccctgagctcccagcacccccccagccttagtgggctcagcagggcccacatgcccccatctccaagcgtggggttgggggccccaagcccagcgagggagcctcagtccctggaggcagcttctgcctctcctgtcgcccctgcccaccaccccctgattgtttttctttgcggagaagaagctgtaaatgttttgtagcagccagcagctgtttcctgtggaaacctggggtgccggcctgtacagattctgtcctggggggctacacagtcctctcgctttgtgttaatggggacttccccttacgccctgcgtgtacccctccccagtttaggggtctctggggcagtggccatgttctccccctgggggggctctgcacccccagtcctggggactccgtgcctggaaccctgcctcatctgttcctgccagaccctgagggtcacccttccaccctggtgtcactccccggctcagccaggccaggatggcggggtgggtcccttttgctgggctggactgtacatatgttaatagcgcaaacccgacgccacatttttataattgtgattaaactttattgtac

SEQ ID NO: 3792 - DNA, 9443 bp, Homo Sapiens
  NM_014715
aaagcagtatgtgctgagagaggaggattaagctcctggaggcagagctctcccacacacttgctggcttgctgggctccactgactggactgaaaacagggccaagaaaactgctgctgcagggggtcctgaaaacagctggaacccggcagtgatgtgggacctaacttgaagttaacctgtggtggtgaggttggaaccagttggattatgatttattttctacactcttgtacggaatgcagagctgttgtatcctgatgaatctactgctaaatatagtcatttggaataattttaagtattgatcttaaaacttgtaccacaacaagagtgtctaaaaagcacggcaagctcattacgttcttacgaacattcatgaagtctcgtccaacaaaacagaagctgaagcagcggggaatcttgaaagagagggtgtttggttgtgacctgggggaacaccttctaaattctggttttgaagtgccgcaggttcttcaaagctgcacagcattcattgagagatatggcatcgtggatggaatctatcgcctttctggtgttgcctccaatatccagagactacgccatgaatttgactctgagcacgtccccgacctgacgaaagaaccgtatgttcaggacatccattctgtgggttccctatgtaagctgtacttccgggaactcccaaaccctctgcttacctaccagctgtatgagaaattttctgatgcagtttcagcagcaacagatgaagaaaggctgataaaaatccacgatgtcatccagcagctccccccaccacactacagaacactggagttcctgatgagacacttgtctcttctagctgactattgttccatcacaaatatgcatgcaaaaaatctagcaattgtttgggctccaaacctgttaagatcaaaacagatagaatctgcctgcttcagtggaacagcagctttcatggaagtgaggattcagtctgtggttgttgagttcatcctgaatcacgttgatgtgctgttcagcggcagaatcagcatggccatgcaagagggggcagcttctctatcaaggcccaagtccctcctggtatcctctccatccaccaaactgctgacattggaagaggcccaggcacgaacacaagctcaggtcaattctccaattgtgacggaaaataaatatatcgaagtaggagaaggacctgctgcacttcaggggaaatttcataccataattgagttcccacttgaaagaaagaggcctcaaaataagatgaaaaagtctcctgtgggtagctggcgttcctttttcaacttggggaaatcatcatctgtttctaaacgaaagctgcagcggaatgagagtgagccttcagagatgaaagccatggctctgaaaggtggcagggcagaaggaaccctccgttcagctaaaagtgaggagtctcttacatctctccatgcagttgatggtgattctaagctcttccgacccagaagacccagatcttccagtgatgcactgtctgcctcttttaatggagaaatgctggggaaccgctgtaactcctatgataatctgcctcatgacaatgagagtgaggaggaaggagggctgcttcatatcccagcccttatgtctcctcattcagctgaggatgttgacttgagcccaccagacattggagtagccagcctggattttgatccaatgtcatttcaatgtagtcctcctaaggccgaatcagaatgtctggagagtggtgcttcctttttagattcaccaggatactccaaggataaaccaagtgccaataaaaaggatgcagaaacaggtagtagccaatgtcagactccaggaagcacagcaagctctgaacctgtctctcctcttcaggagaaactgagtccattctttaccctggacttgagcccaactgaagataaatcatctaagccatcctcctttactgaaaaggtcgtctatgctttctctccgaagataggacggaaattaagcaaatcaccttctatgagcatatctgagccaatttcagtgaccctaccaccacgggtgtcagaagtcattggtacagtctcaaataccacagctcagaatgcatcatcttcaacctgggacaaatgcgttgaagaaagggatgccacaaatagatcccccacccagatagtaaagatgaaaacaaatgagacagttgcccaagaagcatatgaatctgaagtccagcccctggaccaggtggctgctgaagaagtagaattgccagggaaagaggatcagtctgtctcaagcagtcagagtaaggctgtagcttctggacagactcagacaggagcagttacccatgacccccctcaggattccgttcctgtcagttcagtctctcttatcccaccaccaccgcctccgaaaaatgttgcccgaatgttggcgctagcattagctgagtccgcacagcaagcctcaactcagtcattgaagagaccagggacctctcaggctgggtatacaaattatggagacatagcggtggctacaactgaagataatctgtccagttcttactctgcagttgctctagataaggcctatttccaaaccgatcgaccagcagagcagttccacctccagaataatgcaccaggaaactgtgaccatcctctaccagagacaacagctactggggatcctacccattccaacacaactgaatctggggagcaacatcaccaagtagacttaacagggaatcagccacatcaagcatatttatctggggacccagaaaaggccagaattacttcagttcccttagactcagagaagtctgatgatcatgtaagtttccctgaagaccagtctgggaagaacagtatgccaactgtctccttcttggatcaggaccagtctccaccccgtttctacagtggagatcagcctccttcttatcttggtgcaagtgtggataaactccatcaccctttagaatttgcagacaaatctcccacacctcctaatttacctagcgataaaatctaccctccttctgggtcccccgaagagaataccagcacagccaccatgacttacatgacaactactccagcaacagcccaaatgagcaccaaggaagccagctgggatgtggctgaacaacccaccactgctgattttgctgctgccacacttcagcgcacgcacagaactaatcgtccccttccccctccgccttcccagagatctgcagagcagccaccagttgtggggcaggtacaagcagcaaccaatataggattaaataattcccacaaggttcaaggagtagttccagttccagagaggccacctgaacctcgagccatggatgaccctgcgtctgccttcatcagtgacagtggtgctgctgctgctcagtgtcccatggctacagctgtccagccaggcctgcctgagaaagtgcgggacggtgcccgggtcccgctgctgcacctgcgcgccgagtctgtccctgcgcatccctgtggctttcctgcaccactgccccccaccaggatgatggagagtaagatgattgctgccatacactccagcagtgcagatgccaccagcagttcaaattatcattcctttgtcactgcttcatccacctctgtggacgatgcattgcctttaccacttcctgtcccacaacctaagcatgcttctcagaaaacagtttactcctcctttgctaggcccgatgtcaccactgaaccctttggtccagataactgtttgcatttcaatatgactccaaactgccagtaccgtccccagagtgtacctccccatcacaataaattggagcagcaccaagtgtatggtgccaggtcagagccaccagcctccatgggtcttcgttataacacatatgtggccccaggaagaaacgcatctggacaccactccaagccatgcagccgggtcgagtatgtgtcttctttgagctcctctgtcaggaatacctgttaccccgaagacattccaccgtaccctaccatccggagagtgcagtctctccatgctccgccgtcttccatgattcgctctgttcccatttcacggacagaagttcccccagatgatgagccagcctactgcccaagacctctgtaccaatataagccatatcagtcctcccaggcccgctcagattatcatgtcactcagcttcagccttactttgagaatggccgggtccactacaggtatagcccatattccagttcttctagttcctattacagtccagatggggccctgtgtgatgtggatgcctatggcacagtccagttgagaccccttcaccgccttcccaatcgagactttgctttctacaatcctaggctgcaaggaaagagcttgtacagttatgctggtttggctccacgtccccgggccaacgtgactggctatttctctcccaacgaccataatgtagtcagcatgcctccggctgctgatgtgaagcacacctacacctcatgggatcttgaggacatggaaaaataccgcatgcagtccatccggagagagagccgtgctcggcagaaggtgaaagggcctgtcatgtcccaatatgataacatgaccccggcggtgcaggacgacttgggtgggatctatgtcatccatctgcgtagtaaatcagatcctgggaaaactggacttctctcagtggcagaaggaaaggagagccgccatgcagccaaggccatcagtcccgagggagaggaccgcttctataggaggcatcccgaggcagagatggacagagcccaccatcacggaggccatggtagcacgcagccggagaagccatccctgcctcagaagcagagcagcctgaggagcaggaagcttcctgacatgggctgcagtcttcctgagcacagggcacaccaagaagcaagccataggcagttctgtgagtcaaagaatgggcccccttatccccagggagctggccagttagattatgggtccaaagggattccagacacttctgagccagtcagctaccacaactctggagtaaaatatgctgcatccgggcaagaatctttaagactgaaccacaaagaggtaaggctctccaaagagatggagcgaccctgggttaggcagccttctgccccagagaaacactccagagactgctacaaggaggaagaacacctcactcagtcaatcgtcccaccccctaaaccagagaggagtcatagcctcaaactccatcatacccagaacgtggagagggaccccagtgtgctgtaccagtaccaaccacacggcaagcgccagagcagtgtgactgttgtgtcccagtatgataacctggaagattaccactccctgcctcagcaccagcgaggagtctttggagggggcggcatggggacgtatgtgccccctggctttccccatccacagagcaggacctatgctacagcgttgggtcaaggggccttcctgcccgcagagttgtccttgcagcatcctgaaacacagatccatgcagaatgagccctgcgagcaatagagttgaagcagcctctgctggacagtggactgttctatttttttcaataaccaaaaagattaaacaaaaaatactataaaacccctgaccacatttaaaaaatgataataaaagtaaacaaatcagcatctttttccccttccctgcttcattaccccctcttccatctatagactttgtcatttttgtctttagaaaagatctgaaggatggtaaagccccgtgctgaaacccagtagagaaacctgtctcaggacacacttgccatctagggctagcttgaaagagcctgaggactgcctttaactgaatttgaattcagcattgtcctttcttcttagtatttgctgcataattgagagcagttcacatcgatttcctggtaggcgtctgcattccctgttgtgttcctgcttctccttcagtagctgcacaacttgcgcagatcgacacactgttgtcacttcattctccccgtctgagaaggatcttgtgttcagttagagtcgtggaaaaatccctgatccttcaaggtcagtcagacagttggcaacattataattaaaaataagaaattaagactttaaattaaacatttggtagagtcatcataaaacaccagaccacttagactcaggctgaaccatactctttctattcttatttttcatccttgttcctcacggttcagtgaacaggctcatatcatgacagaatggacttttaaaagttagtacttaaggaaacttctttaggtggaagaaagtaaagttcttattgtcagtgaactttattagcaccagaaatctctattgatgcttttaatgcattgcctgccttcaggttttcttcttaccccacccctcaataagatttggtgaattgtaattctagtaaaacatgtcataccattggttttcctaaattatcaactttctttcattaaaaaaaaaaaaaaaaaaaaaagcccagcatggtttgactggatagacacgcataatttattatgaatataaatttccatgtttgtttctgttcctaaaccagagtacgaggtccctgggaatttaagtagctacgcattatctattattagactgcaagttcctgcaataactgcttagttcacagccccgtttcaccagtggagttctgggcagttattgctgtcctaaggcattactgtcgtttgcttactctatacttgtgtggtcacagtcttcttgtaattaccatctacaccagcatttcaggtatagctctttataactctggagacatgtaaaacatgtttaacacccacgagttttgaaagttgcattccttattagagtaggaactctctagcccaactccattctatgttctcagctccctccaccccccaaaatacatcagactagcaaggcagtcctatgtttacaaaacgagtttagattgtcatttcattccataactcttaataatactcaagttttatacattcacgtattttaaatgctcggtctgtagaagacactaggagaattgcattccaattactggatggttgctgctctggctttttagaacttgaaattaatttttatttagagcaaaggaggaaatcttttaagaggctaaaatcatgctgctattattgctgtgaaattgtataaagattaggattcatgccagtttttattttaaaaaataatgtgcattttaagggtttatatttagaaaaaaataaaatgtttcaagaacaacacattgatatgtggaaatattctataaggttttcttttgttcccttagaattcattggagggatgcagtaaaaactgtagtagaaaccttgaaacacccatatgtgaaaaggtctgtggaaattgaggcctctacattaaaagtgcagaaccaactgttttacagtcaaagtgctaggaaacctgataggatacttccctttggcacaaaaacaccctgggtgctacatacaggagtatgacctttggtgaatatgtggcactaattttttttaccttaatcatattcttgtcaagtaggcaacccattgccccttggagaccacaccagccctgtaagttctcaccagcagcatggagattaggaagaggggctgctgtgaccaggagatacacacggctttaagtaactgagagcctaaagaaagtaacccagggagtccggtccagttttaatatttgtggatttgttgtcacacacattgtttagtcctgaaactaaaacctattttataaatagtagggttaattcctcgaaacaatttctttattaataaatgtcctgtgggtttagaaatatcaggtaaatatttgaatacagaatgatgattgcaattactgttacaagcgtgaaacacaaacttcagatcaaatctagagttgcttcatttaatgcatgctagcaacagccttaactttggattcagttatttgaaacacttttccggcatctttccctttctaatgttgtggggtggaaaccggatggcaaatcactgtgagccggatacctcagcacagtccaccttgtgtgtgacttcacaaatgggggacttcacaaatggggtaactgaatgttattactttcaaattttgacatggagcattatgatcaaggaaatggagctgccttatacattaaacccgtgatttaatcctattgacattttcatagccatgcctccagattttatctttttggcaaaattctgattccacagtttggtctgattgaaataaatattccctggacgtctggctaaaaattttgctaacaatcccagaggtgccattttcttattaataaatttcattggagccttatttcttactatattcaatttcgtttcaaacctgcaagtccctgggatggtcccacgactagggcctgcacatttcttacaatggcaaagcattttttaaaatttagggtcaggttgaaaaattctaggactaattctgtagagaggagggactgttaactaacgtgagtggggacggaggagtaggttaccacatttggagcagtaatagatgcaaacgatgtaaatttgaaatttgcccctttagttaaagaaggagcctgcaaagtccatttctctgttttcagccctgtcagtcacccatttaggatgttggcaaagtactgcttgagcagaatgtgtaagaaagtaataatgaaagcaaaagtatgtcagacagttacttcttccacatggttagaggcatgtgattttcagcactgtgtgttacagaaatgtcaggaatggtgtattataacgtgtgcaagataatgtcagtgtgcacagagggtcttttttccttatctgattagtactgttaatgttcaaagaataaaaatggttttacagtttagattctgagatagcaaaacctgatttttcaaccatgacctgcatgagagaagcatcctaggaagtcttagatcatacttttgagtttttaattttaatttatatagtgtttttttatgtcttaatatttttgtgaactggtgtaaattgttaatgcatataagcttgtgtatttttgtaaatagttttgtgatttatttcttgccccatatgtaaatatttagagtctcatttcttgcaaacttatttgaagctgagttgtgggtttgggttttgtttgtttctttggttgcagggtggggtggggggtggcaggggagggaggaagggatttttgtacctggagatggagatatcttgtggtttaaagcaaatgtcccactgaaagtgattcaaatatcaacagaattatttcaggttaaaacaga

SEQ ID NO: 3793 - DNA, 2523 bp, Homo Sapiens
  NM_014716
agcactgcctggaagtgtggggtgagagctcctcctaggacacccctttccccttggggaaagaattgtgcccccaggcccttccccgcggaggtccctctcctccttccccctcatctccccttcctgggacagaaagtgcctccacctgcatccccaggggcccggcctccagggcccgctggccccacagcaggcaagctgagatgacggtcaagctggatttcgaggagtgtctcaaggactcaccccgtttccgagcctctattgagctggtggaagccgaagtgtcagaattggagacccgtctggaaaagctcctgaaactgggcactggtctcctggaaagtgggcgccattaccttgctgccagccgcgccttcgttgtcggcatttgtgacctggcccgcctgggtccaccagagcccatgatggcggagtgtctggaaaaattcaccgtgagcctgaaccacaagctggacagccatgcggagcttctagatgccacccaacacacactgcagcagcagatccagaccctggtcaaggaaggtctgcggggtttccgagaggctcgccgggatttctggcggggggctgagagcctggaggctgccctgacccacaacgcagaggttcccaggcgccgggcccaggaggcagaagaggcaggagctgctttgaggacggctcgagctgggtaccggggacgggcactggattatgccctgcagatcaacgtgattgaggacaagaggaagtttgacatcatggagtttgtgctgcgtttggtggaggcccaggctacccatttccagcagggccatgaggagctgagccggctgtcccagtatcgaaaggagctgggcgcccagttgcaccagctggtcttgaattcagcacgagagaagagggacatggagcagagacacgtgctgctgaaacagaaggagctgggtggggaggagccagaaccaagcttaagagaggggcctggtggcctggtgatggaaggacatctcttcaaacgggccagcaacgcatttaagacctggagcagacgctggttcaccattcagagcaaccaactggtttaccagaagaagtacaaggaccctgtgactgtggtggtggatgaccttcgtctctgcacagtgaaactctgccctgactcagaaaggcggttctgctttgaggtggtgtccaccagcaagtcctgcctcctccaggctgactcagagcgcctcctgcagctgtgggtcagtgctgtgcagagcagcattgcttctgccttcagtcaggctcgccttgatgacagcccccggggtccaggccagggctcaggacacctggccataggctctgctgccaccctgggctctggtggaatggccaggggaagggagcctgggggagtcgggcacgtggtggcccaggtccagagtgtggatggcaatgcccagtgctgcgactgccgggagccagccccggagtgggccagcatcaaccttggtgtcaccctctgcattcagtgttccggcatccacaggagccttggtgttcacttctccaaagtccggtctctgacccttgactcatgggagccagaactagtgaagctcatgtgtgagctgggaaatgtcatcatcaaccagatctatgaggcccgcgtggaggccatggcagtgaagaaaccagggcccagctgctcccggcaggagaaggaggcctggattcacgctaaatacgtggagaagaagttcctgaccaagctgcctgagattcgagggcgaagaggtggccgggggcgcccaagggggcagcctcctgtgcccccaaagccttccatcaggccccggccagggagcttgagatccaagccagagcccccctctgaggacctgggaagcctgcaccctggggccctactgtttcgagcgtctgggcatcctccatctcttcccaccatggctgatgcccttgcccatggagctgatgtcaactgggtcaatgggggccaagataatgccacaccgctgatccaggccacagctgctaattctcttctggcctgtgagtttctcctccagaacggggcgaacgtgaaccaagcggacagtgcgggccggggcccgctgcaccacgcaaccattcttggccacacggggctcgcctgcctgttcctgaaacggggagctgatctgggggctcgagactctgaaggcagggaccctctgaccatcgccatggaaacagccaacgctgacatcgtcaccctgctacgactggcaaagatgagggaggctgaagcggcccaggggcaggcaggagatgagacgtatcttgacatcttccgcgacttctccctcatggcgtcagacgacccggagaagctgagccgtcgcagtcatgacctccacacgctgtgacccgaggcccacggggcccgcgcctgcctcccttccccgccaccgggccctctgccattaaagcctccgtgcttcgctcaaaaaaaaaaaaaaa

SEQ ID NO: 3794 - DNA, 5629 bp, Homo Sapiens
  NM_014720
cttaagtgcaaggaactctgtgttgggaggaaaaatgtccttcttcaatttccgtaagatcttcaagttggggagcgagaagaagaagaagcagtacgaacacgtgaagagggacctgaaccccgaagacttttgggagattataggagaactgggcgacggagcctttgggaaagtgtacaaggcccagaataaagagaccagtgttttagctgctgcaaaagtgattgacactaaatctgaagaagaacttgaagattacatggtagagattgacatattagcatcttgtgatcacccaaatatagtcaagcttctagatgccttctattatgagaacaatctttggatcctcattgaattttgtgcaggtggagcagtagatgctgtgatgcttgaacttgagagaccattaactgagtcccaaatacaagtagtttgcaagcagactttagatgcattgaactacttacatgataataagatcatccacagagatctgaaggctggcaacattctctttaccttagatggagatatcaaattggcggattttggagtatcagctaaaaacacgaggacaattcaaagaagagattcctttattggtacaccatattggatggctcctgaagtagtcatgtgtgaaacatctaaggacagaccctatgactacaaagctgatgtttggtccctgggtatcactttaatagaaatggctgagatagaaccacctcatcatgaattaaatccaatgcgagtgctgctaaaaatagcaaaatctgagccacctacattagcacagccatccagatggtcttcaaattttaaggactttctaaagaaatgcttagaaaagaatgtggatgccaggtggactacatctcagctgctgcagcatccctttgttactgttgattccaacaaacccatccgagaattgattgcagaggcgaaggctgaagtaacagaagaagttgaagatggcaaagaggaagatgaagaggaggaaacagaaaattctctgccaatacctgcaagtaagcgtgcatcttctgaccttagtatcgccagctctgaagaagataaactttcacaaaatgcttgtattttggagtctgtctcagaaaaaacagaacgtagtaactctgaagataaactcaacagcaaaattcttaatgaaaaacccaccactgatgaacctgaaaaggctgtggaggatattaatgaacatattaccgatgctcagttagaagcaatgactgaactccatgacagaacagcagtaatcaaggagaatgaaagagagaagaggcccaagcttgaaaatctgcctgacacagaagaccaagaaactgtggacattaattcagtcagtgaaggaaaagagaataatataatgataaccttagaaacaaatattgaacataatctaaaatctgaggaagaaaaggatcaggaaaagcaacagatgtttgaaaataagcttataaaatctgaagaaattaaagatactattttgcaaacagtagatttagtttctcaagagactggagaaaaagaggcaaatattcaggcagttgatagtgaagttgggcttacaaaggaagacacccaagagaaattgggggaagacgacaaaactcaaaaagatgtgatcagcaatacaagtgatgtgataggaacatgtgaggcagcagatgtggctcagaaagtggatgaagacagtgctgaggatacgcagagtaatgatgggaaagaagtggtcgaagtaggccagaaattaattaataagcccatggtgggtcctgaggctggtggtactaaggaagttcctattaaagaaatagttgaaatgaatgaaatagaagaaggtaaaaataaggaacaagcaataaacagttcagagaacataatggacatcaatgaggaaccaggaacaactgaaggtgaagaaatcactgagtcaagtagcactgaagaaatggaggtcagaagtgtggtggctgatactgaccaaaaggctttaggaagtgaagttcaggatgcttctaaagtcactactcagatagataaagagaaaaaagaaattccagtgtcaattaaaaaagagcctgaagttactgtagtttcacagcccactgaacctcagcctgttctaatacccagtattaatatcaactctgacagtggagaaaataaagaagaaataggttctttatcaaaaactgaaactattctgccaccagaatctgagaatccaaaggaaaatgataatgattcaggcactggttccactgctgatactagcagtattgacttgaatttatccatctctagctttctaagtaaaactaaagacagtggatcgatatctttacaagaaacaagaagacaaaagaaaacattgaagaaaacacgcaaatttattgttgatggtgtagaagtgagtgtaacaacatcaaagatagttacagatagtgattccaaaactgaagaattgcggtttcttagacgtcaggaacttcgggaattaagatttcttcagaaagaagagcaaagagcccaacaacagctcaatagcaaactacagcaacaacgagaacaaattttccggcgctttgagcaggaaatgatgagtaaaaagcgacaatatgaccaggaaattgagaatctagaaaaacagcagaaacagactatcgaacgcctggaacaagagcacacaaatcgcttgcgagatgaagccaaacgcatcaaaggagaacaagagaaagagttgtccaaatttcagaatatgctgaagaaccgaaagaaggaggttataaatgaagtggagaaagcacccaaagagctgagaaaagagctcatgaaacgcaggaaagaggagcttgcacaaagccagcatgctcaggaacaagagtttgttcagaaacaacagcaagaattagatggctctctgaaaaagatcatccagcagcagaaggcagagttagctaatattgagagagagtgcctgaataacaagcaacagctcatgagagctcgagaagctgcaatttgggagctcgaagaacgacacttacaagaaaaacaccagctgctcaaacagcagcttaaagatcagtatttcatgcaaagacatcagctacttaagcgccacgagaaggaaacagagcaaatgcagcgttacaatcaaagacttattgaggaattgaaaaacagacagactcaagaaagagcaagactgcccaagattcagcgcagtgaagccaagactcgaatggccatgtttaagaagagtttgagaattaactcaacagccacaccagatcaggaccgtgataaaattaaacagtttgctgcacaagaagaaaagaggcagaaaaatgagagaatggctcagcatcagaaacatgagaatcaaatgcgagatcttcagttgcagtgtgaagccaatgtccgcgaactgcatcagctgcagaatgaaaaatgccacttgttggttgagcatgagactcagaaactgaaggagttagatgaggaacatagccaagaattaaaggagtggagagagaaattgagacctaggaaaaagacactggaagaagagtttgccaggaaactacaggaacaggaagtattctttaaaatgactggggagtctgaatgccttaacccatcaacacagagccggatttccaaattttatcctattcccagcttgcattccaccggatcataacaaagggaagcattctgtgcgtgggtttggctctttcagtatgtcattctgttctcatcttctgccacagtctctcagatagctcatgaagacaatcacctgcctcaccttctaggtgttttccttttttgttttttttgttttgttttgtttttaagcaaagatgaagggaaaacgaactaagacagacgctaggccatgttggcaaagtagcatcttggtgactaaggtgactttgtatattcatcttaaaaattatgttctttagacactgctacctgaaaactgttggagaaataatgtttaaagttatttaagaaaaactgttacatcactaagtattaataaattcttcttacctgacgtaacttctcaatgcctaaattctgtagttgaagctctgctgcagagagttgggataattttcttttggtggatcagctctcataaaaaagctatgatttgctcaaatatgctgttgactcagtaaatgaatatatttttttctttaaataggaacaacctcttttaaaagagaaaaattatttcagtgatttgtcaaaacgaattacctcttttggcatgagctaataattgagggtgctaattttcttaagatagtgcctaaaacactaaatttcagtcaagtcgtaagtaggattttctttttgatcaacagggacaaaaacatctttagaattaaaaacatggttgttttggaatttttgcttctcttaccgtttgatagaaattttcatcctaaaatacatgtacaaagtttggaaagatgaaaaaaagaggtagcttttagattgcaaattggaaatgtaaaactcatgaaatttaagcaatataggtttagctatctgtgtttattttctaaaataatacctgagctggttaaatgatttctctccatcttagctaattctgtttaaaactctgtcagaggcctgcaggctgtgagttatatttataaatatatcttcagaaattaatcttaaaagaggcattagttcagaatacttttttaaaagtttaaattaaatatttaggcacgtcagaaattacttttccttattttgaaatgaggctacttatgtcttggttttattttgttccatgtttaaatcattcactttgatttgagtgggaaaagcctgaagcctttatcatgtggttgctggtgtgtgtaattattaatgaaatgttcactcctagtcccttatgaggcttagaatttcaaccacgtgtcaggtcagacagtattataaactgtactttgctgtctgagacagcacatttgtgaatgatgcttgctgcctgccattttcaacctattctctcttaagagtgctaggtaccaaattgtgaaagtttgttttcagttatattacttttgaggctggtgaaaaatttaaatgtaactttgtgggaacactgattcatatttagaaaatgtaaatgtctgtagcactttcttgcagttaatttgaaaactttggatgctgaaccttgtttgtcagtgatttagatgatttaaaaatgcatgtgtgatttgaattttataattgttttgacaagcataatttacttggacaacttcgtaggtagccttaacttctggccaagtttgttttttatataaatatatatacatatatacatattatgtatggttgtaaattcatacacttatcacatgaatgtgttactgtatacaaaactcttaatgctttattctcaaatgctgggttgaaaaatgttttgaaagccttttaaaatatatatctttataaagtaatattcaggatgatgataaaaattgtttatattgttatgataaaaatgacagtataatgttaaaaaaaaaaaaaaaaaaaaaaa

SEQ ID NO: 3795 - DNA, 6367 bp, Homo Sapiens
  NM_014730
cccgtggctgagaagaaggaggcctgagagcgacatgtccccggcggctcaggcggagcggcccgtggcgctgtttttctgagtccggggtggcctggcagccggccgaggacgagggtcggcgggggctgcccccgtggtggtggccgccatgctgggagcctgggcggttgagggaaccgctgtggcgctcctgcgactgctgctgctgctgctgccgccggcgatccggggacccgggctcggcgtggccggcgtggccggcgcggcgggggccgggctgcccgagagcgtcatttgggcggtcaacgcgggtggagaggcgcatgtggacgtgcacgggatccacttccgcaaggaccctttggaaggccgggtgggccgagcctcagactatggcatgaaactgccaatcctgcgttccaaccctgaggaccagatcctgtatcaaactgagcggtacaatgaggagacctttggctacgaagtgcccatcaaagaggagggggactacgtgctggtcttgaaatttgcagaggtctactttgcacagtcccagcaaaaggtatttgatgtacgattgaatggccacgtcgtggtgaaggacttggatatctttgatcgtgttgggcatagcacagctcacgatgaaattatacctatgagcatcagaaaggggaagctgagtgtccagggggaggtgtccaccttcacagggaaactctacattgagtttgtcaaggggtactatgacaatcccaaggtctgtgcactctacatcatggctgggacagtggatgatgtaccaaagcttcagcctcatccgggattggagaagaaagaagaggaagaagaagaagaagaatatgatgaagggtctaatctcaaaaaacagaccaataagaaccgggtgcagtcaggcccccgcacacccaacccctatgcctcggacaacagcagcctcatgtttcccatcctggtggccttcggagtcttcattccaaccctcttctgcctctgccggttgtgagaacaaatgactatcctgaacagggtggaggggtgtgggaaagaaaccagccatattggttttggtttctgtatttttcacaatgattaatgaacaaaaacaaagagaaaaaaacacacatcaattaaaggagacaaaaagaggcagagcgagtagagagcagccctcattcaccacctggtcccagacgtgcttcagtcctcgtcctctctttgtggctggctcccagccttctctttcctcttgaggatacttagggtaaactggatccttcctgctcaaggatcctcatttgtatacctagtggaaaggactctgaactcagaggagtcactgttcctttttttaggttagaaattaacagcagggaaatgccatcttattacctgagacgaccagcactgggagttaggtacggtctgaagttatgtctagataagacttcagacgtcctgggattgaaagaatgtgtgtgaaggggtagaatttgtgcggtaaagacttaaaaaaaaaagtagggagattaaaaaaaaagaaagaaaatgcttccttatctggaagcctttctggattaatccagtgatggtcccacctttagtgtttgagctttgtcattgcttgtctccctggcatgtgccagttatagactgtccagcatccaagacgtttcggttatgtcgggtcctcagatcgcctctgacttgttaccacaacaaatcattttgatttcagtgcctgttggggacttgatttcttctcagttttgtttgtttgtttgtttccttaatctggctcatttgaaatttcttctccctctcaaccatcccactaagttatagccaagaagggaaggagacacggggatttggggttctctgcttgaatgtcttctcctttaccacctcaccttgttggtacctccctccctggatctctgagccagcagccaggaggacctgacccagcagttctttactggcccctttgtagggccttgctgccagggggcagggatgctttccagcctgcagcaacagaacacttgaccttaaaagtctcttctggtctttggattagaaaaggcttatgttagcatagcttaagagcaacctcagagacttgagccctactaagtgactgaccactgtttagagtgtctggtatctgatgttcatttattcccatgttcttgtgtgtcacagttcagccagttttggtttatgcctagagctacttcaaggaactagactaattagctatataggcccagcgatgcttcttattgatcttaatagtatgcccctccttcccctgtcctttcatttctctatccaagtagcagtcaggttcttggtgtgatgggactgaaagaattccagtcagccagagccttggcagctctgaagctaaccttagcatctaagtgtcgatcttgaattccctgaaaaaatttctataggaaatgaagcttccctggtcccctcctttctggccattgtcatccatttcccagttagggcaacaatgaaggaggacccagccaagctagaaggaattttgtggatgggagacagcaggattagcttcagcttgggctggagcagtcaatataggatctcaggccaggcccgcttttctagaatgtgtttaattttgagtttgctttattagatatgttttttaagagctctgtatatttgaactgctccttatgtgacaaaataggtagctcttgggctcatgtcctgggttttggctctttaatgattactccaggccagcatttagtcgtttgagaattgtagcctgttgttttcgctgtgacttgggtctcagtgctagggtattgagtcaggcagctggagggttgtggcccgaggctgcagtcagaggtatacttcccatagtgcttcacacagctcccctgcttctaaaggataaggtactgtagccttggtcctggggaccacctgcctggggcagtggacatcctaactaaacaggcttctggcagtagctttggttcctatcccatcgaaattccccaaagccctgggccactgccattgggttagtcaagatgaaggaggaggactggctgcctccattttgccttgtttgttagtttgcctgggtctgtctgaggaaggagggggtcccgccttccacctcaacacatcccttcagtgactcagagtctcagaaggaaaccctgactcctggggccatttcctaatggtactgtaagccaagcagctttgcttctgcctctgtttccaagcccacccttttcccctgagctcagggttagggatgggcgctttcctctctggttgtgaacgaaaggaaggaacatctttctatggctaacaaaaactaaaggggaagtgaggaaacaggaagaagtatggtgggggctggggtagactcccctggagccaagcctatccagctaacaagagctccctggggctggtcacagctggctcatgatgctgaacttgaaagtttttttgtttttgtttttgttttgtggctcctccaagatataggtacatgaagtttaggttaaaggggtgggattctttatttttatttttgtattgtatgtgtcaagaattactctgttgttcaccttttgctttttgcactgtttgttctcttatctgtattttgagcttagtgctaggactgagaggctgcaccatagggaatgtatgggagatggtgaggggtgccagtgaggggtgcgtggaggagaggcctgggctcctctactggatctacactctgtcccaggtttttagatcccactgagcccagctgactgaaaacaaggacagtcagggtgaaacttcttttgccagaagtgtggcctgagttgaatttctgggaggatgacgcagatgtctgctgcagagctgggctgagagttctgcagtctagctctgacttaggtcaggggcctgttggtctctcattggacgtttttgggtctcactcatgcttactgaaacattgtgccaagaaactctgtgggatttgtgtcccttaaaccagactcacttttctgaaaaatctccattgttgaggagaggctgctcaatcgacaccccgagttctcatgactgggaagatagttttcttcaggtgtcaatggcgttagactcccaggaagactagccctgcccacagggccacctgttggtttgagagcgtgttcgtgttctcttgccctccctgcctaagagctactgggatcacgttagcgggcatttaggctttgatgagagggcacagtttgagttaggtttacctccccctttctgtgcctgggaactgtttggtccagctttagaactgtggttttgacttccttatctcttgggagaagcttctgttttaaggaatttctcttccttcttctcctgcctctagcctctcctggaaaggcctggatatggtttctaaaatctcagctgagaacttcagaaaacagcagcagtattttccttttcctagtgctaaaatccctttccctagaaattggctcaccttgggaaacccagggaaagaatcagcaggttctctgccctccctaggggttggggaaggacccaccccggtcagcacagtgccttttcctctcctgctctgagccagggtggggcattccctctagattcaggtttgggcaggggtcctatagtccctgccatggggctgcttccctgtcccttccctcccctttgctggcctactctggcataattcaagtgtcttcttgccttggggatccttagtggcatcaaatggcaacatggaatattgtcctccatgcccctccagaaggacctaggagagtaggtgagctttccaaagtgagagacgaatctttctttctttttttttttaaagggcaggatgggtatgctttgggctttctccttctgtggccccggaggaaggagagactgaggcaaggcaaagtgatagtacactgaagcagaaccggaaacacccaggaactgttcagaaatctcagaagaaatctgcttctcttcgatggaaagatataattaacgatcaaagagctctaagaaaattgcaaagaagccttaatgttcaagctttagaaagatcagagcaatttttctctttcagtccaaactaagactctctgtatttaaatctctctggggcaagagggctagatttcctcattttgttatgagactagattggtaccagtagatcagctgcctagcgagggcaggtttcttctttgcatctgtgtggcttgcttccagtctggcctgtcctttccagctgccttttgtctagcctgctatggggggccagattatcttgataagagcaggtgatttggggactagctgggttggcaggaaaagagcaggatggatctcttgggacaggttcccccaggagtataaacacaaggagccaggattgtgctggcagccaaggaaacagtagtgcctgtttgagttggcagagagggccttggcacctcttgcatccaggcagtcttgtgagatgggggcacatagcactggggaaagcagaactccattctcacctctattttgagcttcagtgctttatttcagtatgaggaaaaacaacaacaaactgaagtgcgctttccgtcctttcaaaggacaactgtcgggaagggagagccgagttgcgaggtaggaggggagcactggcagggagagacattcttgactcctctcttccctggtgtgttgtgatccagggaatgaaaagaaatttgaccctggattggttctctccttggacttaaggaatcttaccttttccttccacaaagttctcccaggcaaggaccagctgcccattctgagcccagggcagcctcttcaaccattattggtctaacctggcttgtcaggaaaccaagcccacccttccacattgggcctggctgctctattctgtaccaagtactggagaaaaagcatcaagttcttagcccttgtagcttctaccctagtttcccatcctctctctgtggaggccaaaccaactctttgccagcagccacaacatgcattgacagcggcacagtgagatataactgatgggctttgaacctggttggccggggaagctgtaggggtggatagagctggctttccttctgggctgtctccatctgaccctaccccttccatgtcccaccccactcccaccaaaaagtacaaaatcaggatgtttttcactgtccattgctttgtgttttaataaacaatttgcagtgacactctgaaaaaaaaaaaaaaaaaa

SEQ ID NO: 3796 - DNA, 5393 bp, Homo Sapiens
  NM_014734
gtcagtgacgcgggcgctgcagccgtcgctaccgccgcgttctattctccgaagccggcgaccgccccacctcctccctccctcccgcccgcttcctctgcccacagcgccggccagagcgagctagacaagggcacgcggggcctcgcctagacccgagaagactgcgggcgcgcgcaagcggcggcgtggaagctgtgagcgcccccatcccggaggtctccgccggctcccgggtgaatcagctcccggccgactttaggattcttctggattttaaattttttctttttaaaaaaacttggacggataaaagatgtgccatggcaggatagcaccaaagagcacctcagtgtttgccgtggcctccgtgggacatggagtgttccttccgctagtgatcctttgcaccctgcttggagacggacttgcttccgtgtgccccctaccaccggagccagagaatggtggctacatctgccacccccggccctgcagagaccccctgacagcaggcagtgtcatcgaatacctgtgtgctgaaggctacatgttgaagggcgattacaaatacctgacgtgtaagaatggcgagtggaaaccagccatggagattagctgccgtctcaacgaggataaagacacccacacatcacttggggtccccacgctgtctatagtggcttctactgccagctccgtggcgctcattctcctcctcgtggtgctgtttgtgctgctgcagccaaagctgaagtctttccatcatagcaggcgtgaccagggggtatctggggaccaggtctccatcatggtggatggagtccaggttgcactaccatcatacgaggaggctgtatatggcagttctggtcactgtgtgccacctgctgaccccagagtacagattgtgctgtcagaagggtctgggcccagtgggaggagcgtgccaagggagcaacagctgccggaccaaggggcctgctcctctgcaggtggagaagatgaggccccaggccagtctggactatgtgaagcctggggctctcgggcctcagagactgtgatggtgcatcaggcaaccacctcttcctgggtggccggctcagggaaccgccaactggcacacaaagaaactgcagattcagagaacagtgacatacaaagccttttatccctcacgtcagaggagtacacagatgatattccactgttgaaagaagcatgagggcagcggccagcctttcctctctgcgaggttctctcagcccttcctccctctccctgtgggattgagcaccctgtactctccagccaccttacctggatacctgagctgccacctgtgtatctgtgtatctctgagggccctataggcccaccttgctggaaactcaaggaagattctcgccatctgcctgttggacagctggaggagctggctctttgcctggccccgccttcccatctgtcagagacatatttgaatgtgctggatcaaaccctcccttttcctaagcctctgggtcccctccagccagctctttggcggcagcccccaccagctcctgtgggcctgagtgctgctgtgtttacttgtgcctttcccccaccctgtccagtttccctgtcatgcagacttgttgctgtccacaagccttagtggctgcactgctgccccctgccacacagggggccgggcctgggtctgtcctgtttcctttgagggttgcccctactgccctttgcaggaacagatccaggtgtgagagctcttgagtcaagagtggcagaagtggctctaattggggtgagagtgtagtccctgggcttgccctgggttgaccctggtggcatatttccttggctgaggatggaagatttggagaatcatgtccatgctggcccaggacccagccatctggcccaaaggcacaagctcctggccctgttgagttgagagtttccaagaagcatccagaagatcccaagggagagaaggaaaatggctgataatgattgtcttcctaatatgcaagttctcacttcctacttccagcatcggccttcctggccttgtcttttttttgtttccctggagtataatgggaagttgcatgctgcctcctgggttttatcccagatagctctggctttcttgctgcccacaggggcctggggcaggaaggagacttgctgagatgccatggagtgcccatctggtcactggcagtctgggcaggttgcccctttctgggtttgtggtgacggaggggaggccgagaggcacagaccaagtccccgggtggctgcaggcagctccagcccggtcctgaggatcctcctcaccatggtcacgtgccttagtaactgtgcccaggaagtggcctgctgcttgctgtgctgctgcttttcctacttctgcccttccctgccacccctcgcatgtcacagctgacaagcaattccttgtcttccctggccccctgggggaagggctgagaaacagtccgtgtgcaccccaaccttaatggcctgaggtgggcagaggggtgtggagcagcctggagtacagggccctgggggaggagcccactgatgaggggcgctctcccatagccatgtgttgaatgctaactaggctggggtggacgaactctgccaactgctgtcatcttagaagatagatgcagcagtaaggaatgtttgttttgcttttttctgaaattttctgaagcactgtggctgggaaacttcgaagcggaccctgtgctgcatgtctgctcctcccctgagcctgtctgcttgggggtggtaaaaataaaaatcccagtttattttcagtaccttacctaacagggttggctccaggcgtgggtggcctagaagatgaggggagtggtcttctcccagccttttaccctcttgcctcctgcctccgcgcttacacacgcactttaccacccggtcattccctggcctcttgctgccacttgtagtcttccttccttcctctcagggtaagggcagtgcctgctgtgcctgttggccactcccacacttcccctcccccaggagccctcatctgctgtgctgagtccaggaaagcatagttaggtagggagctggttggagaaggtgctagaactagaaggcagatgagactagcatgggcccacctggagggctgtccctaatggccccagtcgccttacctcacccacagcagtgcccttgtcttcctccaaaacagaaagcagtgacaaaagggggaggggtggtaatctgaagtctcactgctgagccttcagcttttatttttcactgtttcaaaacccgcattctattctagaatggtttttaaaatggaagatcttacctttttctatcttgttactctggggttttgtccccctaagagattgcactttttgtttggggtttattcagctgcatagatgaccagcttgatccctggtgaaatgaaaagccttccttctcctgaagcctctttccgccctgccctccactaacaacactgaggagcacaagcccaggcttgcccacctggtaggaaaggaagaaattagaacaatgggagccttggctcccctctcgtctcctcccctccttcttgtcactggctttgatgaggcccacttcccagaggctcctgggcctgtgagtgcaggagctcattctcccctcactgctgaagtctgtgacagcttcttcctccagttatgtctttcttccaaagcaatttcttaaccatcagccatgtgctgctatttctagggcttctgggctttgtcccttactgagagattagggactccacagctgccttgaggtagggcctggctgagagacaagggtagcagcaggtggcaggctgttaaaagacaggctgcctgaggagcctggagcaggtggaaacaggtggaagaaaccggccacagccctgctttaccgggctcacctctagggcattccagcaagaggctgatgcaggagaatggccagcaccaaaggacatttaaaagagtttttgggtttttttgtttgtttgttgttggtgtttgtttttttttttttttttttggcacacttgagctgactcagtgcaggtttaatatcctggtgacttgcagtcacattctaatgactttcaagggccagaatatggtgaaaatcacttaaaatatccgtcccttccatgccttagtttagcaggtaggctctatcttttgccatttctgtattttatgtgctgtgttcccgtttcactgggtatgaactgtgaaatcgactgaatcctggccactttatgagtttgtttggttttataaggcatttcaatgtacattctataaatacaagcactccatttgcaaacagatcttaagctaatattttctttcccattcatcttgccctccccctcctcccgccagctttaaagttcagtggagaagccagatggcaattcagacaaaggtatactcttcctgcttcatgggtggtggcacgggaatagatagcccttagccctttccctcccagtcccagctgagccctcagaccacttgcttcccacataacaatgtcgcctccatttccgaggaacatccttgcgtagagaatgaaatatgctgcaatcatttctgcatccttactcctcacccccaaagaaaaaaaaaaggcctagcagggaagcagcatgcaggcttcacagcttaatgccaaggacagcgagtgaggctgggagcttctcttgggcctgctgggtctgtcagctctcggaatagggacagtccttactggtgccccaaggtgggacttggagaatattttgcttggcatatgtttggtctgaatggtgtagttgctggttccctagagaggaaaaggtggcaggcccagctttgctgggaaatggctcttaatttccagttgaaaccctagtagaattgtgaatgaaaacctcaaggttgagcccctctgccaagcagcagagctagtagaaggggatgcaggggcaaagcactcagttgccaagcaaggaggagagatgtacgtgggctgtgtggcagtccccacaccctgccctggcttcttcaggttatcgcaccactatggaatcctttgcagaatggtactcatataatggtttaaaacaacacattcataattgactctgtgcaggatgtcactcaatcagtttgggtttgctttattttattttatatatatattttttggtatcctgtacattgcagtgggtgtgaagatagtattttaatatttgtacaaagtttaatttaattttaattgttctatgtatataactgcatttctaaataattaaaaaaaagttcttatgaaggcaa

SEQ ID NO: 3797 - DNA, 1508 bp, Homo Sapiens
  NM_014736
gagagaccttggagcgcgcgggaaagagaccaatataaactgtggcgggatagttttcgggtccttgtccagtgaaacaccctcggctgggaagtcagttcgttctctcctctcctctcttcttgtttgaacatggtgcggactaaagcagacagtgttccaggcacttacagaaaagtggtggctgctcgagcccccagaaaggtgcttggttcttccacctctgccactaattcgacatcagtttcatcgaggaaagctgaaaataaatatgcaggagggaaccccgtttgcgtgcgcccaactcccaagtggcaaaaaggaattggagaattctttaggttgtcccctaaagattctgaaaaagagaatcagattcctgaagaggcaggaagcagtggcttaggaaaagcaaagagaaaagcatgtcctttgcaacctgatcacacaaatgatgaaaaagaatagaactttctcattcatctttgaataacgtctccttgtttaccctggtattctagaatgtaaatttacataaatgtgtttgttccaattagctttgttgaacaggcatttaattaaaaaatttaggtttaaatttagatgttcaaaagtagttgtgaaatttgagaatttgtaagactaattatggtaacttagcttagtattcaatataatgcattgtttggtttcttttaccaaattaagtgtctagttcttgctaaaatcaagtcattgcattgtgttctaattacaagtatgttgtatttgagatttgcttagattgttgtactgctgccatttttattggtgtttgattattggaatggtgccatattgtcactccttctacttgctttaaaaagcagagttagatttttgcacattaaaaaattcagtattaattaaacattacttattctaccctcttttttggcaaggaggacaaatacgcaatgttggaaaaccttggatggatatcttctctttaaaaaaatgtaaagataatttggtcttgagggtttaaacggttgataatgcctctacaacaacaagaaaaaagataaaatactaggatagaatcatggtgggcacagtggcttctcaggaggctgaggagggaggtttgcttgagtccaggagttggagaccagcccaggcaacatagcgtaaaccctatctctaaaacaatttttagccaggtgcggtggctcacgcctgtaatcccagcactctgggaggccgaggcgggtggatcatgaggtcaggagatcgagaccatcctgcctaacaaggtgaaaccccgtctctactaaaaatacaaaaaattagccgggcgcggtggcgggcgcctgtagtcccagctactcgggaggctgaggcaggagaatggcgtgaacccgggaagtggagcttgcagtgagccgagattgcgccactgcagtcggcagtccggcttgggcgacagagcgagactccgtctcaaaaaaaaaaaaaaaaaaaaaaaa

SEQ ID NO: 3798 - DNA, 1734 bp, Homo Sapiens
  NM_014740
acgcacgcacgtctctcgctttcgcatacttaaggcgtctgttctcggcagcggcacagcgaggtcggcagcggcacagcgaggtcggcagcggcacagcgaggtcggcagcggcacagcgaggtcggcagcggcagcgaggtcggcagcggcacagcgaggtcggcagcggcagcgaggtcggcagcggcgcgcgctgtgctcttccgcggactctgaatcatggcgaccacggccacgatggcgacctcgggctcggcgcgaaagcggctgctcaaagaggaagacatgactaaagtggaattcgagaccagcgaggaggtggatgtgacccccacgttcgacaccatgggcctgcgggaggacctgctgcggggcatctacgcttacggttttgaaaaaccatcagcaatccagcaacgagcaatcaagcagatcatcaaagggagagatgtcatcgcacagtctcagtccggcacaggaaaaacagccaccttcagtatctcagtcctccagtgtttggatattcaggttcgtgaaactcaagctttgatcttggctcccacaagagagttggctgtgcagatccagaaggggctgcttgctctcggtgactacatgaatgtccagtgccatgcctgcattggaggcaccaatgttggcgaggacatcaggaagctggattacggacagcatgttgtcgcgggcactccagggcgtgtttttgatatgattcgtcgcagaagcctaaggacacgtgctatcaaaatgttggttttggatgaagctgatgaaatgttgaataaaggtttcaaagagcagatttacgatgtatacaggtacctgcctccagccacacaggtggttctcatcagtgccacgctgccacacgagattctggagatgaccaacaagttcatgaccgacccaatccgcatcttggtgaaacgtgatgaattgactctggaaggcatcaagcaatttttcgtggcagtggagagggaagagtggaaatttgacactctgtgtgacctctacgacacactgaccatcactcaggcggtcatcttctgcaacaccaaaagaaaggtggactggctgacggagaaaatgagggaagccaacttcactgtatcctcaatgcatggagacatgccccagaaagagcgggagtccatcatgaaggagttccggtcgggcgccagccgagtgcttatttctacagatgtctgggccagggggttggatgtccctcaggtgtccctcatcattaactatgatctccctaataacagagaattgtacatacacagaattgggagatcaggtcgatacggccggaagggtgtggccattaactttgtaaagaatgacgacatccgcatcctcagagatatcgagcagtactattccactcagattgatgagatgccgatgaacgttgctgatcttatctgaagcagcagatcagtgggatgagggagactgttcacctgctgtgtactcctgtttggaagtatttagatccagattctacttaatggggtttatatggactttcttctcataaatggcctgccgtctcccttcctttgaagaggatatggggattctgctctcttttcttatttacatgtaaataatacattgttctaagtctttttcattaaaaatttaaaacttttcccataaactctatacttctaaggtgccaccaccttctctagtaactta

SEQ ID NO: 3799 - DNA, 3996 bp, Homo Sapiens
  NM_014742
agtttctgccaggagctaatatggcttccttagttacaccgttctctctcttcacctaatcagcgaccttactttcccagaccagactgtcgagcaggagctaagactccttttcccctctgctgaccgccactacaggagcggttgaagccagacgaccaccttgtggagttaaactccgtaaccagggagcaccacttccgctgacgtcattacggcgacacgtggatccaagatggcgacggcgatggattggttgccgtggtctttactgcttttctccctgatgtgtgaaacaagcgccttctatgtgcctggggtcgcgcctatcaacttccaccagaacgatcccgtagaaatcaaggctgtgaagctcaccagctctcgaacccagctaccttatgaatactattcactgcccttctgccagcccagcaagataacctacaaggcagagaatctgggagaggtgctgagaggggaccggattgtcaacacccctttccaggttctcatgaacagcgagaagaagtgtgaagttctgtgcagccagtccaacaagccagtgaccctgacagtggagcagagccgactcgtggccgagcggatcacagaagactactacgtccacctcattgctgacaacctgcctgtggccacccggctggagctctactccaaccgagacagcgatgacaagaagaaggaaaaagatgtgcagtttgaacacggctaccggctcggcttcacagatgtcaacaagatctacctgcacaaccacctctcattcatcctttactatcatcgggaggacatggaagaggaccaggagcacacgtaccgtgtcgtccgcttcgaggtgattccccagagcatcaggctggaggacctcaaagcagatgagaagagttcgtgcactctgcctgagggtaccaactcctcgccccaagaaattgaccccaccaaggagaatcagctgtacttcacctactctgtccactgggaggaaagtgatatcaaatgggcctctcgctgggacacttacctgaccatgagtgacgtccagatccactggttttctatcattaactccgttgttgtggtcttcttcctgtcaggtatcctgagcatgattatcattcggaccctccggaaggacattgccaactacaacaaggaggatgacattgaagacaccatggaggagtctgggtggaagttggtgcacggcgacgtcttcaggcccccccagtaccccatgatcctcagctccctgctgggctcaggcattcagctgttctgtatgatcctcatcgtcatctttgtagccatgcttgggatgctgtcgccctccagccggggagctctcatgaccacagcctgcttcctcttcatgttcatgggggtgtttggcggattttctgctggccgtctgtaccgcactttaaaaggccatcggtggaagaaaggagccttctgtacggcaactctgtaccctggtgtggtttttggcatctgcttcgtattgaattgcttcatttggggaaagcactcatcaggagcggtgccctttcccaccatggtggctctgctgtgcatgtggttcgggatctccctgcccctcgtctacttgggctactacttcggcttccgaaagcagccatatgacaaccctgtgcgcaccaaccagattccccggcagatccccgagcagcggtggtacatgaaccgatttgtgggcatcctcatggctgggatcttgcccttcggcgccatgttcatcgagctcttcttcatcttcagtgctatctgggagaatcagttctattacctctttggcttcctgttccttgttttcatcatcctggtggtatcctgttcacaaatcagcatcgtcatggtgtacttccagctgtgtgcagaggattaccgctggtggtggagaaatttcctagtctccgggggctctgcattctacgtcctggtttatgccatcttttatttcgttaacaagctggacatcgtggagttcatcccctctctcctctactttggctacacggccctcatggtcttgtccttctggctgctaacgggtaccatcggcttctatgcagcctacatgtttgttcgcaagatctatgctgctgtgaagatagactgattggagtggaccacggccaagcttgctccgtcctcggacaggaagccaccctgcgtgggggactgcaggcacgcaaaataaaataactcctgctcgtttggaatgtaactcctggcacagtgttcctggatcctggggctgcgtggggggcgggagggcctgtagataatcttgcgtttttcgtcatcttattccagttctgtgggggatgagtttttttgtgggttgctttttcttcagtgctaagaaagttccctccaacaggaactctctgacctgtttattcaggtgtatttctggtttggatttttttttccttctttgttttaacaaatggatccaggatggataaatccaccgagataagggttttggtcactgtctccacctcagttcctcagggctgttggccaccctatgactaactggaagaggacacgccagagcttcagtgaggtttccgagcctctccctgcccatcctcaccactgaggccacgacaaagcacagctccagctcggacagcaccctcagtgccagccagcctctgccagacctctctttccctcttctccccagcctcctccagggctgcccaaggcagggtttccagccaggcctcggggtcatcttttcaccaggagcaaacccaagtcttagttgctacaagaaaatcccctggaagtactgggggccaggttccccagacagcaggaattgcccctgttcagagcagccggagtttgctggaccacaaggaagaagagaagagacttgcagtgaactgtttttgtgccaagaaaccctggacctggggccaagtatttcccaagccaagcatccacttgtctgtgtctgggaagggatggccaaggccgctagggtccttacccctcaggatcactccccagccctttcctcaggaggtaccgctctccaaggtgtgctagcagtgggccctgcccaacttcaggcagaacagggaggcccagagattacagatcccctcctgtaagtggccaggcattctctccctgccctctctggcctctggggtcatactcacttctttagccagccccatcccctccaccccacacctgagttcttgcctcctccttttggggacacccaaaacactgcttgtgagaaggaagatggaaggtaagttctgtcgttctttccccaatccccaggaatggacaagaagccaacttagaaagaagggtctcacgtggctggcctggctcctccgtagacccctgttcttttcaacctctgcccacccgtgcatgtcatcacaaacatttgctcttaagttacaagagaccacatccacccagggattagggttcaagtagcagctgctaacccttgcaccagcccttgtgggactcccaacacaagacaaagctcaggatgctggtgatgctaggaagatgtccctcccctcactgccccacattctcccagtggctctaccagcctcacccatcaaaccagtgaatttctcaatcttgcctcacagtgactgcagcgccaagcggcatccaccaagcatcaagttggagaaaagggaacccaagcagtagagagcgatattggagtcttttgttcattcaaatcttggatttttttttttccctaagagattctctttttagggggaatgggaaacggacacctcataaagggttcaaagatcatcaatttttctgactttttaaatcattatcattattatttttaattaaaaaaatgcctgtatgcctttttttggtcggattgtaaataaatataccattgtcctactgaaaaaaaaaaaaaaaaaa

SEQ ID NO: 3800 - DNA, 6593 bp, Homo Sapiens
  NM_014745
atggaccagagctatgtgtgcgcgctcattgccatgatggtatggagcatcacctaccacagctggctgaccttcgtactgctgctctgggcctgcctcatctggacggtgcgcagccgccaccaactggccatgctgtgctcgccctgcatcctgctgtatgggatgacgctgtgctgcctacgctacgtgtgggccatggacctgcgccctgagctgcccaccaccctgggccccgtcagcctgcgccagctggggctggagcacacccgctacccctgtctggaccttggtgccatgttgctctacaccctgaccttctggctcctgctgcgccagtttgtgaaagagaagctgctgaagtgggcagagtctccagctgcgctgacggaggtcaccgtggcagacacagagcccacgcggacgcagacgctgttgcagagcctgggggagctggtgaagggcgtgtacgccaagtactggatctatgtgtgtgctggcatgttcatcgtggtcagcttcgccggccgcctcgtggtctacaagattgtctacatgttcctcttcctgctctgcctcaccctcttccaggtctactacagcctgtggcggaagctgctcaaggccttctggtggctcgtggtggcctacaccatgctggtcctcatcgccgtctacaccttccagttccaggacttccctgcctactggcgcaacctcactggcttcaccgacgagcagctgggggacctgggcctggagcagttcagcgtgtccgagctcttctccagcatcctggtgcccggcttcttcctcctggcctgcatcctgcagctgcactacttccacaggcccttcatgcagctcaccgacatggagcacgtgtccctgcctggcacgcgcctcccgcgctgggctcacaggcaggatgcagtgagtgggaccccactgctgcgggaggagcagcaggagcatcagcagcagcagcaggaggaggaggaggaggaggaggactccagggacgaggggctgggcgtggccactccccaccaggccacgcaggtgcctgaaggggcagccaagtggggcctggtggctgagcggctgctggagctggcagccggcttctcggacgtcctctcacgcgtgcaggtgttcctgcggcggctgctggagcttcacgttttcaagctggtggccctgtacaccgtctgggtggccctgaaggaggtgtcggtgatgaacctgctgctggtggtgctgtgggccttcgccctgccctacccacgcttccggcccatggcctcctgcctgtccaccgtgtggacctgcgtcatcatcgtgtgtaagatgctgtaccagctcaaggttgtcaacccccaggagtattccagcaactgcaccgagcccttccccaacagcaccaacttgctgcccacggagatcagccagtccctgctgtaccgggggcccgtggaccctgccaactggtttggggtgcggaaagggttccccaacctgggctacatccagaaccacctgcaagtgctgctgctgctggtattcgaggccatcgtgtaccggcgccaggagcactaccgccggcagcaccagctggccccgctgcctgcccaggccgtgtttgccagcggcacccgccagcagctggaccaggatctgctcggctgcctcaagtacttcatcaacttcttcttctacaaattcgggctggagatctgcttcctgatggccgtgaacgtgatcgggcagcgcatgaactttctggtgaccctgcacggttgctggctggtggccatcctcacccgcaggcaccgccaggccattgcccgcctctggcccaactactgcctcttcctggcgctgttcctgctgtaccagtacctgctgtgcctggggatgcccccggccctgtgcattgattatccctggcgctggagccgggccgtccccatgaactccgcactcatcaagtggctgtacctgcctgatttcttccgggcccccaactccaccaacctcatcagcgactttctcctgctgctgtgcgcctcccagcagtggcaggtgttctcagctgagcgcacagaggagtggcagcgcatggctggcgtcaacaccgaccgcctggagccgctgcggggggagcccaaccccgtgcccaactttatccactgcaggtcctaccttgacatgctgaaggtggccgtcttccgatacctgttctggctggtgctggtggtggtgtttgtcacgggggccacccgcatcagcatcttcgggctgggctacctgctggcctgcttctacctgctgctcttcggcacggccctgctgcagagggacacacgggcccgcctcgtgctgtgggactgcctcattctgtacaacgtcaccgtcatcatctccaagaacatgctgtcgctcctggcctgcgtcttcgtggagcagatgcagaccggcttctgctgggtcatccagctcttcagccttgtatgcaccgtcaagggctactatgaccccaaggagatgatggacagagaccaggactgcctgctgcctgtggaggaggctggcatcatctgggacagcgtctgcttcttcttcctgctgctgcagcgccgcgtcttccttagccattactacctgcacgtcagggccgacctccaggccaccgccctgctagcctccaggggcttcgccctctacaacgctgccaacctcaagagcattgactttcaccgcaggatagaggagaagtccctggcccagctgaaaagacagatggagcgtatccgtgccaagcaggagaagcacaggcagggccgggtggaccgcagtcgcccccaggacaccctgggccccaaggaccccggcctggagccagggcccgacagtccagggggctcctccccgccacggaggcagtggtggcggccctggctggaccacgccacagtcatccactccggggactacttcctgtttgagtccgacagtgaggaagaggaggaggctgttcctgaagacccgaggccgtcggcacagagtgccttccagctggcgtaccaggcatgggtgaccaacgcccaggcggtgctgaggcggcggcagcaggagcaggagcaggcaaggcaggaacaggcaggacagctacccacaggaggtggtcccagccaggaggtggagccagcagagggccccgaggaggcagcggcaggccggagccatgtggtgcagagggtgctgagcacggcgcagttcctgtggatgctggggcaggcgctagtggatgagctgacacgctggctgcaggagttcacccggcaccacggcaccatgagcgacgtgctgcgggcagagcgctacctcctcacacaggagctcctgcagggcggcgaagtgcacaggggcgtgctggatcagctgtacacaagccaggccgaggccacgctgccaggccccaccgaggcccccaatgccccaagcaccgtgtccagtgggctgggcgcggaggagccactcagcagcatgacagacgacatgggcagccccctgagcaccggctaccacacgcgcagtggcagtgaggaggcagtcaccgaccccggggagcgtgaggctggtgcctctctgtaccagggactgatgcggacggccagcgagctgctcctggacaggcgcctgcgcatcccagagctggaggaggcagagctgtttgcggaggggcagggccgggcgctgcggctgctgcgggccgtgtaccagtgtgtggccgcccactcggagctgctctgctacttcatcatcatcctcaaccacatggtcacggcctccgccggctcgctggtgctgcccgtgctcgtcttcctgtgggccatgctgtcgatcccgaggcccagcaagcgcttctggatgacggccatcgtcttcaccgagatcgcggtggtcgtcaagtacctgttccagtttgggttcttcccctggaacagccacgtggtgctgcggcgctacgagaacaagccctacttcccgccccgcatcctgggcctggagaagactgacggctacatcaagtacgacctggtgcagctcatggcccttttcttccaccgctcccagctgctgtgctatggcctctgggaccatgaggaggactcaccatccaaggagcatgacaagagcggcgaggaggagcagggagccgaggaggggccaggggtgcctgcggccaccaccgaagaccacattcaggtggaagccagggtcggacccacggacgggaccccagaaccccaagtggagctcaggccccgtgatacgaggcgcatcagtctacgttttagaagaaggaagaaggagggcccagcacggaaaggagcggcagccatcgaagctgaggacagggaggaagaagagggggaggaagagaaagaggcccccacggggagagagaagaggccaagccgctctggaggaagagtaagggcggccgggcggcggctgcagggcttctgcctgtccctggcccagggcacatatcggccgctacggcgcttcttccacgacatcctgcacaccaagtaccgcgcagccaccgacgtctatgccctcatgttcctggctgatgttgtcgacttcatcatcatcatttttggcttctgggcctttgggaagcactcggcggccacagacatcacgtcctccctatcagacgaccaggtacccgaggctttcctggtcatgctgctgatccagttcagtaccatggtggttgaccgcgccctctacctgcgcaagaccgtgctgggcaagctggccttccaggtggcgctggtgctggccatccacctatggatgttcttcatcctgcccgccgtcactgagaggatgttcaaccagaatgtggtggcccagctctggtacttcgtgaagtgcatctacttcgccctgtccgcctaccagatccgctgcggctaccccacccgcatcctcggcaacttcctcaccaagaagtacaatcatctcaacctcttcctcttccaggggttccggctggtgccgttcctggtggagctgcgggcagtgatggactgggtgtggacggacaccacgctgtccctgtccagctggatgtgtgtggaggacatctatgccaacatcttcatcatcaaatgcagccgagagacagagaagaaatacccgcagcccaaagggcagaagaagaagaagatcgtcaagtacggcatgggtggcctcatcatcctcttcctcatcgccatcatctggttcccactgctcttcatgtcgctggtgcgctccgtggttggggttgtcaaccagcccatcgatgtcaccgtcaccctgaagctgggcggctatgagccgctgttcaccatgagcgcccagcagccgtccatcatccccttcacggcccaggcctatgaggagctgtcccggcagtttgacccccagccgctggccatgcagttcatcagccagtacagccctgaggacatcgtcacggcgcagattgagggcagctccggggcgctgtggcgcatcagtccccccagccgtgcccagatgaagcgggagctctacaacggcacggccgacatcaccctgcgcttcacctggaacttccagagggacctggcgaagggaggcactgtggagtatgccaacgagaagcacatgctggccctggcccccaacagcactgcacggcggcagctggccagcctgctcgagggcacctcggaccagtctgtggtcatccctaatctcttccccaagtacatccgtgcccccaacgggcccgaagccaaccctgtgaagcagctgcagcccaatgaggaggccgactacctcggcgtgcgtatccagctgcggagggagcagggtgcgggggccaccggcttcctcgaatggtgggtcatcgagctgcaggagtgccggaccgactgcaacctgctgcccatggtcattttcagtgacaaggtcagcccaccgagcctcggcttcctggctggctacggcatcatggggctgtacgtgtccatcgtgctggtcatcggcaagttcgtgcgcggattcttcagcgagatctcgcactccattatgttcgaggagctgccgtgcgtggaccgcatcctcaagctctgccaggacatcttcctggtgcgggagactcgggagctggagctggaggaggagttgtacgccaagctcatcttcctctaccgctcaccggagaccatgatcaagtggactcgtgagaaggagtaggagctgctgctggcgcccgagagggaaggagccggcctgctgggcagcgtggccacaaggggcggcactcctcaggccgggggagccactgccccgtccaaggccgccagctgtgatgcatcctcccggcctgcctgagccctgatgctgctgtcagagaaggacactgcgtccccacggcctgcgtggcgctgccgtcccccacgtgtactgtagagttttttttttaattaaaaaatgttttatttatacaaatggacaatcagaaaaaaaaaaaaaaaaaa

SEQ ID NO: 3801 - DNA, 5740 bp, Homo Sapiens
  NM_014746
gagcctcccgcgtgcccggcctctgtgcgcgctcgcgccccgcccgcgcagccgcttctccccgcgcgggctctcggcaggcgggaggcggcagggctggcattgcagtgcgggccgtgcgggctgcgcgggcgcggggaggcgcgggcggcaaactgcgggcacccggcaccccgcagccagtaccgggcggaggcgtcagagccgcgcaccgcggacgagcaggcccaggcatccagtaccctgctgactctgacatgcccccagcctcccccagctctgcagggagccctggtgccagagaccttctcccatttctccctatgggtgcctgacctgagggcagagacatctgagtgtgtataagcacagcaggacaccaggacctggcctgaagacatttcctctcctcccctctggatttctcagagactgttctgcgatgaccacaacaaggtaccggcccacctgggacctggccctcgacccgctggtgtcttgcaagctctgtcttggggagtacccagtggagcagatgacaaccatagcccagtgccaatgcatcttctgtactctgtgcctgaaacagtatgttgagctcttgatcaaagaaggattagaaactgcaattagctgcccagatgctgcctgccctaaacagggccacctacaggagaacgagattgagtgcatggttgcagctgaaattatgcaaagatataaaaagctacaatttgaaagagaggtgctgtttgatccctgtcggacttggtgcccggcgtccacctgccaagctgtgtgtcagctccaggacgtggggctgcagaccccccagccagtgcagtgcaaagcctgccgtatggaattctgctccacctgcaaagccagctggcaccctggccagggctgcccggagaccatgccgatcaccttcctccccggggagaccagtgctgctttcaaaatggaagaagatgacgcgcccatcaagcgctgccccaagtgcaaagtctacatcgagcgagacgaaggctgcgcgcagatgatgtgcaagaactgcaagcacgccttctgctggtactgcctggagtctctggacgatgatttccttctgatacactacgataagggaccctgccggaacaagctgggccactcccgggcatctgtgatctggcatcggacacaggttgtgggcatttttgcaggatttgggctgctgctcttggtggcctcacctttcctactcctggccactccctttgtactttgctgcaagtgcaagtgcagtaaaggtgacgacgacccgttacccacctagaggaagcgcgatgctggaacacatccctgcctccgggaagtgtggctctcccccaaccctccccaccgtccccccttcactaaacatctttcttgccttatgtgccccattgagcttcacagtgtcaggctggacgccgtgatttcagggacctatgtcacaatgttcgctgaggccccaggtgtggtggggaggggaggcaggtgtgggtagcgcacatccccacagatcaatctctgcagatgacagggaggtgctgtgagaagtgcaccaggcagctttctctctgtggtagactaggcatgtctggggatggcctaagagactttctgctccttggcttctagatggcaccatgttgtcagagaagtcttttaaggactgccactctcttcagacagaatctgattattccagcttgagagaagcactctgtttatgacaactgtttttattactaatggcatttagtaaaatcctttttagaaggtattttttttccaactgagtagtgaaaatcaacaaggtgcatataaaccatcctatgcctttcttgaaatgtgcattttaagaagttatagttaaacgacttttcaggagatttagaaagccttatgcactctttgtgtttttcttgaaacttgctgtagtaactttttgaacgctgtaagctgtgtactgttataagtgtgcttcctatattgttgcatttccttgataatattgacgtgtttaaaggaacatctcatctccattagatttgccttttgttgttttctctctttggtgattcagctcagctcatgggcctcatcccttctctcccaggtagcagaaaacgctttttattgtattcaatcccactgctttgctcggcaatggttctcctccgaattgctgccgtctggcctctggcctcagtcttcagatagacagtaagaagaaagcagcctcattgatccgcagatgtaggggcctcttggcagaggctggaggactctgggggctagggaagagcctgccagattttcacatttttaaaatgttctagtcattttgagaaatcatatatcttacacagttccaagtcctgttgctaaccgttttgctcttgttggggaaaagaacctcccatttcacttcgttttaacgtggggattttaccacttgatcttttacagggctgtctgtgaccatttccatggcagcaggatgcagggattaataaggacacatacacattattccaccaattgactttgaaaagtggagaaagtgtattctttaaagagaatttacttctaaaagccacaggtgcttttacaaagcaaactgcattgaatttaaaacttctaaaaataacaggcaaatattgtagctatattacagtgggattttaaaaatcttgttaaacattctataaagaagtaaaacaaaatccttttatctcagttatttgcccatcacaagcacatttttaaaatgttgctttgtgtgtgtttgacttctgcatttgagtatcagtctcaggtcctagtttactttccctggttggaaatttatttcttatttcctaacattgaattcgttagaaaaaacagcgtcacctcactcttcacctgtcatgttgattttccttatgaacccgaagccatttagaaaatccctgtgtgtcaaaattacattcaaaaagctctccttgtaattgcaagtttagtaactcagtaagaacatgcctgcgactccctttctggatggaacctgggctgtggctctctgtcgtttgtggtgctgtgatggtgtctactgttagaatagcttttctggaggtgggtggcaactccacgcgggagtcattggctgggcttgagccctcagcctgtgatatgtggatgcagctgtccagccactgccctttaacatgcccagcacacatgggaggcctgtggccctgtgtccagtggcccacaggacacgcctccaccatatgctcatccttcctgcctgaaattgctgctgcccatcgcatgagcccacacagtagcacccccgtccttaggatgagagtcagagcctttggaaaggctgcatccccagggctagagctcagatgaccttatttctagagggacaggctgttctgttggaagagtctctggcccagtcatgcacatctgtagccccagccatccttgtgccttcacctctgatgtgtttcacaagcacgtagttcaacccagatagggaccacagagattctggggccagccaggggcagtcaaattggcacctactggctctgactttttgtatgaagcatgcctcagtttcctcattttgatctagatataaaattaaaattgtccatttcctatataaataccagcaagatcactctgagatacataaactcgcatttccttctgttttagtaaggagtgccagacttatctttgatgggaatacagtatgaaccctgcttgatgtaaaatggaaatagcacacaggcagatggccctgggtttggactttgatcttgccatcattccccagtaaaacctggggagttctgcgttgagtggacggacttattcctgtgaagcggcataatttgtctccattgaaaaatggcattcactcttacagatggtgttcactgcaagccccagaagcatatggcatgtgttcactaagaggcctttaatcctggggagtaaggggcgaaggcccttagacaaccatggctgctgtactgccgcccagggtgggtggccagtgaggactggccttagcccagtggacctgtggcttctctgaggcccttgagtaactgaccacatttggaggttttgctggaaatgcctgacctctcagtctggctctgctgtgtagtccatagcccagccagatgagcttgcagcctcataggaggtcagcaccttgcaaagatgcagtcaccatagatgtccacgtagcagagactgacttaggatctgagataaagcatcggattgcaggaataactgtccaaattagttcttcctcctcaactcataggagtagctgtggacagaggaaccaacatctgccacctctggcattttctttctttttttttctttttgagacggagtttcgcttttgtcccccaagctggagtacaatgacaggatctcggctcactgcaagctctgcctcccgggttcaagcgattctcctgcctcagcctcccaagtagctgggattacaggcacccaccacctcacccagctaatttttgtattttcagtagagacggggtttcaccatgttggccaggctactctcaaactcctgacctcaggtgatctgcccacctcggcttcccaaagtgctggaattacaggcctgagccaccccacccggcctattttcttaaaggggaacaaatgatcttgacaacatattattccataaaaccagtttagggcacaggccagttcctgattagaacacaggacctgtgggagggactatcagagatgcaaaaattacttcaagatgagtttattgttttcatttgtattgcaaaagttagaagtcattttacaaattaaaaaaacatttttttcttggtagtctttaaaaattaggggattgaaaggatccaggatgggctttgtgtgtgtgtctcagattctcatttattagtgagcacacctgtgtatatatataaatcacaaggagatcatcaagggaaaacattttgcatgtgtaaagcttcatgaagttctctttaaaaaataccaaagcttgtttatttctgataattaacctaagcccttatgaaaataaacaaaatgaagggattatgacaggtattaccaaaaacaccaaaaggaacaaaggggcctgcgttaaaacctaattgctaatgcttcacaactaggagagcatgccgtcttgatgtttaaaaaacccagggtctccacccttcctttgatttgtgcaattctgtcttccacagttccggagccttcagtgaggggtagctacatgccccatgcctgccctttctttccttctttgctcactttactatgggtgtattttaatcttgtataaaaatatgcatgaatgagtcatgcacatgtatacgttatgtatttgacaagtggtggtgaaacaaaatcaaaacagatttgatttgtgtttttgaaatgtcagtacattttgtgccactaacactgtgatgtataaaagagctgtttgaatgccttttaatgttgtgttttgtactctggaatcatatggaaaaagtttgatttgtaatttcaatacatattttaaatgtattgtgtcttacgtagtttgtccccccctttagcagggattcctttttaaagctattttggctggaatacaggtgacttttgtaaa

SEQ ID NO: 3802 - DNA, 7233 bp, Homo Sapiens
  NM_014747
cgtgggctgctgcggagccggcagcgcaggcgggcggagcggagctgcccccgtggtggcgggcgatgcccccgtgagcctccctcgccgcccctccccgccccgcgtgcctatccactcggagtccgcgccagcctggggccgggccgcgcctactgccgggttcgcggggcggggtcccggggcagcacctgccccgccttgcggagccgcctcggcctgtggaggccccctccctgtctggaccccggccccacctccggacccttttatcacatcgcctcctctgggagcctgccctgattgccttcacctcatttcttgaaaattggtgttttggcagaagtcaattgaagccttgtgcaaatgccctaggggtgtgctgttgggaggcagccccctgtgatgcggaacaccaggctcagattcatcagttcgagctgcctgaggccctgccaccccggggaccatgtttaacggggagccaggtcctgcctcatctggggcctccaggaatgtggtgcggagctccagcattagcggtgaaatctgcggatcccagcaagccgggggcggggctgggaccaccaccgccaagaagcggcggagcagcctgggtgccaagatggtggccatcgtgggcctgactcagtggagcaagagcacactccagcttccgcagcctgaaggggccaccaagaagctgcgcagcaacatccgccggagcacggagacaggcatcgcggtggagatgcggagccgggtcacacgccagggcagccgggagtccaccgatgggagcaccaacagcaacagctccgacggcacgttcatcttccccactacccggctaggggctgaaagccagttcagcgatttcctggatgggctgggaccagctcagattgtggggcgacagacactggcaacaccacccatgggagatgtgcacattgccatcatggaccggagtggccagctggaggtggaagtgattgaagctcggggcctgacccccaaaccaggctccaaatccctcccagccacctatatcaaggtttacctgctggagaatggggcctgcttggccaagaagaagacaaagatgaccaagaagacctgtgatcccctgtaccagcaggctctgctctttgacgagggaccccagggcaaggtgctgcaggtgatcgtctggggagactatggccgcatggaccacaagtgcttcatgggcatggcccagatcatgctggacgagctggacctcagcgccgcggtcaccggctggtacaaactcttccccacctcctcagtggcagactccacactcggatccctcaccaggcgcctgtcccagtcttccctggagagtgccaccagcccctcatgctcttaaggatgtcaggaagaggccaggatggtggtgtggggaggggtgcctgctggccccatgtcctcccctgtacatagtcttcgtgtctttctggaccccttgtcctgctgcatgcctgttggctactgggctcatcccagctggcagtggagactgtagtgtgtgcgtgtgtgcgtgcgtgtgtgtgtgtgtgtacgtgaccacgttctatctgttcatttgtctgggtatagtcactcctggtgatgatatgggctgaaatgtctccacgtctctttgtgtcttgttgaaaagaaacccaaaggagtgttgtgtggacatgactcaccctgaggagtctccagggatggaggtggggcatgcggccactggtcggtgctgcctggtcctggcctggggcagagcctgtgtgttcttcacctgtgcctgctcctggtggtctctgctttgttttctgtcttgtcttttgttccactcttgactctcccggctctgccactgttttctgagaaatgtagcatccgctgcagctggccacactgagggccctctgggaaccccaccccactggagccgctccggcagctcttcctgccactgaatgcgttctgcagcatgtagcatgcccacctagctccctggccagggccctggggaggcagagggtacccaggggactgagggcttagaaatgactttctctatgaggctggaacctcctccttcttccagtgaagcacgaggtcttggttccagggttcctggccaggtgcccccttagcatttgttcttcatctcctgtctcttcaagcctccccactccaccgtgccgaaggagctctgccagtgggcctgggcaggcagccacagagggcatgttatctgctaaagcaaacagtcctcctgaggccctgagggtggccctgaccccctcagggctcattcctggtgggcatgactcggtaaggaggttctgtgggtagggctgtttgctggaataaggagggctgaggctgagttgttccccgccactgttgaggatcccatctgacatttggggattcactgcatgaagttgttcatttggggctccagtttttgtgcatttccagaccagggtccctgtctgggagctcagacttagctgggctccagcagcctggctccggactctcgtctgccaccatcaccagctctgtctaagcaatacttacccctccgggcttccctgctttcctgtgccccactgctgccctctgcagagccatctgctccaggcacccacctgcctctgcttgctttctcacccatgtctggttggagcttctcacagccactcaaaccctgacttgatttgacaactgggccctgttggtggagaccagtgcctgaactggaccctgtgaaatctgtcccgtgggaatcctgaagtctgactcaggaatgcccagacctgtccctgtccctcctcagctctagggtgaaaggcgagaggttgcacaggacatggacagagcagcccttgggtttgtatctggtaggggagaaagcagcaggacagtggaggtgtgtggaaggcactctttccacctctctccaggcattatccccaggtgctgaaatggctgtggccccagcacctgaggcaggggtacgctacctggggtagcagtagaaaggtcttggggtctgaatgacttggggcctccattcataaccaaagttgtaggggcatggaggcagtggcgccttatggataggtcatctcagcccaaagggcctccttggctggcatggttctgtgttacgttgaagccagagtcttataacacctcccaagaaagataggggaagaagccagaaccccacctggcctgcccacaggacaagaagtgggtaagggcaggaaggaaatgaacggagttagctcccaggctcctatctctgcctgagcctctattcttatattatcagagaaagggaccattgggtgcatagagatggggaggaggccactgggctgaattttctctttaggcggaaatgctctccccaggcccattgcgttcgtcaagttcttggaaatggacaaagggctctgtcctcctcgaccctagtgggggatcaagaaggaaactccgttgcaaaagggtattttaatctcctgtttatgatatattcacctctagagcagtcactgtcagggtgttgcgaaaatactctacacctttgggatgatagggttgttagtgacccacaggacagtatagatgtttgtggatgtagcactgagtggtgatacccagaccagcagtcaccccaggaagtgggggctacccataccctcattcctctggtggggagctgcctgcagagaggcctgccactgggggttccaggccgtggtgacccttgcctctggggaagggttagcacaggggaggttctagctggaggaggggtctgatgtgctggtaacttgggctgacctacctacagtccctggctgccaaaactgctcagcagttgggccactccactattccacctctctaaaagaaggtaatttcctccccaaattgaccttggggaattattcttttaaccctttgcaccaaataagttactcatccccacctggattttaccccatgagggtaaagttgtgtgaggctgacacgtctgtgtgatgcagtgtggctgcacttaagggtctgtttctcagcatcatggatgcaggggcttgtctgaaaagccactctggacctagcctgtcccagaagaggagaatgcacaagtgtaactcctggttgtttgctggggtgggggagcatctgctgtttgaggacggggggtggggaaggaaggaacatgatccctccagaagtctcccaccctggggccaactcactgccatgttcagtgtcccggctccaaatgcccccttgcccagatgaaaccctgcagtggttacaggaatggagctctttgtcattccacctcctctggtcaggcgaggttcactgtgcatatggcagagacaggagtggccctgcagtgatgttgggttgtgggcagggacagtgatggatgactcagagcgtctgtctttgtatttctgctctgttcattctgtcccactttcttcatagactccttttccctgcaatgggtttttggtatgaaaaaggctccagtaaatggagccaagtcttggtttgacaaggggaacttgatccttcagggaagaatcatctccaaaatgactccccatctggtttcttctaccacccaattctactaggaaaggagcacttaggaggctcttgggatgcagcaagtcccaggcaatgccagcatttcatgggggctgaggcagaacccaggagctccaagaaaggccacccatagagctcatcctctgtggaatcactgccggttagaacactgaggtcaagccagtcctcccatggtcatgccacccaccagggaagcatgcctgatctcttctttactgccagccttgaggagagcagaagcctccatttttaaagacaataaagacctccaagggtacttctttggaaatgaaatgtagcacaatcttagcctacgttaccaggagccctgacatgcaaccagggtccctcttccatgccctgctgcccaggagttgctgagctcctcttcccctggggttccagccctcctaatacctcatattccccatcttcctcagcccagaaagcaatggggctttagtgatgctcctcttttgtgtctctctggttgcctctagcactgtgcaaactctgcaagaaattgctgcctttgcttgatgttgtagatgagttgccctccacctggctggagagatggcacatcattcagggccagaaggttgtccagcagtgtttctgcagtggctgcagggagatggaaaagaagagccctgcttccctgcctcctcctacctttctcttccactcctcagagttttcttctccagtatcctgacatgtaaagagattctttaaaatgctgcttcttctactggactgtctttcactgagtagtcagggaggagatgaaaatgtggacacatccccccgccttctccctcaaccttttcactcacgtcagaagaggttggggcaaaacaaaacaagcatgattgaagagcaggggaagcccacacaatcaggtgagccctgatgggggctggactggcctggtctggctgggaaaggattcttttaaaagcgtgcctgagcatctcagagcaatgtcagtgatgccaaagagagcaacttggcctccttgggcaccaactctgatggctgagttgcacaaacgtggctcagatgttggcatgcccgatggtgggaccttgttctctgataaagggcttaatctttccatgtagcaaagcaactttccctccctcccctccccccgaaccctgagcttgggcttgtgtgggcccagcatggctgtgcctgtgagggaagccacatcagtgagagaaagttgcattctctcaggggcctagattggcttggggcaggtgcttgttgaaaagcatgagtgtttctgctttgggaaacccttccagggctctggttggaaacttggccagtaaggacagggccttgggcctcccaaggagttcacaatgatgccaggaagggtccctgagcctgggttccagtcagcttggctaacagaatggggcttgggaattccaggggcaactgagcatccaccccattagccagtgatctggacagggacagctggctacagggaatcaaaggctgttctgtacagttttaccagaaactgtgaccttgggtaaggctcctcacttttctgggcctcaacttcctcatctgcaaaatcagagcattagctgctctccccatgattccctcccagttttaattaaaagtctctgatctggagcacatgagggttgcgagcctggtgcacctggttcctgtctccgtgggctggtttccttcagcccctgatgcccaggctgggtgcaggctctcatctggtccatgcccagatgctgcctcagacaagaactctgggaatcctaacagactctgctttcctctcttcgtggtttgtcctccctcttttattcttgtgtaatgatgagacataattaagggtcatctacaatggacaattttcaaggtgctgatgtgatgtcacaacctccgctacatcctgagtaagtcagtgtccccaacagcagatgaggctgggtctttcctcatttctgcttctgggatgacatcagtgggagagttgaagatctgagaattctaaaggaaatgttctctgatgggaggagagagggaacttatttcccttcaaagtagtttgcttcttaagaccactcctccctccagaatgtctttaaccagacatcatttcagaaggtggggcagctgcttccttaggaagagtgggcctgatagctcaaccaactcctttagcatgtaaactcacagaaggcaagaacccctttttttagactttccaaatgcatcctgcaaagagagagatagctgatagggactgacaagcacactgtttagataagaagcaattagccttttatatctgtgctctatacattttctatgtgcagcatctttcctaacttgttgtggttcccgggtggcaggtgcacagctgggagggactgccggctgtttcgtacaacattcttgccaattcccttgaggagaaaattcttcacatggcttctgcatgtacagtatttgggcagcaaaacatgattaaagtcagtttgaaaatgg

SEQ ID NO: 3803 - DNA, 2043 bp, Homo Sapiens
  NM_014748
ccctatccggacaggtggctcttgccctttagactacagttcccagcatgcccaggcgattgcgtcccagaaccgacgtcccaccgccttcccacatcggatcgcagggctcccaaaatggcgagtgaggctgcggggactcgctgagcagcggagggggagcgtgcagagccgctgcggccctcacagtccggagcccggccgtgccgtgccgtagggaacatgcacttttccattcccgaaaccgagtcccgcagcggggacagcggcggctccgcctacgtggcctataacattcacgtgaatggagtcctgcactgtcgggtgcgctacagccagctcctggggctgcacgagcagcttcggaaggagtatggggccaatgtgcttcctgcattccccccaaagaagcttttctctctgactcctgctgaggtagaacagaggagagagcagttagagaagtacatgcaagctgttcggcaagacccattgcttgggagcagcgagactttcaacagtttcctgcgtcgggcacaacaggagacacagcaggtccccacagaggaagtgtccttggaagtgctgctcagcaacgggcagaaagttctggtcaacgtgctaacttcagatcagactgaggatgtcctggaggctgtagctgcaaagctggatcttccagatgacttgattggatactttagtctattcttagttcgagaaaaagaggatggagccttttcttttgtacggaagttgcaagagtttgagctgccttatgtgtctgtcaccagccttcggagtcaagagtataagattgtgctaaggaagagttattgggactctgcctatgatgacgatgtcatggagaaccgggttggcctgaacctgctttatgctcagacggtatcagatattgagcgtgggtggatcttggtcaccaaggaacagcaccggcaactcaaatctctgcaagagaaagtctccaagaaggagttcctgagactggcccagacgctgcggcactatggctacttgcgctttgatgcctgtgtggctgacttcccagaaaaggactgtcctgtggtggtgagcgcgggcaacagtgagctcagcctgcagctccgcctgcctggccagcaactccgagaaggctccttccgggtcacccgcatgcgatgctggcgggtcacctcctctgtaccattgcccagtggaagcacgagcagcccaggccggggccggggtgaggtgcgcctggaactggcttttgaatacctcatgagcaaggaccggctacagtgggtcaccatcactagcccccaggctatcatgatgagcatctgcttgcagtccatggttgatgaactgatggtgaagaaatctggcggcagtatcaggaagatgctgcgccggcgggtggggggtactctgagacgctcagacagccagcaagcagtgaagtccccaccactgcttgagtcacctgatgccacccgggagtctatggtcaaactctcaagtaagctgagtgccgtgagcttgcggggaattggcagtcccagcacagatgccagtgccagtgatgtccacggcaatttcgccttcgagggcattggagatgaggatctgtaatctccactgcttggatgtctgccctctaccccagaggaatttacagaaacttgccctgtgcctgtgtcccccatgctaggggcggaggggtcttttccttcttctttcctacctaccccttttctcttggccaggggcctcgtatcctacctttccttgtcccctgggctggctgcacagaggattgccccttctcttttcagagctggccctcgatgccaaattagcatttagtattttgcacaaagtctaagggaccatggctgcctgccttggggaggaaccatatctccctctgggccgcttctggcctcttggagccatgggccaaaggccaaggggatgggcagaggtctgtgtttggtctggcccagttccccatcattaaactcagcctgactgctgcct

SEQ ID NO: 3804 - DNA, 2993 bp, Homo Sapiens
  NM_014750
agcaaaccaatcgcaagcctcgttgagtggaaggggtgggatcttccccggaagtgttggttaaagcccctccaatcagcggctcggtgcggcaagtttgaatttcgtggaggctcgggttgtgagggttcctgcttcggagtcggcggtggtcgtccagaccgagtgttctttactttttgtttggttgaggtttcacgctagaaggtggctcaggatgtcttcatcacattttgccagtcgacacaggaaggatataagtactgaaatgattagaactaaaattgctcataggaaatcactgtctcagaaagaaaatagacataaggaatacgaacgaaatagacactttggtttgaaagatgtaaacattccaaccttggaaggtagaattcttgttgaattagatgagacatctcaagggcttgttccagaaaagaccaatgttaagccaagggcaatgaaaactattctaggtgatcaacgaaaacagatgctccaaaaatacaaagaagaaaagcaacttcaaaaattgaaagagcagagagagaaagctaaacgaggaatatttaaagtgggtcgttatagacctgatatgccttgttttcttttatcaaaccagaatgctgtgaaagctgagccaaaaaaggctattccatcttctgtacggattacaaggtcaaaggccaaagaccaaatggagcagactaagattgataacgagagtgatgttcgagcaatccgacctggtccaagacaaacttctgaaaagaaagtgtcagacaaagagaaaaaagttgtgcagcctgtaatgcccacgtcgttgagaatgactcgatcagctactcaagcagcaaagcaggttcccagaacagtctcatctaccacagcaagaaagccagtcacaagagctgctaatgaaaacgaaccagaaggaaaggtgccaagtaaaggaagacctgccaaaaatgtagaaacaaaacccgacaagggtatttcttgtaaagtcgatagtgaagaaaatactttgaattcacaaactaatgcaacaagtggaatgaatccagatggagtcttatcaaaaatggaaaacttacctgagataaatactgcaaaaataaaagggaagaattcctttgcacctaaggattttatgtttcagccactggatggtctgaagacctatcaagtaacacctatgactcccagaagtgccaatgcttttttgacacccagttacacctggactcctttaaaaacagaagttgatgagtctcaagcaacaaaagaaattttggcacaaaaatgtaaaacttactctaccaagacaatacagcaagattcaaataaattgccatgtcctttgggtcctctaactgtttggcatgaagaacatgttttaaataaaaatgaagctactactaaaaatttaaatggccttccaataaaagaagtcccatcacttgaaagaaatgaaggtcgaattgctcagccccaccatggtgtgccatatttcagaaatatcctccagtcagaaactgagaaattaacttcacattgcttcgagtgggacaggaaacttgaattggacattccagatgatgctaaagatcttattcgcacagcagttggtcaaacaagactccttatgaaggaaaggtttaaacagtttgaaggactggttgatgattgtgaatataaacgaggtataaaggagactacctgtacagatctggatggattttgggatatggttagttttcagatagaagatgtaatccacaaattcaacaatctgatcaaacttgaggaatctgggtggcaagtcaataataatatgaatcataatatgaacaaaaatgtctttaggaaaaaagttgtctcaggtatagcaagtaaaccaaaacaggatgatgctggaagaattgcagcgagaaatcgcctagctgccataaaaaatgcaatgagagagagaattaggcaggaagaatgtgctgaaacagcagtttctgtgataccaaaggaagttgataaaatagtgttcgatgctggatttttcagagttgaaagtcctgttaaattattctcaggactttctgtctcttctgaaggcccttctcaaagacttggaacacctaagtctgtcaacaaagctgtatctcagagtagaaatgagatgggcattccacaacaaactacatcaccagaaaatgccggtcctcagaatacgaaaagtgaacatgtgaagaagactttgtttttgagtattcctgaaagcaggagcagcatagaagatgctcagtgtcctggattaccagatttaattgaagaaaatcatgttgtaaataagacagacttgaaggtggattgtttatccagtgagagaatgagtttgcctcttcttgctggtggagtagcagatgatattaatactaacaaaaaagaaggaatttcagatgttgtggaaggaatggaactgaattcttcaattacatcacaggatgttttgatgagtagccctgaaaaaaatacagcttcacaaaatagcatcttagaagaaggggaaactaaaatttctcagtcagaactatttgataataaaagtctcactactgaatgccaccttcttgattcaccaggtctaaactgcagtaatccatttactcagctggagaggagacatcaagaacatgccagacacatttcttttggtggtaacctgattactttttcacctctacaaccaggagaattttgaatttaaaaataaatccaaacattttccttcatattatcaatgcttatatattccttagactattgaaattttggagaaaatgtatttgtgttcacttctatagcatataatgttttaatattctgtgttcatcaaagtgtattttagatatactctttctcaagggaagtggggatattttgtacattttcaacacagaataaaaaatgtactgtgccttgcctctcttgtttaa

SEQ ID NO: 3805 - DNA, 5010 bp, Homo Sapiens
  NM_014751
ccccgggagcccagccagagcgagcgccggggccgggcgcgcaggagtgaaaaggaggcggcggccgcagctgcgagcaacagatccggacgccgcgagctgacccgctctgctgttgggcgatttttttttaattgcagaaaaatttattaaattggaaaatcttgcgtttttcaatggcgctggccccgggtcagcgggcgattttctctgcatcaagatgggctttgccgtttccgtagtgggcaccagtggtggcctgattgtcagtcttctcccggcatttttaaggccaggagccgagcgctgcttgtaggcgaataccctacagagcggtttggctttttaaattactgttattattttgggcagagaacagtcggtctggtgcaccccgtcctcgctgcagaagaggctgcgagtccgaggtgggtctctcggaaggtgaaattccttctggggtgagcgagccccggccccgcgcgcagtccagcggccccgcgtgtgtgccctcgccctgccggagccgggaaaatggaggctgtgattgagaaggaatgcagcgcgctcggaggcctcttccagaccatcatcagcgacatgaaggggagctatccagtttgggaagatttcataaacaaagcaggaaagctgcagtcccagcttcggacaacagtagtagcagcagctgccttcttggacgcctttcagaaagtggctgacatggccaccaacacacgtggtgggaccagggagattggatctgctctcaccaggatgtgcatgaggcacagaagcattgaagccaagctgaggcagttttcgagcgctttaattgattgtctgataaacccacttcaagaacagatggaagaatggaagaaagtggccaaccagctggataaagaccacgcaaaagaatataagaaagcccgccaagagataaaaaagaagtcctcggatacgctgaaactgcagaagaaagcaaaaaaagggagaggtgatatccagcctcagttggacagtgctctccaagatgtcaatgataagtatctcttattggaagaaacagaaaagcaggctgtccggaaggctttgattgaagaacgtggccgattctgtaccttcatctctatgctgcggccagtgattgaagaagaaatctcaatgctaggggaaataacccaccttcagaccatctcggaagatctaaaaagcctgaccatggaccctcacaaactgccctcctcaagtgaacaggtgattctggacttgaaaggttctgattacagctggtcgtatcagacgccaccctcttcccccagcaccaccatgtccagaaagtccagtgtctgcagcagcctgaacagtgtcaacagcagtgactcccggtccagcggctcccactcgcattcccccagctcacattaccgctaccgcagctccaacctggcccagcaggctcctgtgaggctgtccagcgtgtcctcccatgactcaggattcatatcccaggatgccttccagtccaagtcaccatcccccatgccgccagaggcccccaaccagttgtctaacgggttttctcactatagtttatcaagtgagtcccacgtggggcccacgggtgcaggccttttccctcattgcctgcctgcctcccgcctgctccctcgggtcacctctgtccaccttccagactacgctcattattacaccattgggcccggcatgttcccgtcatctcagatccctagctggaaggactgggctaagcctgggccctatgaccagcctctggtgaacaccctgcagcgccgcaaagagaagcgagaaccggaccccaacgggggaggacccactaccgccagcggcccacctgcagcagctgaggaggctcagagaccacggagcatgactgtatcggctgccaccaggcctggtgaggagatggaggcttgtgaggagctggccctggccctgtctcggggcctgcagctggacacccagaggagcagccgggactcgcttcagtgctccagcggctacagcacccagacaaccaccccctgctgctctgaggacaccatcccttcccaagtttcagattatgattatttctctgtaagtggtgaccaggaggcagatcagcaggagttcgacaagtcctccaccattccaagaaacagcgacatcagccagtcctaccgacggatgttccaagccaagcgtccagcctcaactgctggcctccccaccaccctgggacctgctatggtcactccaggggttgcaactatccgacggaccccttccaccaagccttctgtccgccggggaaccattggagctggtcccatccccatcaagacacccgtgatccctgtcaagaccccaaccgtcccagacctcccaggggtgttgccagcccctccagatgggccagaagagcggggggagcacagccctgagtcgccatctgtgggtgagggcccccaaggtgtcaccagcatgccctcctcaatgtggagcggccaagcttccgttaaccctccacttccaggcccgaagcccagtatccctgaggagcacagacaggcaattccagaaagtgaagctgaagaccaggaacgggaacccccaagtgccactgtctccccaggccagattccagagagtgaccctgcagacctgagcccaagggatactccacaaggagaagacatgctgaacgccatccgaaggggcgtgaaactgaagaagaccacgacaaacgatcgctcagcccctcgcttttcttaggttcacaagaaatgcgccggtggggaatgaactgtttcattaataaaacctaatttgtcttgatccattccactctataataaaacaaaagattttgtaggcaactcggaatatagctcttttgaaagtactcgacacctttagataagaattaaaaccaacctatgtaactgacataatcttgatcttttaatttgtaaatattgacaattttctttctgcacattttaatcttagtttcccttttgatttttctgaaggtgccaaattccatttaacttttttacaagtctttgtaaaattttaaatgcataaagggggttggggcaggggaaccacgaagtagttaattttagaaaaggatttactatacttcactcttctttttttttccccacaagcttttgtagatgcattgtagtagtctagcttagaagcaaatgcaagttattttaatgtacaaactaaatgggtaagaggtaaaatcttcatttaaatatactatgttctggatgaaaagagcaggagtaacaattgatgagcaatattcagagtgaagtaaatctggaaatggtagactgtgttgggattggggggagggccatgggaggggtacatcgtcaacatagccgatcctgttacatttaagagtagcctcgtaggttgaatttcttctggtagcttcatggtaaatgcatccgaataagccatactggattgcagtgtttgtttctgtagggtgtttaaggacttgacttcctttctcccatgattcctctggactgcacacagcacccacaaccagccccatgcatgctgctgcctctgggcagtcgtagaatctcccacttcagtttctcgttgattgtactcacctttatggaatccaaatacatccaaaagggtaaggcagttttaaaaatgtgaaaacatttaaaaatgataatagcagggaattcttagattatagtaaatgccttttacttaactgtgcccagcaggctgggtgcgttaaaaagcccaagtattttgaaaaaactcgaacagatttgacaagggtagccagcttggagtctagcaacttgccaatgtgtttaccaatctgggggcttgtttttcttttcttctttcaaataaatggcagttaactggctttacagtaaacattgaagagaggaggatttgtttattgtcactgggaatctgaccactatactgtcctttttttgtattctgggtaaatgttttttggaaaagatttgtcttttctaagtggaagttaaatttgttatactgcccatcccctaaagccaacagagatttgtagatttaaagggatcacatttgaagacaatagtgtttaagaaagcaagcaagtcccttagcagtcaggtcataacagggcacatttctgaccgaaccctctcaaggcagaggaggagtttggtgggtttcatacaccctgcagattcctgttggctctaaccctcaattacctaatcttatgctttaacacataactgcattggatgtgagagtaacgtaccgtatggtcattgttctatatattaacattgaacactgctgcgattgctcaaggacattttatgttacggctttaaagcaaaggcatgattattagaaactatttaagcttttttctttgaaaaacaagctccttttacagaatataaacaacagtagtgcctgtggtttagcccaccaatcttgatgactaaaagtagctgatgcattgtgcatatgatgcttgagatggtttttgcaaaagcagaaatcgctgcaaggtaatcacaatagataaaagtggtattttaaacctttgaaataaatggatgtaactgtaccttggtacagcttttcacttgtttagtttttaaacgttagtataatctgaataaataaaatgttgccaaattcaatgtagaaagaatgtgacaacacaccttgggtagttctgcttgtgtttttgcatattgtaaaagcagtgtcacagctaaaaagaaagaaatcgtttctaacagtaaattattgtgctttagttgctagtttgtactgagagttgacctctccctgtgcagttttttgttctaaacttgtataaataacaattgtgtaatgtgtctccctcctacattgtaacaattgcttcagcctacgttataaataaagaaccactagattaaaaaa

SEQ ID NO: 3806 - DNA, 8048 bp, Homo Sapiens
  NM_014753
agccgccctggccttcggcgagaactcaggcgagcgcggcgcacgctgctccggagtcccaccgcggaagttgaggccgcggattccgagggcggggtggagaggaatctggaaggacctggacccggtggaacgcactgcgcggacggcgcctgcgtccgcactcagctgttcagccctctttcttcaggctctcccctgaaagccgtccccatgccggtctcttttttctgccttcttgtttccctccggcgagtcagcgcgactgtgaatttccgtttccggcggtgtccatgctgacctgaggagtcgcggctgcgagcaggttagagttacttgttattggtaaatagccactatggaggctaaggaccagaagaaacacagaaagaaaaacagtggacccaaagctgcaaagaaaaagaagcggcttctgcaggatctccagctaggagacgaagaagatgcccggaagagaaatcccaaagcttttgcagttcagtctgctgtgcggatggctcgatcctttcacaggactcaggatttgaagacaaaaaagcatcatattccagtggttgatcgaactccactagagcccccaccaatagtggtagtggtgatgggacctccaaaagttggaaagagcactttgatacaatgcctcattcggaactttacccggcagaagttgactgagatcagaggccctgtgacgattgtgtcaggtaaaaagcgcagactcaccattattgaatgtgggtgtgacattaacatgatgattgatctggctaaagtagcagatctggtactgatgcttatagatgccagctttgggtttgaaatggaaacgtttgagtttctaaacatctgtcaagtacatggctttcctaaaattatgggagttctcacccacctcgactccttcaagcataataagcaactgaagaagacaaagaagcgattaaaacacaggttctggacggaagtttacccgggtgccaagctgttctacctttctggaatggtgcatggagaatatcaaaaccaagaaatccacaatctgggccgttttattacagttatgaagtttaggcctctcacatggcaaacttctcacccttatatcctggcagacaggatggaagatttgacaaacccagaggatatccgaacaaacatcaaatgtgaccggaaggtgtcactttatggttatttaagaggagcacacttgaaaaataaaagccaaattcacatgccaggggtaggagattttgccgtgagtgacatcagtttcctcccagacccttgcgctcttcctgaacaacaaaagaagcgctgtttaaatgagaaggagaagctggtttatgcgcctctttctggagttgggggtgtgctgtatgacaaagacgctgtctatgttgaccttggtggcagccacgtttttcaggatgaagtggggcccacccatgagctggtccagagtctcatctctacccactccaccattgatgccaagatggcttcaagtcgagtgacgctgttttctgattccaagccacttgggtcagaggatatagataatcaagggctaatgatgccaaaggaggaaaaacaaatggacttgaacactggtcgaatgcgtcggaaagccattttcggagatgaagatgaatctggagatagtgatgatgaagaagatgatgaaatgtctgaagatgacgggttggaaaacggctctagtgatgaggaagcagaagaggaggaaaatgctgagatgactgatcagtatatggctgttaagggcatcaaacgacggaaacttgagttggaagaagacagtgaaatggatttgccagcatttgctgacagtgacgatgaccttgagaggagctcagcggaagaaggggaagcggaggaagctgatgaaagcagtgaagaagaggactgcactgcaggagagaagggcatttcaggatcaaaggctgctggagaaggtagtaaagcagggctgtcaccagctaattgccagagtgaccgtgtgaatctggagaagtctttgctgatgaagaaagcagctctccccactttcgattctgggcattgcacagctgaagaggtgtttgcatctgaagatgaatctgaagaaagctcctcactcagtgcagaggaagaagactcagaaaatgaagaggctattagaaaaaagctttcaaagccttctcaagtgagcagtggtcagaaactggggccacagaacttcattgatgagaccagtgatatagaaaatttactcaaagaggaagaagattacaaggaagaaaataatgattccaaagaaacgtcaggtgccctcaagtggaaggaagacctttccagaaaggcagctgaggcctttctgaggcagcagcaagcagctccaaacctccgaaagcttatttatgggacagtgacagaagataatgaagaagaagatgatgatactctagaagagcttggagggttgtttcgtgtcaaccagcctgacagagagtgtaagcacaaggctgactctttggactgctccagatttcttgtggaggccccccatgactgggatttagaggaggttatgaacagtatcagagattgcttcgtgactggaaagtgggaagatgataaagatgcagccaaggtcttagcagaagatgaggagctctacggtgactttgaagacttggaaacaggggacgtgcacaagggaaaatcaggccccaatactcagaatgaagatatagagaaagaagttaaggaagaaattgaccccgacgaagaagaaagtgccaagaaaaagcatttggataagaagagaaaattgaaggagatgtttgatgcagaatatgatgaaggagaaagcacatattttgatgatcttaaaggagaaatgcagaaacaagcacagctgaatcgcgcagaatttgaagatcaagatgatgaagccagagttcagtatgagggttttcgacctgggatgtacgtccgcattgagattgaaaatgttccctgtgaatttgtgcagaactttgacccccattaccccattatcctgggtggcttgggcaacagtgagggaaatgttggctacgtgcagatgcgtctgaagaaacatcgctggtataagaaaatcctcaagtcccgagatccaatcatattttctgtagggtggaggaggtttcagaccatcccactgtattatatcgaagaccacaatggaagacaaaggcttctaaagtataccccacagcacatgcattgcggagcagccttttggggccctatcactccacagggaactggtttcttggcaatacagtctgtcagtggcataatgcctgattttcggatagctgctacaggagttgtccttgatctggataaatccataaaaattgtgaagaaattaaagctaactggttttccatataaaattttcaagaacacttcatttattaagggaatgtttaattctgccttggaagtggccaaatttgaaggtgctgtgattcgaacagtcagtgggataagggggcagatcaagaaagcactccgagctccagaaggagctttcagggccagctttgaggataagctgctgatgagcgatattgtcttcatgcgaacttggtatcctgtttccatcccagcgttctataacccagtaacatctttgttgaaaccagtgggtgagaaagacacctggtcaggaatgcggaccacgggccaactcaggctcgcccatggcgtcagactaaaggcgaacaaggactctctgtataagccaatcctgaggcaaaagaaacattttaattcactgcacattccaaaagccttgcagaaggccctgccatttaagaacaagcccaagacccaagcaaaggcaggcaaggtgccaaaggacaggcggagaccggccgtcatacgcgagcctcatgaaagaaagatccttgcactgctggatgctctgagtacggtgcatagtcagaagatgaagaaggccaaggagcagcggcacctgcacaataaagagcacttcagagccaagcagaaggaggaggaggagaagctgaagcggcagaaggacctcaggaagaagctcttcagaattcaggggcagaaggaaagaagaaaccagaagtccagtttgaagggggctgagggccaattgcagtgagcctttggactggagggactgtccctggatctgcggaggtagacagtttcaaacatcacagtttgaatgcctgtgaatgacaagtcagtgggaaagagctcaagagatgtctctactcaaactgtgcctgcaggaggaggaacagagaagcctgggctgctgggactgggttcattctcatgacttggggctgtcgagatttaaagtgatgtaagctgtggttatgtggattctcttactttcctctgcctgcctcagtttaattattttgtcctacagaaatatcattaaaatatttttttgttacttttggcttagtagttttcattagggatgaatgcctgacaattctttgtggataattatttatactaccaccttcatgaggagtcttccagaagagaaagaaatattcacttgaactctgagctcccatggaagattttagagaatagtgtgtagtgtttttgttttgttttttgtttgagtgacacacaaacctagatggtacagcctactgtgcacccaggatctatgggctcctttgatcactggcccttgtggacattttctatcttatttcatatgttctgcacattagtatagtgacaaggtaacagtaagtacttttttaaagctttagacttaggagattattgtctcaggtgcagagaccaaggaaatcgtatgtatcagtgagataggcttcccgtattatgctcatgcgttatacctgcctagctacattgcctttttttaaattaaacattatgttgaagtaatcatactattacataggcgatgtatgtattttatgattgtatgttgatatagttatggggaatctattcctatacgatgtaatcatagattcacatatagttgtatattttgcccaatttctctcagtggtaatgtttcacacatataacaatcaggatgttgacatcaatacagcccgctgattttattcacatttccccagctttactttccccaacgtatactcctccatgtatgcatgggtgtgtagaaatatggaacgcagctgggcacagtgactcacgcctgtaatcccagcactttgggatgctaaggcaggaggatcacttgagcccaggaatttgagaccaacttgggcaacatggcaaaacctcatcgctacaaaaaataaaaaattcgccaggtgtggtgggtgcacacctgtagttccagctgcttgggaggctgaggtaggaggatcacttgagcttgggaggttgaggctgcagtgagccatgatagcaccactgcactccagcctgggcgacagggcaagaccctgtttcaaaaaaaaaaaattatacatatatgtatgtagaacacttcatgaatttgtgtgtcatctgtgcatggggcccatgctgacctctgtgttgtgccagttatagtatgtgtgctgctgatatgagtgccacattgcctttacaacatcataggggccaaagagggttggcaggattatgagcagttggcctagtctgagaggctctctaaaagcctaaagtctgtaggcaggtgctcagctttgtatctccataagaagggaagaggatgtgaggatcctgtcagggctaggtccacctgggaagtgacaattggaacactcccagacctctctgggcaactctgggtgtacattttcctctgttcctcaagagctattatgaatttcatcatccattatgctgataggcctggggactgacacatagtaagcccataacaattataatttaaaactaatttgttatatagcataattgatatattttaaaatgcaaaactataattcaactaaaatatacaaggcactcaagtcataccatgttttaagtagcttacaaggtgatcagcaagtgtcttatacaacaagcaaatttgttcaaagagaagcattgcaaataagtatttataattgtatagttttatattttagccagaagagtggaatcctttagcaatgggggaaataaaagaatgtttaattacagttgcagataattgccttttccaaagacaatgtatgtaggcagaactcatacctgttaatattaaaaatcttggtttatcatatttggagaacaagggaaataaaaagtttgcatattaagattatttaaactaaagttaaggaatctctaatgtctgaaagaaacaataaatagcatttttcatgtagaatttttattggtgaaggttccacctggccaggttagtaaaatacagtcacacatcagttaaggatggggatatattctgagaaatgtatcattaggcaattttgtcattgtgtaaacatcatagagtgacacacaaacctagatggtacagcctactgtgcacctgggctctatggtatggcctgttgctcctaggctacaaacctgggcagcatgtgactgtactgactactgtaggcagttgtaacacagtggtaaacatttgtgtatcgaaacatagaaaaggcgtagcaaaaatacagtattgtggaaccactgccatatacgtggtccatccttgactgaacatcatgcggcatgtggctgtatgtatacacatagtttttgctgtgagtttgcatccatctcataggaagacatatatcaaaataaggaccagactggagagtgtgtaaattacttttcaatactaatggcttattaatttgatattgtcagcaagtatgttgcaaaaacaaattccaccagaatgtgagttccatgagagcaggaactgggttgttcaccttgttggcacttggagtagagccactgagcttcgtgctgcataaaattgcttggaagaaagaagggagggcattccaggtaactgaagcattgctatgcaaagtaagcatttgccctctgaaatattttaacaatgtttatagaaacctttctcaattgtattaaactttgtaaattgtaaaaattattctgttataccttttctatttactaggcacaggcagccataggtgctaggtatgttttgaaaacatattgaacctacagtgtacatatcattccatgccattaaatattcttatttaatcatagatgtgttcaggtgtgtttggtttcctatttgtggatgtactagattgttttctttttttaacaaaacctgtgaacttgctttaagtattatcatttggtgacatgcccgccatttcagaaataaatgtttgagcaaagaggaaagccaccgggtctgattcagctctctggaggctccagagcttacctcgctgatgggaaaaagagcatcgatttaattgcccttggtaccgacttctagtatctagtattttgccagactcaggtatttcttaaagccattattcagagtcttcagcaaggacattgtattttacttgtgtctccttagttttacctagtttatttcatggttttaaagtattgtacatttttataatcctttaacaagacaaaaggttgagatgttggacatttaaatgccaaaggtgttttattatgagacttagcatttcatatttggggatggtaccttatcgaaaatcagataaactttggttggatgggtatttggaggaatcttttaagtcttttcttaagcaaagtttggacactctaaaataaggttgccaactggcatgtagagagaaaaggatgtgtcatacatttagaccaggtggcctgtcctgtaaatttttttgaggggaggggtgggcttgtttttttctgtgtttcggttttttccaatttttgttttgtgataaaatatgcataataaaacttattttatcaatttttaa

SEQ ID NO: 3807 - DNA, 2504 bp, Homo Sapiens
  NM_014754
ctttgccgtccggctattagcctactgtggctagtcacccccggggtcccggccttctcgggctggggccgccgccaccgcggcaggacggggaggcgggccatggcgtcctgcgtggggagccggaccctaagcaaggatgatgtgaactacaaaatgcatttccggatgatcaacgagcagcaagtggaggacatcaccattgacttcttctaccggccgcataccatcaccctgctcagcttcaccatcgtcagcctcatgtacttcgcctttaccagggatgactctgttccagaagacaacatctggagaggcatcctctctgttattttcttctttcttatcatcagtgtgttagctttccccaatggtccgttcactcgacctcatccagccttatggcgaatggtttttggactcagtgtgctctacttcctgttcctggtattcctactcttcctgaatttcgagcaggttaaatctctaatgtattggctagatccaaatcttcgatacgccacaagggaagcagatgtcatggagtatgctgtgaactgccatgtgatcacctgggagaggattatcagccactttgatatttttgcatttggacatttctggggctgggccatgaaggccttgctgatccgtagttacggtctctgctggacaatcagtattacctgggagctgactgagctcttcttcatgcatctcctccccaattttgccgagtgctggtgggatcaagtcattctggacatcctgttgtgcaatggcggtggcatttggctgggcatggtcgtttgccggtttttagagatgaggacttaccactgggcaagcttcaaggacattcataccaccaccgggaagatcaagagagctgttctgcagttcactcctgctagctggacctatgttcgatggtttgaccccaaatcttcttttcagagagtagctggagtgtaccttttcatgatcatctggcagctgactgagttgaataccttcttcttgaagcatatctttgtgttccaagccagtcatccattaagttggggtagaattctctttattggtggcatcacagctcccacagtgagacagtactacgcttacctcaccgacacacagtgcaagcgcgtaggaacacaatgctgggtgtttggggtcattggtttcctggaggccattgtttgcataaaatttggacaagatctcttctctaagacccaaatactctatgttgtgctttggcttctttgcgtggctttcaccactttcctctgtctgtacggcatgatttggtatgcagaacactatggtcaccgagaaaagacctactcggagtgtgaagatggcacctacagtccagagatctcctggcatcacaggaaagggacaaaaggttctgaagacagcccacccaagcatgcaggcaacaacgaaagccattcttccaggagaaggaatcggcattccaagtcaaaagtcaccaatggcgttggaaagaaatgaaaaaccctggttaatcaaagatgttccagagtgcctagaactgagagggaaatggaactcatttggaactccccgtgaggaggtcgaggcgcacagggcaagcaggaagaggcgagggcacttgggggtcattatttgagatcgtaagtcttgtttcccacagacctggccgcgtcaggcagatcatcgcctggggggcctttgccaacgtggggtctcttctaacttcagcacttgacatgcggtcaccggtggcagcgcggtgtgttgaagggaaacggtagctattcattcacagttgccaagagcagctccgcgcctgctggatcgtggatgcagcgtaaacatcttccttcagacgaggcattaaccccatggttaatggactggtcaccagtttttattttatttttatgaatctacctttccattgattgatttaagttcaggccacttttctgtcttttatttggttactgttgttatttgtttttaagttaggatgctttttaacagcctttagaagccgctgctgaaattgatactgggggaagggttccccttccttctagagcagaaaagggagagaagtgttgtattcctgtttggtaacctcagtctcctgtaagacctcctaccacatggcgagtatacaccaatcaggagagggtagctgcctgcataggagcctcgcttccgattattcccttcccaatattattcatccagacttagccacagtgcacaaaagcaaacctgctagagaggcagtgaacaccacagcttctccccagcttggtgccttttacatcgggtttgttctccttccatggtgtgttgctgacattgtcactgagtcccatgtgaggtgctggtgagtattacctttcatctgtgccatgctctagaaccttgaccttgatagttcaccacgtctgatggatccctgttttaaataaaaacgattcactttaaagcct

SEQ ID NO: 3808 - DNA, 4909 bp, Homo Sapiens
  NM_014760
ccggagggcgggcgccacggaggccggagtggtcgcagttcgggcggaggccgggccaggcggggctgtagggctggggcaggcggcgggctgcccggcgggacagctgcggcagccggcggggggcgtcctgagttggcggtcgagggcgctgccagctcccgaggggccgctcgggccccttccggcccgggtctggttgggccgcaggagcagggcgggctgcggcgcccgggtctggccctggcctacgggctaagcgcccggccccggggccgcggatccggcagccatgtgtggatcttgaagcgccatgtggtcttctgaagcgcttgacagttctaaagggctttatattgcaaactgatcaaagcgcttcgtagccccggaagcgcttaggcatctccgaagtagcgctgggcaaagtgaaggcttcctgatctcagaagcacgttgtgggcttggaaaccgacggcagcctttagtcaattttggatcgctttgacttctccaacacggtttggcatctctgaaaccttgagaactgtgatgggcagtggaaagaagagggaaaggtgcccatggcgtccgagcggggcaaggtcaagcacaactggagcagcacgtcggaagggtgtccccgcaagcgcagctgcctccgggagccctgtgatgtggccccctccagccggccagctcagaggtctgcgtcgcgttctggagggcccagcagccccaagcgcctgaaagcccagaaggaggacgatgtggcttgctcgcggaggttatcctggggctcatcccgccgcagaaataactcctcctcctccttctccccacatttcttgggccctggtgtgggcggggccgcctccaaaggctgcctgattcggaacactcgggggttcctgtcttcagggggatcccctctgcgtcctgccaacgcctctttggaagaaatggcttctctagaggaggaagcctgcagccttaaggttgattccaaagatagttctcataactccacaaactctgaatttgcagctgaagctgagggtcagaatgatacaattgaggaacccaacaaggtccagaaaaggaagagggatagacttcgagaccagggctccacaatgatctacctgaaggctatccagggcatcctggggaaatcgatgccaaaaaggaagggagaggctgccactcgggcaaaaccaagcgcagcagagcatcccagccatggagaaggaccagccaggagtgaaggaccagccaagactgcagaaggagcagccaggagtgtcacagtcactgctgctcagaaggagaaagacgcaaccccagaggtcagcatggaggaggataagacagtgccagagaggagcagcttctatgacaggagagtagttatagaccctcaagagaaacccagtgaggagccccttggggaccgaaggactgtcattgacaaatgctctccacccctagagttcttggatgactctgactctcatttagaaatccaaaagcataaagatagggaggtggtgatggagcacccctcttctggaagtgactggtctgatgttgaggagatctccacagtcagattctctcaggaggaacctgtctccctgaaaccttcagccgttccggagccttcttccttcaccaccgactatgtcatgtaccctcctcatttgtacagtagtccttggtgtgactacgccagctattggaccagcagccccaagccttctagctacccctccacaggcagcagcagcaacgatgcagcccaggttgggaagagcagccggagccgcatgagtgattattcccccaactctacagggagtgtccaaaacacctccagagacatggaggcctcagaggaaggctggtcccagaattctcgttcatttcgcttctccagaagctcagaagaaagagaggtgaaggagaaaagaacattccaagaggagatgcctccgcgtccttgtggaggacacgcatccagctccctgccaaagagccacctggagccaagcctagaggagggcttcattgacactcattgtcacctggacatgctctattccaagctatctttccaagggacctttacaaagttcagaaaaatttacagcagctccttccctaaggaatttcagggctgcatctctgacttctgtgatccccgcaccctgacagattgcctatgggaggagctgttgaaagaggatctggtctggggggcctttggctgtcaccctcattttgcacgttactacagtgagagtcaagaaagaaatcttttgcaagccttaaggcaccctaaggctgtggcatttggagaaatgggcttggattactcttacaagtgcaccacgcctgtcccagaacagcacaaggtatttgagagacagctgcagctggctgtgtctctaaagaagcccttggtgatccactgccgagaagctgatgaagatctgctagaaatcatgaaaaagtttgtgccccctgactacaagatccataggcattgcttcaccggcagctacccggtcattgagcccctgctgaagtactttcccaacatgtctgtgggcttcacggcagtgctgacatactcctctgcctgggaggcccgggaagccttgaggcagatcccactggagagaatcatcgtggaaacggatgctccctatttcctccctcgccaggttcccaaaagcctttgccagtatgcccacccgggcctggccttgcatacggtccgagagattgccagagtcaaagatcagccactctccctcaccttggctgccttgcgtgagaacaccagtcgcctctacagtctttaagcagagaaggtacagtcctcgggagtctcctagaaaagggcgaccagcagcctgacagaacacaggctggcttgaagtctgtgtctcaggtcgaggatgtgtttagagagctgattggaacacagaaaaccaggacaggatgttttcctccaagcgggtcataaggcttcagcttctgggtggtgggtggggtggggtgggcatggaatgaggggtatggggactgcctgtaatagcactgggattttgcctcccagccaaaatgctccagggtaggcagcaaagaagaaagagtgcgatatgagggtacagtgagtttggcagtccaaattctgttctctgcagcctgtttttgagtagttggtgaataaagtcacccgcctacttgtctaagcacatgtgggtgtgtaactcagttcctggttctcggttctaaaaacagacttccaactgggaaactttttgggggaaattaactggacacctatctcggaggtttattttcttgcaaccagtgaagtcgtcctcctcccttccctggataactcttcagtttgactgtcactgttctggtgtcaactccagcgtcggcacaggcagaaggacttcagctgctggtctcattggttccactgccattgatatgggggggtgcagaggagcactcattgtccatgatggagatccaggacagactgggggactccgggaagaggctttcttggggaagaggaccccaaaggaggtacttcctcctcactgatgccctcagggctgctgtgtgggtgtgttaagctgataaggttcagtttgcggcggaaactacctgctagtcttgtgtcaggggctgccagcctccttttgtttcacttttgcccccttcttgggaacatttgaccaaaaataatcctcatttcatcttgtgtacagtcctttgtgtaccccgcccaggttgagaggtgaatcagcgtaattctccgaagctctgctgggcagctcagccatgttacattgtctatgcagaataagcaggcctggtgtctgcaaatgtaccagtccttctcccgcatctcctgggtgcccccttggctttgcctctcctgtgtcctgtctttctgcgttttagaagtgagagcctctccttcaccttttgagcaactgagtcatctcaagtcctgagctctgctctgccgcctgctggtgccttgtaaaggtatactcgttacaggccctagaggttctaatggtccagggttaagtgagaggagactgtactttgtttcaaaggatccttcaccctgatctgcagtgaggtggatagatcacctggagtccctcgtctgtggtcttggaggcttaaattgtaaaatacatcccttatggaatcctaaattcctctaggtgtttttggaaggcgcatttgagccttgtgagctaaaatggaatggatttaatatttcctatctggcatttccatcttgcccctggtacacaagtcactggcctggaactcagccttgattcactgtccgtcttcacggattagctgtgctgttatgttgtctgtgctgcagattggcccatgtgggaagtcgggggggacctgatttcctgcttggaagacttgggggactgccgagcatatcaaagtgtttatagtcaccaagtgaactgcagcacaaccatctcctctccagcaagccctgaagtcagtagtgcctgcaggtgaaaccaaccagccctgtgttagaggaggaaaagcggagatgacatggaagtctccaagcctgtgccatccacctgccaaggaaaagcacaaggtgctatctacttttctctctaggatttagattatcatttatgtgctgttgcacagtgaaacctcacctgtgtgggcgtgaaagctgattggcattgtttttgattcagctttttggatggctaattgttttcactgtgctgtgggaatgcctctgtattttttcccctctttggccatctttttctgaaaataaagtgatggatcctctagccaacccaaa

SEQ ID NO: 3809 - DNA, 3407 bp, Homo Sapiens
  NM_014765
actgcgcaggcgcaggagccgcgctctgggcctctgctcaggctctgccgcggacgacctcgaggcccttagttgactgggaccggaagtggcgtgtgctcggcctttctgtgttcctggcccgcggccgtcgggtgtgagctgcgccgaccgctctgagggttcgtggcccaccgctccttcgcggtccctgccgccaccgtccacgctcagcgttgtagagaagatggtgggtcggaacagcgccatcgccgccggtgtatgcggggcccttttcattgggtactgcatctacttcgaccgcaaaagacgaagtgaccccaacttcaagaacaggcttcgagaacgaagaaagaaacagaagcttgccaaggagagagctgggctttccaagttacctgaccttaaagatgctgaagctgttcagaagttcttccttgaagaaatacagcttggtgaagagttactagctcaaggtgaatatgagaagggcgtagaccatctgacaaatgcaattgctgtgtgtggacagccacagcagttactgcaggtcttacagcaaactcttccaccaccagtgttccagatgcttctgactaagctcccaacaattagtcagagaattgtaagtgctcagagcttggctgaagatgatgtggaatgagaaacaaatgtcaacataataaaatctcagttaaaaatattttaaaaattcttggtagttgagcagctctgggggaataagggcaaatatgcttgttatgaactacactgaaatctaccaaagttaatgtttactttgtgtagatccatttgtctattttatttatttttcccagtgaaaagtgtattttgatagagaacttttcattctataaatacactatgagttactaaaatatcatggattttgtttattcctgaaacatagttacatagttaaactgtacatatgacatggcttatgttaaaaatacccagtgctcagttttgaaagataggcaaaaaaaaaaaagtataggagaaactgaagaatgtacacttttttagagggcacattttgctgtaaatctggaaatttgatagacttgactgtgtttgtgaaaactgagcattaaaggttttgattgatcctttctttccatttaatctctgagacgtaaatatgtgaggtgtgctgctgtgctgggttaacagcttccttccctttctgtgtagcagtcttgaaatgttctgtttaaatcagtaggcttaatgtgttctgggtatttatctccttgtattttaaatatatgtagttgcaaatagcaccaggaattagatttctgtacacccctaatctagccttgtgagcttcgctagttaatgtgtgctcactttccctccatttgttacgtgagagaatgcgtctgctgatcactgaagtgtcccttttagcttctgattcattgggttctgttgggcatctttaaatccaccttaacctgaggaatgtatgtgggcaaccaggccctgcatttttttatattctgaattttgcatgcttgcctgacttagtatttctgaattgatgttttttttaatggtataactatcttgattttcactgaaattatatggttctgtcactactctgtaaattaatccgaaacttttaaggtaactgggatgatctgcttgtaaaaatgcttgttgccttttgctttatcttcagtgtacctccttaatcctgcttcaacttgattatcttgtgaaacgatgagagtaagttgcaaccttgtgactgaaaacttgaaaagagtggagcaggtgggacctcttattctcaaatagtgacatattctccgtagtcacagtttcagaactgagtaaggatccttggtacttggtggcatctgttgaactgaggagcatttctcattgtaaagattgcctttgttctgtctaaaagtctggagaaatcccaaagacttttcctatgtactaggcattttattttgattgacttacaaactcttcttaatcattatcaatctcggtttttttgtggtgcagtggaaggagaaataggtctagtttctgcctctgattagccgcacagccttgaacaaatcacatttcatctttgaacttacctctactgttagactaggcgactcacatttgaggacttttctcgggtatcttgagggtttgtgatcctgaacccttaaacagtgcttttttgttacacaggagggcttttttggggggatgaccagtacagacatgccagttagttttactagtgggatcccaaatccaaagcagtgtagtggtgattggtcagtgactaaccaggcagctaagaagtcttaggcagcagcccagacatgtatagaggggcagttagagggagaacaggggtgggaaagggagcaaggggcagatagctcagcaaggaaagaatgggctcagaaaaaggagggctggctggaggagtgaggggcagcttaagtttggggagggtagaaacgccgtttccttgggaactggagtgcagtatgagctgggtgtcacttggctctgaacatactggctttgctgtaatgcttgaaaaggcgttggtatcttcattttacagttcattaacccaagtacgttttcttatttaaatgacaactttggtgctttaaaatgaggtaccactttttaaagctagctgtgtcgagttaaagaaaaaatcagcagttttttctcccagaaatgtaattgccaaacactattcatccccatcttaagttttacaaggtgatgtaatcagcttgttgtagtgatgctggccaaatggtgctcagcaggtgagaacaaaaaaaccccagatctcagtgaactaatacacagcttgagcgtttccatgtgctaatgttgcacacttactaaaaaactttggaaatggaaaataatgtattagtgcaacagttgatgtgcttctttgggcaaagatatagttttgttccacaatttgtacttaaaagcgaaagaacattgaaaacatagacttactggctgtagcaatgctggcctgttaactgataactagaacttaggttcacgtttatgtaaagtgtgtaaaacctagtagagcttgcatagtcggcactcagtaaatgtttggttccttttgccccttggtaagtttattttaccatcctcccacctgccattctgactttattaaatcaacatgtggaccagagtgttaatgagatgttattgcagaagagattgagaaaattggtatatcatgcagataacatacaaaatctttttgtaacgtaaaaaatgcagttttattattgcttgtgcctcaactgtttaagtgaatattaaagggcttggagaaaaaaaaaaaaaaaaaaaaaaaa

SEQ ID NO: 3810 - DNA, 5278 bp, Homo Sapiens
  NM_014766
agcgccgggagtctgggtagggggaagcgcccggcggccgcctccgccactgcagctgcagcccccgaggtcgccgcagtaatccggacccggcagcacccgcaccctcggcggccgcagcctcagcaccgcagagcggagagcggagcccggagcccgccgccccaggatggctgcagctcctccaagttactgttttgttgccttccctccacgtgctaaggatggtctggtggtatttgggaaaaattcagcccggcccagagatgaagtgcaagaggttgtgtatttctcggctgctgatcacgaaccggagagcaaggttgagtgcacttacatttcaatcgaccaagttccaaggacctatgccataatgataagcagacccgcctggctctggggagcagaaatgggagccaatgaacatggagtgtgcatagccaatgaagccatcaacaccagagagccagctgccgagatagaagccttgctggggatggatctggtcaggcttggtttagaaagaggggaaacagctaaagaagccttagatgtcattgtctccttgttggaagaacatggacaaggtgggaattactttgaagatgcaaactcctgccacagcttccaaagtgcatatctgattgtggatcgtgatgaagcctgggtgctcgagaccatagggaagtactgggctgccgagaaagtcacagagggagtgaggtgcatttgcagtcagctttcgctcaccactaagatggatgcagagcatccggaactcaggagttacgctcagagccaaggttggtggacgggagagggcgagttcaatttttccgaagtcttttctccagttgaggatcatctagactgcggtgctggcaaagacagcttagaaaaacaagaagaaagcatcacagtgcagactatgatgaacaccttacgggacaaagccagcggagtgtgcatagactctgagtttttcctcaccacagccagtggagtgtctgtcctgccgcagaatagaagctctccgtgcattcactacttcactggaacccctgatccttccaggtccatattcaagcctttcatctttgttgatgacgtaaaacttgtccccaaaacacagtctccctgttttggggatgacgaccctgccaaaaaggagcctcggttccaggagaaaccagaccgccggcatgagctgtacaaagcccacgagtgggcacgtgccatcatcgaaagtgaccaggagcaaggtcgcaagctgaggagcaccatgctggagctggagaagcaaggcctggaagccatggaagaaatcctgaccagctccgagccactggaccctgcggaagtgggggaccttttctatgactgtgttgacacggagattaagttctttaagtgaagtaagcgttccctttccccttcttatttaagacttcccaccttactaaattaccagcaaaacaaaccactctcctgtttgagtaaaatgagaaagttaatatgtggcctccttttctgaagccagatcaaactgttaccttgtgttccaccttgaatctcacagcgtccccttctgcaatgtaggtctccttcctgtgcagtgtaacatgtatcccgttgcctgttgttcggttgtgtgactaattgtggattttaagctgctattattgtatttcagtggcaatggacacattagccttttacaagaggactagagttcatcaagccttgaaaggcaggcttcacagtgccgagttggcgggaaaagcaaattcttttgaagtcttagtctttccctcagtagcggtttctttcaggttaacaagaggcatttgtgcacacacacagggctcttgtgtgtgttgtcaaggggaccctccgtggcctcccgtgagtgcatgcctgtagtgcacagtgtctctacaggtgtcttctggggggcagaaccaattggaaggaagaaagggacccctctccagtcctggctccttcctacatcctgggctcctgaagaagctgtcttcccattttccatgcgctgtgcttatgtgtggtggactgcagagctgcttccacttacaggagagctgataatttgttagctggaacctattcacttccgagattcagacatagccatgctggtggccttctgaatcactgcatggatgtcccaggaggcagctctccccacacagcagcacagccatcacaggattccttgtgtagaaatgattcccagtctagttaccaacagctagtctaggagtaattgaatggccctatggcacagttccacccacagagtagtgaatctctcagccaaggagggaaagaaaaggaagaactcttgactatttagattctagttaaatatctggaatcctagcagtcactacattatctcagcagagagactttaattaaactgatttgtttccaatgtcgggttcacttaaaggatttgacttaccaccagagcatagaaaagcatgcaaggaagaccagatgggcttagcattgggaagacagagggcaaggaggtgatagatggatatagaagcatttctctgcaggataccagttcaggccccaccattcctgccaaggccattacatcccacaaacccaaatacaaagcagctgacttccctggatcttccccccactcctcacacctcacatgtcccaggagctgccttcattcaggcgggtagctgcactgggcatggggtggtggtgggagcttaccgccacctattcaagctctcagctactcctgaaacgggcagagatgatgaacagaagtgtatgtaaatacagcagctagtgggagagcaccagttgggcctaatcctgcctcatcattcttggcaggaatctgcaaatggaaacattgtgagtatcagcaatctgggaagtgacagggttaataactccttcccagaagctgtatcatgagattttgaggggaccgagccctgttacatggatgtgaacagtgaggatcagaggttttatcagaacacattctttttttctaccaactctccagagcgtgagtataggagtgccatgagctttttagtcagcagttttgtaaactctgtatataaaatcattaaccacacattgtgggtgatgggaagacgatttcagctgacagagttaatggcaaccaataatggtggcctgtagctgctaagagcttcacgcaggtttggcctgggctttcactgttggtgaatttagagtgtccttttaggtggggcggctattctaaaagtgtctttctatcactgttaagggggggggaaagtgaggttcgaggatgacgtaggtaactctcccctcccaagtccatgttccaagtggctatgtaaagcaagatgatacagaaagctgctctaaaatctcactgagtgatttcaccttcgcctactatgaaatgtctcatcagacctgacatgtctgagataaccaaggtgattcaggatttgatcaaaagaagtctagtaagaattaattacacagaagcctcctttcatttctatgggccaaacaaaggccatggataaccctacccgctttatgtcattacccattgggaaacacaatggctacttctgttagggtacattgaccttggtcaagcatcttaaagaaggcaaccctaattgagagctgtcttggctaatactctgcaccacaattgtgatgtcctagtcctaccactagagggcatggtacagcctggcaaaagttaaaaggggtgtggcagctcccatcaggtctggaggtggtctataagcacagttgacagttgtgcattgggatgggtggagaaagacgacaagagagcagagaatctgctgatgtggctgcgcttacttttagtgactttatgtacttatattaacagctggaaataggttgttgggttttgagcaggctgttatagtgaggaatgttcatttttaaatgttcctaacagattttgcttttgaaaaatgcttgttacatgaataatttgtggaccagggattgcttttctgaaggcagtatagggaacatgaatattcaagatgaaatacaaaaattatgtttaagggtcatagtgtataagtagcttcctaggaaaccctttgtgtatcttttcagactggggtgggggctgagcatgcttgtgcagaaagaagccatagccagaaaggacagaatctctcccccactcccttgccccataaccaaacataagctagctagtcttgtctaatagatgggatttactataggtgaagatagccctcatattcaaggacagaagctctggcaggagtaaattagcaaagcagaaatagtaccctttcattcttggaggtgctttgaaattttaggtagaatataatcgaaattatggaggttccttagtgctcaataatataagacctggtgttattagaacgagtctttcttataaactaacagagcaggtatatgcctgttagaccttagctgtggggttcctttactattgggtgaatcattaggtataaaaaataatcatcaaccaggcaaattactttgcttcctagctgatgtcatcccacattggtacaggtgttattcagtactgggtggttcagcagggaagccgggtgggaccagtgtgtctgtcatgaaaccactaactgcattcctgactgaagagccatctgtcatttattggggaaggtcttcagttgagctctcagccttaggaaggaagcacgtggaggagggacggaggaggttcccttgctgggcatgcttcgtagagggccaggagcagcaggtcatgtgcacatgccgttgcagcacaagcttatgcttcccgtagccgtggcttttcattctgcacagtcccaggtcccagctcccctcttatggtttctgtcataatgtgctttatctgattgactccaaacatcccgaaatgtcacctgcagatttctcgtgggaaccaatatgtacatgtttgcaattatgctgtgagaatttaaatgtgttagatggaaaatgctattggcagggaataataataaaaaaaaaagaaaatcattctgtttcctgcagtgggaactggccatgtagtcttaacagtcttttgtacaaatatctacaaagcagataatatccctatccagtgcttgcccttggaattgtctctaaatgcatcaagcatacaataaaaaaaactgaaattaacatccaaaaaaaaaaa

SEQ ID NO: 3811 - DNA, 5345 bp, Homo Sapiens
  NM_014767
agttgttatacggcttttgtcttaacgaagccacccattacggtatgatgatgtcaaacgtgatgctgatgctacagttacagcccctgctggcgcagcctctctgattctctctccctctccgcgtccagtgctgggctttttcagacaagtgcatctcctaaccaggtcacatttcagccgcgacccactctccgccagtcaccggaggcagaccgcgggaggagagctgaggacagccgcgtgcgcttcgccagcagcggggtgggaggaaggacattaaaatactgcagaagtcaagacccccccaggtcgaacccagaccacgatgcgcgccccgggctgcgggcggctggtgctgccgctgctgctcctggccgcggcagccctggccgaaggcgacgccaaggggctcaaggagggcgagacccccggcaatttcatggaggacgagcaatggctgtcgtccatctcgcagtacagcggcaagatcaagcactggaaccgcttccgagacgaagtggaggatgactatatcaagagctgggaggacaatcagcaaggagatgaagccctggataccaccaaggacccctgccagaaggtgaagtgcagccgccacaaggtgtgcattgcccagggctaccagcgggccatgtgcatcagtcgcaagaagctggagcacaggatcaagcagccgaccgtgaaactccatggaaacaaagactccatctgcaagccctgccacatggcccagcttgcctctgtctgcggctcagatggccacacttacagctctgtgtgtaagctggagcaacaggcgtgcctgagcagcaagcagctggcggtgcgatgcgagggcccctgcccctgccccacggagcaggctgccacctccaccgccgatggcaaaccagagacttgcaccggtcaggacctggctgacctgggagatcggctgcgggactggttccagctccttcatgagaactccaagcagaatggctcagccagcagtgtagccggcccggccagcgggctggacaagagcctgggggccagctgcaaggactccattggctggatgttctccaagctggacaccagtgctgacctcttcctggaccagacggagctggccgccatcaacctggacaagtacgaggtctgcatccgtcccttcttcaactcctgtgacacctacaaggatggccgggtctctactgctgagtggtgcttctgcttctggagggagaagcccccctgcctggcagagctggagcgcatccagatccaggaggccgccaagaagaagccaggcatcttcatcccgagctgcgacgaggatggctactaccggaagatgcagtgtgaccagagcagcggtgactgctggtgtgtggaccagctgggcctggagctgactggcacgcgcacgcatgggagccccgactgcgatgacatcgtgggcttctcgggggactttggaagcggtgtcggctgggaggatgaggaggagaaggagacggaggaagcaggcgaggaggccgaggaggaggagggcgaggcaggcgaggctgacgacgggggctacatctggtagacgccctcaggagccggctgccgggggggactcaacagcagagctctgagcagcagcaggcaacttcgagaacggatccagaaatgcagtcagaaggaccctgctccacctggggggactgggagtgtgagtgtgcatggcatgtgtgtggcacagatggctgggacgggtgacagtgtgagtgcatgtgtgcatgcatgtgtgtatgtgtgtgtgtgtgtggcatgcgctgacaaatgtgtccttgatccacactgctcctggcagagtgagtcacccaaaggccccttcggcctccttgtagctgttttctttccttttgttgttggttttaaaatacattcacacacaaatacaaattgacaggtcaaaatccatgaaatgagatcccccagccgtgtcctccagcccagccctgaccccttggtttctaccctggctccccttggtttctaccctggctcaaccgacccctgtctgcccttctccctcttgcttctgaggtcaagctctggcctgcgagcctgtccccattgcaaaggggagggaggggcagggagctgtctaccagctgaggtcctcccaaaactgggccgatgtggtgtgacatccccaccagcctcagatgagacgggccaggacgcccagccacagcaagccctgtccctttgccggatccccaaacactagagaagctctcctaacccaaggcggagaatgaaggtggtggcggcagaggaggagggcagcagctgagaggccagggacagggtgcctcgccaagctgtctgaggtctgtcccaggtggcccaggtggtgcaggtagaacagggtgaggagagggggtcggctcagcaggaggaggctgtggctgcagagcctgggggagcttttaggtgttgagatggggcagctctgaatcctagaccctggaatagcctgtcccttttctctgggtctcgtggtggagccatgatctgggctgctctcttggggacactgggtggtggttacacagttgacctctgcctggctcccccttggtgcaactcctgcctccatcccccttgctggggtcccctcatccacttgagggcgcctgagggccaggagcagcaggcaaggagcctgggtctaggctaagggggtgtgtgcccacctcctccctgacccttaacactcctgtcctgcccagaccaacagagagagctgtccctgagaccccggagagaagcagctgccgaaagctgcagcctttccgcactctgagaccatgatcttcctcctgccaggggagagccacccacaggccatgtccagccccacttccctcagcccccagggcttccttctggcccctctgaggattccctagggctgccccgcagaggggcttccccaagctctgttttgaagcctgcaatgtggaaaagtgagaagtcagagggaacaggacaggtgcagccgggctctgaggccacacctcacacctcgctgttccccaacatcccctgagcagtgtgagctcatctcaccagatgagaagaggccctgtgcatttcttttgtttgtttgttgctgttttcccccacccatccagttctcctcagcaaagcaaattccttaacacctttggtggagaatttcttacccagacttggggctgtgatgcccttcagtgcgtggtgagtgcagcgtgtgtgcgtgtgcctgtgtgtgaacctgggggccatcctggtggcctgggagcgtgaggagaggccccctgtgtgctgggtgagtggtgggtgtggggtcaatgcagtgaggctctctgggtgaggctcccaacctggcagtccccagcctcccagcatctgtgagcgtctgttggactttacagaagagcctcatcctgtctgcccctcactctgccctggaatcaacatcttccgagtccttcttgggggaaatagcagagccccacttaactccataaactgcttcccattccgcagcccagttctgattgttgaggtgtcgcgtcgttccaggtcccccagtcccctctttctcctgtcctctctctgtccttcacctccccactccagccccggctcagttcagggaaatgctgttccacatcagccctctgctctctgaggcagccgcgcctctgactcggagctacttgaaacttctgctcttgctaggattggagtctacctatctcttccatttgtcccagctggagttctggaactttcctcctcggggtgggggtgggggttgttaaggatgctggggggcctggggaaggaaggagttcagaggaagggtgtcccctgtcctcttgatgtcaccctccgctcctgggacacgtgctctctctgtctctgggtcttctggctgtgcacgtttgtgtgtccttgtaaatatgttttaggaagaaagcaaaagggactgaactagcctctggtaggattgcaggggtccagccttgcctgtttccgaagcccccacactgcctttcgccctactgagactggtcccctcaaaaggtagacaaaacagcagctccctgtggagctgaagggcggcctcaaagtggctttttgttagacaaggttaaggtttcctcatgagcaaggttgcagatcggtccttcctcagctccttgatttgtgaccttgaccaaggggcctgccacccagcccctccagtgccctctcctcgatgcctcgctccttcctgcccccactcccctggcttaggcaggtaggggaattagggccatgctggaagaagcttaaccatgtgttcaaagaacggtttcttgcttgcttggtcctggaactccccttggctgccccaggcctccttggcccatgggtgctgggggaggtggatgtcagatctggtaggttgcagcagagaaaataaatgtgccttgagagaccactcagagagggtccaagggtgatggagaaggaagcatggcctgggagcttggaagggaggggtggtgggtggcggcatcttgactgccccctgttgtcccacacgtggggggtggtcaccccccttcactccagcccgcctgccttcagccttccatgagcttcacctgcttccaacttcactttggagggggtggggtccgttggcatcaacacggggaccctctgcttcaccaaagcccgagccctcagcccctggggagaacaaatggctgagctttgatacctggggtcgtcgagaggctgcgggctggcggcagtcccaggggagagacaccacagaaggagacccagacatcccgaggaagttcccagcagagcaaactgctttccagcctgaagcctgcttaaactgtgtgatgtgcaataactgagcttagagttaggaattgtgttcaagtgcttggatttccgtctgtagatttaactgctgaaattgtatctctcagtaattttagatgtcttttaaaaaattgaaaaacaaagtgttagactgtgtgcgtgtgcgttgatgggcactcaagagtcccgtgagtcatccagccctgcctttcccctgcgcccccatcctctcacgtcccgccccgcctccacttggggaccctgcctcgtgtcgtctttatctgcctattactcagcctaaggaaacaagtacactccacacatgcataaaggaaatcaaatgttatttttaagaaaatggaaaataaaaactttataaacaccaaaaaaaaaaaaaaaaa

SEQ ID NO: 3812 - DNA, 4988 bp, Homo Sapiens
  NM_014773
gccagctcagagcttcctcgggtactcggccactcggggcatcgcggcggcctttctagccgctgtcccaagggttggtctcgcgctttcggctgcgagctctctgtggtgctggcagcgacatgtggcgcctcccgggactcctgggccgagctcttccccgtacactgggacctagcctctggagggtgactcctaagtccaccagcccagatgggcctcagactacctcctccactttgctggttcctgtgcctaacctcgacaggtcaggtccccatggcccaggcacgagcgggggtccaaggtcccatggatggaaggatgccttccaatggatgtcttcccgtgtctccccgaacaccctatgggatgccatatcttggggcactctggccgtgctggccctgcagctggcaaggcagatccacttccaggcatccctgccagcaggacctcagcgggtagaacactgctcctggcacagtcccctggaccgtttcttctcatctcccttgtggcacccatgctcctcactgcgacaacacatcctccccagccccgatggcccagctcccaggcacactggcctcagggaacccaggcttggccaggaagaagcctcagctcagccccggaacttctcacacaactctttgagaggagctcgtcctcaggacccctctgaggaaggtcccggtgattttggcttcctgcatgccagtagtagcatcgagtccgaggcaaaaccagcccagcctcagcccactggtgaaaaggaacaagataaatcaaaaactctttcccttgaggaggctgtgacttccattcagcagctcttccagctcagtgtttccatcgctttcaacttcctgggaacagagaacatgaagagtggcgaccacacggcagccttttcttacttccagaaagctgcagcccgcggctacagcaaagcgcagtacaatgcgggcttgtgtcatgagcatggcagaggcacccccagggacattagcaaggcggtcctttattatcagttggctgccagccagggccacagcctggctcagtaccgctatgccaggtgcctactacgagacccagcctcttcgtggaaccctgagcggcagagggcagtgtccttgctgaagcaggctgcagactcaggcttgagagaggcccaagctttcctcggggtgcttttcaccaaggagccctacctggatgagcagagagctgtgaaatatctttggcttgcagccaacaatggggactcacagagcaggtaccaccttggaatttgctatgagaaaggccttggtgtgcagaggaatctgggagaggccttgagatgttaccagcagtcagccgctctgggaaatgaggccgcccaggagaggctgcgagccctcttttccatgggggctgcagccccggggcccagcgacctgacagttacaggactgaagtctttctccagcccctccctctgcagcttgaacaccctgctagcaggaacctcacgcctaccacatgcctcgagcacaggcaaccttggcctcctctgcagaagtgggcatctcggagccagcctggaagcctccagcagggctattcccccacacccctacccactggaaaggagtgttgtaagactaggttttggctaaggtgagataaaacatagtccctggtgcctcttaggggccagagcgggcaggaggttggataacaaaaatagagcatcagcaaccctttccaggtagaaattccagcgggagttcaggttcccaagcaatttcacgtacatggctggtaagtgactgatctttccccccgcttggtagcctcacagatgagtcttggatgcattcacagtcatttctggtctgtgcaccaaaggatgcattcagtgacctatgaaaaaccctactgaagggtccagagaccctggtgctcaccttagcctttgtctttgagcaaataacttaccttcttccttcttatgcctgggttttctcacacttaaatctgtactactgtttgccaatgtctgatgtgtgtatccctggttcacaagaagattttagatggtattcaaattaatattttctatttagttatatatttaatgtataatataaaaatatgattagcatattgacctgtagtttgatagatgttctgtctaggataaagctaactgtaaaaaaaaatagtgaatcagtttaaagaaaaacataacgtaaaagtgggcacagatccagagaggtagcaaaaatcacaggggtggttccatgaatggctgacacttaggaaactctgaattaggccatcctcgagactagcccaccattcacctctgttcatcccccgtgggctcataatcgttttcatttcacctttgatttggaaggaagaagtttcttgcccaaatgcctggatgtgtctgcttgactttcagaacttctcacctcagccctaaagagggagcctgtgggttctcagagagatatcacaatttgagtcccaaagaagaggccagatacccacccaccttcccccaaatcttaagcacctgcgccagtacagtcaagaagaggaaagtgtgtgaagacccaggtctggctctgccacttgcctggccatgtcaccttgaagctgtgacctgactccctatattgtttcctcagttgtagaccaaaggcaatggtgtctgccctcctaccttagaagacaaatgcaagggcatttcaccacagagaggacctttgtgctcactttggcccaggaggcagtgatgctcatggttgcatgactttatgagtcgctgggccagggtgaggacctgggcctcctgactcctggcccagagttcttgtccatcagttcatactgcaattttatgtgaaagcattatgactgtcctacccatgggagagtaaatgtagattgaatgctaggagtcttaaagctggagagtatagattttgaggtccccatttgggaaacatgtgccagaaatgtctaggtgtttaataaaacagatattggattatctcatcactcttgcccttgagtattatgggaagagccagggagacgggcagggggagctgaaagctgaggctccgtcctcatctctaaactctccactaaccaatttaaaggatcttaaaagcttctccaggagagagacttaggaaaaaaaaagatttctgagtcagtgctaatgagtccagttactgaatttgtgaatagctattccctggcttctggatgttagcccaagttgaatagcatagatgtggttgagagtggggtctgggagggatagagagcccaccgcccaccccccacaatcccatgactgagtggagaccaaccagcctggccaattcaaaggcaagaagatttgaggggggaaagttgtccacgtttccctctctgcttcccaccccatctctctcaacttcttagtggtcctgccatactttcctagcacctctctttcacccggggagcccaagcgtcctctagctccatctcctcgcctgctccctgcctccttttcagggctgccctgcacactggctcaccactgttggaccctgcacatggccaccttccacagatggcactccttgggagcagggtccttgtctttgtattccagtgtccccagcactgagtgcaaggccccatgcagggtaggaaacctgaggtttcaagctcagggttttaagctgtgcagtgcactaagctctctgccaaaaaacaaacaaaaaaaggtttctgtggttaaataagtttgggaaatgctgcaccagacgtcccctttttatagattcacaatacacatcagcatatttgaggttccaagaagtcctccagtaaagaacttggttaacccaatgttttctctcactgaattgagcccagagcccgtttccctacagattgcttttgagccttcctggggcaccctctgcgtgaaatgtcaccgtgtgccctccctgtggagccccactccccagcctcctcccctctgtggtcattttggattttctgactacttccttctagccatagctggggccgagggctggttcacagtctggccactgggcgtcctgtggtgaaggccagatgcagccctccctgagtggctctccctcccactcagtcactactgagctaagtactgattcaatttggggtgccaaaggttgggggtaggatatttttaagctctccaatttaaaaaggaagggcctctcctgtggaaagggaaggatggcagagtcgtgagaaaggtgttgtcaagggaccaaaaatccttggctgttcagtcactgcggtcttgatccagccccagggggatgggcttcactggcagagctgggtactgctgtgcttttgccattaaaattctgttattaatgactcatcatcagtgccccagaggaagtgtgagaggacgagagggaggtggctcccatcagcagggccagcttgggtcaggatgctgggttaaagcccggcgccctcaccaatgagacctttgtgggaagctctactgcctcagtttccctatccggagatgctgttttcagggagtcctgacactatgatgggaacaaggctatttggtttactatatcattagtgctaatatagtgtggggcactcagatgttcagtaaatatacattcaacaaataagtgagtgattatactcaactccccccacccaatgcccagcaccaagcctacccagcacatagtaggtactttaagtaatttgaatgaataattttaaataacttgaatgaataattctgtattgccccccactcgccgcctatacacacgcacacacgcacacacacacacacggtttcctgtgctacttctggcacttagtaattattcaataaacacaaaatgtttgttgcaaaaaaaaaaaaaaaaaaaaaaaaaaaaaaa

SEQ ID NO: 3813 - DNA, 5794 bp, Homo Sapiens
  NM_014774
cgccgccgcagccgccgccaccaacgccaacaacaacgtgtcgggagcagccgcggccgaagccggagcaggggccggagtcgcggctggagtggggcctgcgcgtgtgagtggccgagagttgcccgtgccggagacctcaaactccgggcgggagcgctttcggtcggccgagccgccgtcgcccgcggcaccgtgtccccaaggcccagacagcggggcgggggtctatcaggcgcgggactggcttctctcaggccgacccttctagccgggctccggatcttcctcggcctcgggcccccttcacgttcaggacggaggccggagaacggtgatcatcacacaccccagccggcttcctggccagggcattttctctgcggccaagcagtgttgggattgtagctgctgggagccccctcctgccgccacctctcctgcaaggaagggactgacgcgttcccactttcttactctgcacctccccactctcttcccattcaagaacgagtttctcttccctctccattggaaatcttgctccggaggtccgaaacacgtattttaagcgtgcccttcctcacctcctggagcacccttagaagtattgcctacttatccgggctgagaatccttcatttttgacctggcttttttttcgccctttgggagataaaggtccctctccaccctctactaacactctgcacccaaggccttatcctttggggtcaccagctccttggccatttctatgtgatttcccccacccatctgagttccagtttcctctgggctccaatctccagtccctggcggatctggtcagtcccacccctaggtgggagtgaccagggggctctggcccaggattcccaaccctggaaggcagctccaaggcaggaagagaattgggcatcgggtacgaacctggcagctcaggagtcggggctccactcaccccacacaaaaagatgaaaaagcgcaaagagctcaatgcattgattggtttggctggggacagccggagaaagaagcccaagaaaggcccaagcagtcaccgcctgcttcgcactgagcctcccgactcagactctgagtccagctccgaagaggaagaggaattcggtgtggttggaaatcgctctcgctttgccaagggagactatttacgatgctgcaagatctgttatccgctctgtggttttgtcatccttgctgcctgtgttgtggcctgtgttggcttggtgtggatgcaggttgctctcaaggaggatctggatgccctcaaggaaaaatttcgaacaatggaatctaatcagaaaagctcattccaagaaatccccaaacttaatgaagaactactcagcaagcaaaaacaacttgagaagattgaatctggagagatgggtttgaacaaagtctggataaacatcacagaaatgaataagcagatttctctgttgacttctgcagtgaaccacctcaaagccaatgttaagtcagctgcagacttgattagcctgcctaccactgtagagggacttcagaagagtgtagcttccattggcaatactttaaacagcgtccatcttgctgtggaagcactacagaaaactgtggatgaacacaagaaaacgatggaattactgcagagtgatatgaatcagcacttcttgaaggagactcctggaagcaaccagatcattccgtcaccttcagccacatcagaacttgacaataaaacccacagtgagaatttgaaacaggatatcctgtaccttcacaactctttagaggaggtaaacagtgccctagtggggtaccagagacagaatgatcttaaactcgagggaatgaacgagacagtcagtaatcttacccagagagtcaacctgatagaaagcgatgtggttgctatgagcaaggtagaaaagaaagcaaacctgtccttcagcatgatgggtgatagatctgccactctgaaaagacagtctttggatcaagtcaccaacagaacagatacagtaaaaatccaaagcataaagaaagaagatagttcaaattctcaggtatccaagctaagagagaaactccagctgatcagtgctcttacaaacaaacctgagagcaacaggcctccagagaccgccgatgaagagcaagtagagagtttcacatcaaagccatcagcattgccaaaattttcacagtttcttggagacccagttgagaaagctgcccaactaagacctatctccctaccaggagtttctagcactgaagatcttcaggatttattccgcaagactggccaggacgtggatgggaagctgacctaccaggaaatctggacctccctaggttctgctatgccagaaccagagagcttgagagcatttgattccgatggagatggaagatactcattcctggagctaagggtagctttaggtatctagcttcatcaggcatattttagaaatggactgcctaatatctatttacctaacaacaaaacaacccttacttacccatcagtcctctagtcctccaaactactgtagcagatactttgccaccttttaacttgtttgaagaagctatataaaagttatttttttaaagaagaagaccattttacttatgatgttcagaaatctatgatttcctacaaccagtaagatcttacattttaaaattgccagaaaaaaaattaaagccctctttttttctctttcctttttttgaggggaggagaccttatcttttaaagctgggaaatgtatatagagagagaataagccacttttatatttcacttaaatttgccttaaattagctgcactttatagagactcagaaaatgtcttttctttaaaagataggccttttctgtttgtaaatatttaaatgaaagaaagcattgtgcatattgtgtggaaagtaggaagaatggttttgaacaggatatgaacaaatgacttattaaaaattgctgatctggtgtaggtggcagctgaaactacatccatgtctccataaggtatccctcaaaggcccaggcgctgccagggggtttgtcctggtagctggaggaaccgatttcagggagtagacactggagacaatactgactccaggcatggctcatggaagtaggattctggttctttgttcctattccctcagctaatcccaacctgggaatcagagaagtcttggggatttttctcatttttagtactatttcagggtttatgagcataaaaagttatccattggggagctccattttccctgctgagtgagctagattgccttccccacccacccacttaagtctgtcttaaagccgtagctggctcccaccaccagtaccatctccatttgaatggcagggctaaattcccccagccattatctcacactgaccacccagagctttagaagagagctgtgcttctaattttgacccagaaaaccataccccttgagattttacctagaggctaaccaagagcctaatatgtttctctgggggatgactaaagccaaaaaggctgtgagatgaaacatgtgaaataatattcagtttccttaccattaccagctcagaagtagctagaggctttctacccaaaggatgccaaagtatagcagggcaggcctggagctagggccttcacatggtggtagcaagtttttcaaatctaatacaatcaagtacaatacttcctttaaatgcttctgtggacctggcatgaaagatccctagattgaaaggaataatacctccatgtctcctgtatgttgagtctagaattgctgtgttgttcttagaagcagtctttgggcaacaacttgaaaggggaaaaaaaaactacaaaaacttaactttggtataggccaagtcagggagaaagtagagaaagctgtcatgccacagacttctttagtggagatcatttcctttttaactttgttcaggttgcccttcaccatggatacagtccggtacccttaaacatttaagggctgttttttttttctttacatgatgttcagcttggtattaaccaaacttaaattttttttccagaagtattaaaatttagttaaagcaagatgaagtcttttcccatgaatgtgtccccttatctcattatagcttatgctcagtttcactttcttggaaaggttaaaacaaattagcctggcactttaggtaacttgaaaataactctcacccttctgactgccttccatccactctcaccccacacctttttttaatatatatacacccttacagattttctaacaaccaaataaaattctagcaataaattgaattatactgctatatttgtatatactgtaccataaatagtatgtctgtacctggaaggtatttttttgagaactgatttatatgaaatatacttgagggtaatgtagcttgtcctttttagtttcaaattcttattcataggcagatactttgaagacaccttaactctttgttgtgtgtattttcccttgcatcagataactatacatggagaaatccattttgttttttggtttatcttctgttcttcctaccttgtgcttgtctgactagtatcacccctgagccagtatacagtaccatcctctccccctaccaagtttggcagaggtgtttatactgcattctcagatctatgaatatttttgtcatcctgcctgagaaagtacatcttccaggcaaaagtagggtatcttgaactcctttcttctgagttgagcagactcactggcttaagcatcccataagcctattatttagtgtgaatttgggacttttatttgtatgttgtcttaacttactaagcctgtgacttgtatttagctgtagtcaagcctcaccagccatatctcatctctgagaggaagactggatagtgagtttggttttggttttggttttaaacccttttaccttttcagtctggcagctcctactgctgctttcctaagttactcaaagcactgcttcttggtccttgttttcttttgccttgtactatcttgtataatgtttactaaaagagcctccccataaatcagagaggcaaaaaggtagcatataaaaagaagaaccaaaagaagagaaaacctgacttctagatgactgtggtgtcatctaaaaggcagaggtgcctgaccctcaggaatgtgtatgatgcaacagagctgaagaatgggttcccttcacctactgctggccattgtcccttctgttggagattcctttctttatggttgctgttcataaccccttcaacacccccccttgctggtcctgccggtcacagttgaggattttggctgtgatgggctcatactcataatggcctgttgagttgtttttagtgacaggttttgtttgctgcacacctcattggcttgcttaccaacaccagctagaagtggtccctctttcatatccaaaccagaacacatttgggtattcctgagactttatagagcgtgtattgtttgttatacgaacctaacctaccttgttgttttctcatattaagaaatttaaatctactttgttttagtgaagctattttggtaatgtataagcaattttggttctgtttagggagaattcagggtttccatgacttgatttgagctttgcatatttcaaataagtaacacagccattttaatttagctaaataaaaaaatttcttttttctctcaaaaaaaaaaaaaaaaaaaaaaaaaaaaa

SEQ ID NO: 3814 - DNA, 4209 bp, Homo Sapiens
  NM_014775
agcaagctgagctcagagcgaagctggcgagccaaggagataaagaaccctcggtggggatgcccagagggtgcatgctccacgcccctcgaaaccgattctcattgctgctgctgcaaagcaacccgaagtgcgccacctacccgactgaggctgcgcaagccccggggtctgggcggggtggtcctcgtgcgcgccgcgtcgccgtggagacgagggcgggcccgcgcgagactggcgtctagaggcgcgcgaagcgctgaggcgggcgtggaccgcgcgggagttaagaagcaggtcccggatcgccgtataccgccgggttttctcccaacgtcaggcccgatggctcggcttccccagttagaaggggaagataaaagactttgattcatgaagaatctgctcactgagaagtgtatatcaagccacaatttccatcaaaaagtgattaagcagagaatggagaagaaggttgattccaggtattttaaggatggtgcagttaagaaaccttattctgcaaagacactgtccaacaagaagtcttctgcatcctttgggatccggagggagttacctagtaccagtcatctagtgcagtatcgtggcacacatacttgtacccgacagggccggttaagagaactgcgcatcagatgcgtggccagaaagttcttatatttatggattcgaatgacttttggaagagtatttccctctaaagccagattttactatgagcagcgattactacggaaggtcttcgaagaatggaaagaggagtggtgggttttccagcacgagtggaaactctgtgttcgagctgactgtcactacaggtattacctgtacaacctgatgttccagacgtggaagacctatgtgcgtcagcagcaggagatgaggaacaagtacattagagccgaggttcatgatgcaaagcaaaagatgcgacaggcctggaagtcctggttgatctacgtggttgttcgtaggaccaaacttcagatgcagactacagctctggagtttaggcaacggattatcttacgggtgtggtggagcacgtggaggcagcgactaggacaggtccgtgtgagccgtgccctccatgcctctgctttgaagcacagggccctgagcctccaggtgcaggcttggtcacagtggcgggaacagctcctgtatgtccagaaggagaaacaaaaggttgtctctgcagtgaaacatcatcagcactggcaaaaacggagatttctaaaggcctggcttgaatacctgcaagtccgcagagtgaagagacagcagaatgagatggctgagcgattccatcatgtcactgtgctccagatatacttctgtgactggcagcaggcctgggagcggagggagagcttgtacgctcaccatgcccaggtggagaaactggccaggaagatggccctgcggcgcgcctttactcactggaaacactacatgctgctgtgtgcagaagaagctgcccagtttgagatggcagaagagcaccacaggcacagccagctgctgctgcacaggttctggaacctctggcggtctcagattgagcagaaaaaggaaagagagctgctccccttactgcatgctgcctgggaccactacagaatagcactgctgtgcaaatgtatcgaattgtggctacagtatactcagaagaggcggtacaagcagctgctacaggccagagcggatggtcatttccagcagagagccctgcctgctgccttccacacatggaacagactctggcgatggcgccaccaggaaaatgtcctcagtgcaagagcaacacgtttccacagggagacattagagaagcaagtattttctctctggaggcagaagatgtttcagcatcgagaaaaccgcctggcagagagaatggccatccttcacgcagagcgacagcttctgtataggtcttggttcatgtggcaccagcaggcagcagcacgtcaccaggagcaggagtggcaaacagtggcctgtgcccaccaccgccacgggcggctcaagaaagctttctgcctctggagggaaagtgcccaagggctcagaacagagaggacgggcagggtgcgggcagcagaattccacatggcccagctcctgcgttgggcctggagccagtggagggagtgcctggccctgcggggagcggagcggcagaagctgatgcgagcagacctgcaccaccagcacagcgtgctgcacagggcgctgcaggcatgggtgacttaccagggcagggtgcgaagcatcctccgggaggtggcagccagggagagccagcacaacaggcagctgctgcgcggggcattacgtcgctggaaagagaacaccatggcccgagtggatgaagccaaaaaaacctttcaagcaagtactcattacagaaggaccatatgttccaaggtcctggtccagtggcgggaagctgtgtcagtgcagatgtattaccgacagcaggaggactgtgccatctgggaggcccagaaggtgctggacaggggctgtctgcggacctggtttcagcgctggtgggactgcagccggaggtcagcccagcagagactgcagctggagagggcagtgcaacaccaccaccggcagctgctgctggaggggctggcccggtggaagacgcaccatctgcagtgtgtcaggaagaggctcctgcacaggcagagcacccaactgctggcacagagactcagccggacctgcttccgccagtggagacaacagctggcagccaggaggcaggagcagcgggcgacagtgcgggccctgtggttctgggccttctcgctgcaggcaaaggtgtgggccacgtggctggcctttgtactggaaaggaggagaaagaaggcgcggctgcagtgggcgctccaggcctaccaggggcagctcctccaggagggtgccacgcggctcctgcgctttgcagccagcatgaaggcctcccggcagcagctgcaggcccagcagcaggtccaggcggctcacagtctccatcgtgccgtccgccgctgtgccacgctctggaaacagaaagtgctgggccggggcgggaagcctcagcccctggcagccatcgcacccagcaggaaagtgacgtttgagggtccccttctcaaccgcattgctgctggggctggggatggcacccttgagaccaagaggccacaggcttctcggcctctgggagctctgggccgcctggctgctgaggagccccacgccctggagctcaacactgcccactcagcgaggaagcagccgcgacgcccacacttcctgttggagcctgcgcagagccagaggcctcagaagccacaggaacatggcctaggcatggctcagccagcagccccctccctgacgcggcccttcctggcagaggccccgacagcactggtcccacacagccccctgcctggggccctgtcaagcgcccctggcccgaagcagcccccgacggcaagcacaggcccggagctgctgctgctgcctctttcctccttcatgccctgcggggcggctgcaccagccagggtgtcagcacagcgggctactcctagggataagcccccggtcccctcatccctggccagtgtccctgacccccatctactccttcctggggacttctcagccaccagggctgggcctggactttcaactgcaggcagcctggaccttgaggctgaacttgaggagatccagcagcaactactgcactaccagaccaccaagcagaacctctggtcctgtcggcggcaagcgagcagcctgcgcaggtggctggagctgaacagagaggagccggggcctgaggaccaggaagtagagcagcaggtgcagaaagagctggaacaggtggaaatgcagatccagctgctggcagaggagctccaggctcagcgccagcccattggcgcctgcgttgcccgcatccaggccctgcggcaggccctgtgctagcgtgttcgcaccaggaacgcaggtgctgggctgtcggggaggcctcaggccacctccaggaacagaacacagttttaagtttgattttttttatttcaaaatgctttgcaattaaatgaattactgttcaaaaaaaaaaaaaaaaaaaaaaaaaaaaaaaaaaaaaaaaaaaaaaaaaaa

SEQ ID NO: 3815 - DNA, 5613 bp, Homo Sapiens
  NM_014777
ggacgcgggacccgtacagcggcctccgccgcaccgggacagcagccgccgccgctgccgccgtcctcccctgtctacccggagctgtctcgagctgagccccctaccgggccggatcccgagataaagcctagccatggctgctgtttattctggcatttcccttaagcttaaaagcaagacaacttcctgggaagataaactaaaactagctcactttgcttggatttctcaccagtgctttcttccaaataaagaacaagtgttacttgattgggcaagacaatcattggttgcattttataagaaaaagcttgaactgaaggaagatattgttgaaaggctttggatctatatagataacattttacatagcagaaaattgcagaatctcctcaagaatggaaagaccattaatcttcagatttccctagtcaagatcatcaatgagagagtagctgagttctctctttcgggatcccaaagaaacatctgtgctgtccttcgatgttgccagggcatcctgtcgacacctgccctggctgtcatctacacggccaaacaggagctgatggtggccttgctgagccagctttgctggtcggcctgcaggcagcccgaaggagctgtggtagcccagttgtttgaggtcattcacctggcccttggccattatctcttgatcctgcagcagcaggtcaacccaagacgtgcctttggggatgtgactgctcacctgctccagccgtgcctggtcctgaggcacttactctctgggggcacatggacgcaggctggccagggccagctgaggcaggtgctgagccgggacatcaggagtcagattgaggccatgttccgaggagggatttttcagcctgagctactgtcatcctacaaggaggggctcttggaccagcagcaaggggatgtgaagacgggagccatgaagaaccttctggctcccatggacaccgtgcttaacaggctggttgatgctggctactgtgcagcatcccttcatacctctgttgtggccaactcagtggccttgctgtataagctctttctagattcttactttaaggagggaaaccagcttctctgcttccaggttctccccaggttgtttggctgcttgaagatttcacacctgcaggaggagcagagcaaagccctgtccacatcagattggaccacagagcttttggttgtggaacagctactaaactcagtggccaacaacaatatctacaacatcgctgccgacagaattcggcacgaagaggctcagttccgcttttaccgccacgtggctgagctgctgataaaccatgcacaagcacccataccggcctggttccgctgtctgaagactttgatatctctgaatcatttgattttggagccagacctggatgacctgctggcttcagcgtggatcgatgccgaggtaacagagtttcgaaccaaaaaagcccaggaggcgcttattcgtactgtcttccagacttatgccaaactccgacaagtgccacggttgtttgaagaggttttgggggtgatctgtcgtccagctgctgaggcactgaggcagcctgtgctggcctcgggcccctccacggtactctctgcatgcctcctggagctgcctccaagtcagatcctggacacgtggtcccttgtgctggagaagttccagtctttagtcttgccctatttgcagagtgatgccgacatggccctgaaatcactgtcactgagcttgctgctgcactgcatcatgttcaacatgaggagcctggacagcagcacgcctctgcccattgtcagacggacacagtgcatgatggagaggatgatgagggagctcgtgcagcccctgctggcccttctcccggacaccccaggcccagagccagagctgtggctgcagaaggtcagtgactctgtgctcctgctctcttacacttgggcccaggtggacgctatgttcagtttgaactgtagccagtatcactctatgtctgggccccttataggtgttgctctggagatctcgaacctcccttcgttgctcccaggtgtaaaaacacagcattggaagaagatagagaagtttacagctcagttcagctctcttggtacatattgcttagaacagctgtacctgcagaaaatgaaaaggactttaatgcaaactagtttccggtctgaaggagccatccaaagtttgaggtgcgatgctgcctttattattggttccggcagaaaaagcttgaatcagagaacgacggcttcctgggatggccaagttgggatggtgagtggactcacataccctgtagcacactggcacttgattgtgtcaaatctcacaattttaatatcctatctgtgtccagatgatgtgggatacctggccagtgtcctgctgagaactttacccatgggcaaagcccaggaagtctcaatagatgaagaggcatacatcacactggaaaaaatatccaaagccttccttcatagccctctctttccagagatgcagtcccttcattctgctttcttaacgtgcgtaaccacaagttgctccagcattctgtgttctggtgcccagcgtgactcaggtcttgtcagtcagcagcttccctggctttttgaaaaggaccacatggttgtgggtcattgggaaaacagatttgcaaaagctggacccgaaggtatagaacctagaggagaaattgcccagaacttactgtccctggtcaagagtgacttccctatccagctggagggagagcagttggaaagcatcctggggcttttggaagtgatttctgccttacagctggacagcctcttgccaccctatcatgtgcattattttcttgtgttactgtccatggccgtcaccaaactaggatgctcttgctcctcctcactggctctcaagttcttgacgacttgctaccaacttcttggttacttgcaaaaggggaaaagtgctcgctctgtgttcaagatcatgtatggtagtgatatttttgaggttgtactgacctcattgttcagagctagtagtaggttccttattgagatggatgatcccgcttggctggaattcctccaagtgatagggacgttcttagaggagctaatgcagatgctcatccaaatgaagctgagcttggtgctcaattttagaaaaatcaccgcattcctctctagttccaaaccatacacggaggcagcttcaagcaaacaattagaaaatcagaacccccagggcaggcagctccttctggtgtctttaaccaggttgtgccatgtcctgggacctttcctcaaagagcagaagctgggccaagaggccccagcagcactgtctgagctgctgcagcaggttgtgctgcagacaggagctgtgctgcagctctgctcagtgccgggggcccggggctggcgccttccctcggtcctcatctcatccgtcagcacgctcttggaagccgacctgggtcagcactgcagggatggaggggccgacatttcccaaggaagcgacaggacgctgctctcccatgttgccctctaccagggtgtttactctcagatactgttggagttgccagctctcgcgggacatgatcagtcttttcaggcagccttgcagtttttgactctgttctttttggccccagaactgcatcccaaaaaggactccgtgtttacctccatgtttcattctgtgagaagagttcttgcagatcctgaaattcctgttcaggtcactcaggatattgagcctcatttgggagccttgttcacccaaatgttagaggttgggacgacagaggacttgaggctggtgatgcagtgtattctccagggactggatgtcagtaacatgtggaaagcagatgtgcaggctgttgtgtcagctgttacactgctgaggctgctactgaactgcccactcagtggagagaaagcaagtctgttgtggcgtgcgtgtccccagatagtcacagctttaacactcttaaaccgagaagcttctcaggagcagcctgtgtccctcacagtggtcgggcctgtcttagatgtcctggctgcactgctgcggcagggggaggaggccatcggcaacccccaccacgtcagcctggccttcagcatccttctcactgtccctttggaccatctgaagccgctggagtatggaagcgtcttcccgaggctgcacaacgtgctcttctcaatcctgcagtgtcaccctaaggtaatgctgaaagccatcccttctttcttgaactctttcaatagattggtgttttcagttatgcgggaagggcggcagaaggacaaaggaagcatagatgacctgcctacggtcctaaagtgtgcacgcctggttgaaagaatgtacagccacatcgccgcacgagctgaggagtttgctgtgttttccccatttatggtggcccagtacgtgttggaggtacagaaggtgaccttatatccagctgtgaaaagtctgctgcaggagggcatttacctcatcctggacctctgcatcgagcctgacgtccagttcctgcgggcctcgctgcagccgggaatgagagacatctttaaggagctctataatgactatctcaagtaccacaaggccaaacatgaaggagagaaaagatatacggcctaaggctatgggacagaagtgccgccagtgacactgtccagaggctttggctgcatggtctgaaagagctggagaatgaaagacttaagatgttctaattcgtagtattggtatacatagaaaatcctttggggtttatgtagtatattttgatgtattttacatcgtgtttttcttactattttttaatacatagttttatgcagtaagtattgcaatagaatcctgaaaattgaccctgggatgagattaattcaatagaaaaattgctgactcttgggacctttctgtgtttggttctcgtcttggctcagtggtttggtgttccctcgtctgcactggaaactacataaaacttggctttttactttgggtacatgggcgtataattcagccctgtttaaatatacttgcctttcaaattcttcaagtaacatgggaagtattcttgaaatgtcacattttctgccttccctctaagtatgctttctgaagaagtcagggaaagttagagtctgtggcctgaggtgtctgctctgggtggcgatagtgggcacctcaggcaggtcggtgacgtttagcacaggtgccagggctcctgcctgctcctcctgtgttagctctgtgaagttcatttaggaatttttttttcctatgcagtttaagaaataatcctaattgttttttcttattacctaagcaatatatttttattatagcaacctcagaaaagaaaaataaaaggataatttaaaaaactcattcatagtctcagttacccagataacctcggttgtcaccttggagtatcttgttgtagtccctttactatgtgtatgtatatagatgtgcatataaatatatatagtagctaaattggatcataaatgcatttttttaaagtt

SEQ ID NO: 3816 - DNA, 6784 bp, Homo Sapiens
  NM_014784
agcgaaatctccgtttcatggaggctgaggcaagagaaaatttcggagcctggatgtggaggagcccaacagcagaactaactcaggaaattgtctttcagaaaaaggccgaacgtaggctgggtctgagaatcaggctggggtaggtggaggaacctgcaagtttaaaggaaaaagaaaaggagagaatattttcagtgattatctctggtttgttatcattactaccatcttaaaggtaaaaagcattgcatttcaggtgttctttgatttttattttatttttttttttggtgcaattggctcatttaagaatttcaaaacatttaatgtaaaagcttttttttttttaaggaagtccataaattttggttcccagggttgcactggacttggaaggagtgctgttgtgtacatactattgtatggttttatttattattttactgtacaaatcagccgaaagaatttttccaagtgccatttcggatttattaatccttttttttttcctttcctcaaagatatttgctgttgtcatattaagcattggagactagaaaattactttccccctttgagctagagggtctcttgccaacagaaggacagctgagaaagctggatttaaaggatggttttatctgtactttgcagttaacagtgatattttgaaggcacatttttctgtgattcatttttttttggccatagtgctaaccttgaagagattcgtggctgggtttttggtttctgagaaggtcgtagtttttcctcttttcctttttttttcttttttcttttcttttctttttttttaaagcgggggaggggaagaggggctgagaaaggaaatcatgttcactggtagaagtagagtggagcatcagttaccagggtcctgagagctggaggagaaaggattctatcttcaagttgggaggccctcctctcaccttgctcaaaaattgcaagcgattcaatcctgatcaagacaccaaagctacaggattctggaaccgtggagacaccgagaaaccatgagtgtaaggttaccccagagtatagacaggttaagtagcctgtcttctctgggagattctgcaccagagcgcaagtccccttcccaccatcgccagccttcggatgcctctgagacaacaggtctcgttcaacgctgtgtcattatccaaaaggaccagcatggcttcggcttcacagtcagtggggatcgcattgttctggtgcagtctgtgcggcctggaggtgcagccatgaaggccggtgtgaaagagggcgaccggatcatcaaagtcaacggcaccatggtgaccaatagctcacacctggaagtggtaaagctgatcaaatctggcgcctatgtcgcactcaccctcctgggctcttcaccttcatccatgggcatctctgggctccagcaggacccatccccagcaggagctccccgaatcacgtcagtgatcccctcaccaccacctcctccacctctaccacctccacaacgcatcacaggacccaaacctctgcaggatcccgaagttcaaaaacatgccacccagatcctcaggaatatgctgaggcaggaagaaaaagaattacaggacatacttccactatatggtgacaccagccagagaccatcagaaggccggctctctctggattcccaggagggggacagtggcttggactctgggacagaacgctttccttccctcagtgagtcattgatgaatcggaactcggtactgtcagaccctgggctagacagtcctcgaacctcccctgtgatcatggccagggtggcccagcaccacaggcggcagggctcggatgcagcagtcccctcaaccggtgaccagggtgtagatcaaagcccaaagcctttaattattggcccagaggaagactatgacccgggttatttcaacaacgagagcgacatcatattccaggatctggagaaactgaagtctcggccagctcacctgggggtttttctacgttacatcttctctcaggcggaccccagtccactgcttttttacctgtgtgcagaagtttatcagcaggcaagccccaaggattcccgaagcttggggaaagacatctggaatattttcctggagaaaaatgcgcctctgagagtgaagatccctgagatgctacaggctgaaattgactcgcgcctgcggaacagcgaagatgcccgtggtgttctctgtgaagctcaagaggcagccatgcctgagatccaagagcagatccacgactacagaacgaagcgcacactggggctgggcagcctgtatggtgaaaatgacctgctggacctggatggggaccctctccgagagcgccaagtggctgagaagcagctggctgcccttggagatattttgtccaagtatgaggaagacaggagcgcccccatggacttcgccctcaatacctacatgagccatgctgggatccgtcttcgagaggcacgaccttccaacacagctgaaaaggcccagtctgctcctgacaaggacaagtggctaccgttcttccctaagaccaagaagagcagcaattccaagaaagaaaaggatgccttggaggacaagaagcgaaaccctatcctcaaatacattgggaagcccaaaagctcttctcaaagcacatttcatattcccttgtcccctgtggaagtcaaaccaggcaatgtgaggaacatcattcagcactttgagaacaaccagcagtatgatgccccagaacctgggacacaacgactctcgaccggaagctttcctgaggacctgctggagagtgacagttcacgctcagagattcgcctgggccgctctgaaagcctcaagggccgggaagagatgaaacggtctcgaaaggcagagaacgtgccccgctctcgcagtgatgttgacatggatgctgctgcggaggctactcgcctgcaccagtcagcctcgtcctctacctccagcctctccaccaggtctcttgagaacccaacccctccattcactcccaaaatgggccgcaggagcattgagtcccccagtttggggttctgcacagataccctccttccccacctcctagaggatgatctgggccagctgtctgacctggagccagagccagatgcccaaaattggcagcatacagtgggcaaggatgtggtggctgggctaacccagcgggagattgaccggcaagaggtcatcaatgagctgtttgtgactgaagcttcccacctgcgcacactccgggtcctggacctgatcttctaccagcgaatgaagaaggagaacctgatgccccgggaggagctggcccggctcttcccgaacctgcctgaactcatagagattcacaattcctggtgtgaagccatgaagaagctccgggaggaaggccccatcatcaaagagatcagtgacctcatgctggcccggtttgatggccctgcccgagaggaactccagcaagtggctgcacagttctgttcctatcagtcaatagccctagagctaatcaagaccaagcaacgcaaggagagtcgattccagctcttcatgcaggaggctgagagccaccctcagtgtcggcggctgcagctgagagacctcatcatctctgagatgcagcggctcaccaagtacccgctgctgctggagagcatcatcaagcacacagagggtggcacctctgagcatgagaagctgtgccgggcccgggaccagtgccgggagattctcaagtatgtgaatgaagcggtaaaacaaacagagaaccgccaccgtttagagggctaccagaaacgcctggatgccaccgccctggagagggccagcaaccccctggcagcagagttcaagagcctggatcttacaaccagaaaaatgatccatgagggacccctgacctggaggatcagcaaggataagaccttggacctccacgtgctgctgctggaggacctcctagtgctgctacagaaacaggatgagaagctattgctgaagtgccacagcaagactgctgtgggctcctcagacagcaagcagaccttcagccccgtgctcaagctcaatgctgtgctcatccgctctgtggccacagataaacgggccttcttcatcatctgcacctccaagctgggcccaccccagatctatgagctggttgcattgacgtcatcagacaagaacacatggatggagctcttagaagaggccgtgcggaatgccaccaggcaccccggagctgccccaatgcccgtccatcctccacccccaggtccccgggagccagcccagcagggccccacacccagcagggtagaactggatgactcagacgtgttccatggtgaacctgaacctgaggagctgcctggaggcactgggtcccagcagagggtccaagggaagcaccaggtcctgctagaggaccctgagcaggagggcagtgcagaggaagaggaactgggtgtcctgccttgcccttccacatccctggatggagagaacaggggcatcaggacaaggaaccccatccacttggccttcccaggccctctgttcatggaagggctcgctgactccgctctggaagatgtggagaacctgcgacatctgatcctgtggagcctgctgccaggtcacaccatggaaactcaggctgcccaggagcccgaggacgacctgacacccacaccttctgtcatcagcgtcacctctcacccctgggacccaggctccccagggcaagcaccccctgggggtgaaggggacaacacccagcttgcagggctggagggggaacggccagagcaggaagacatgggtctctgttctctggaacacctacccccaaggaccagaaattctgggatatgggagtctccagaactggacaggaatctggctgaagatgcttcaagcacagaggcagcaggaggttacaaagttgtgagaaaagctgaggtggcaggcagcaaggttgtccctgcactaccagagagtggccagtcagagcctgggccacctgaagtggaaggcggaacaaaggctacggggaactgcttttatgtcagcatgccatcaggacccccggactcaagcaccgaccactcagaggcacccatgagcccccctcagcctgacagcctccctgcagggcagacagagcctcagcctcagctgcagggaggcaacgatgatccaagacgccccagccgctctcctccaagcctggccctcagggacgtgggcatgatcttccataccattgagcagctcactctcaagctcaacaggctcaaggatatggagctggcccacagagagctgctcaagtcccttgggggagagtcatctggtggcaccacgcctgtgggcagtttccacacagaagcagctagatggacagatggctccctctcacctcccgctaaggagcccctagcttctgactccaggaacagccatgaactggggccctgccctgaggatggctctgacgcccccctggaagacagcacagcagacgcagccgcgtcaccaggaccataaccgtacaaaccaccaaatcctctgcgtccccactcctccttcagggactggcctgagaccggggcacagggtaggggggatcccaacactcctccctgtggaggaggcagttagggaaactaggatccagccaaggcccggggggagacccgcatgttgcttggtctgctcaagtcggagtcaggtttcagtgtcttttccctcccttagcccaaccctccaaggcctcatgtctcctaagcatgctgactgcatccgaaaggcccccactcaccatggtctgccctcaccccacatatgtgtgtacacgcgcacgcctgtatgtgcgctgccctcagacatgcaagtgaaaggaggaggcttctgtgtaaatgcactttcttcctcccctctttctccataagaccccaggcagaggtgggtgcctcccctcccctctttgtcactttggtttcctataaatatgtatgtatcgtatgtgcatctttgctattgtaaataactttgaccttttttgttcctgttcctgaagtgctggaggcagttatggaaggagctgcttagggaagaggggtttcacttgtatctccttagttaacaacccagttccaggatcgagcctaaagcgggagccaggcctgagtgttcctgtccctgtgagtgggaaggtcttctggctccccatcccacctggctccagagcctgccctccacagcttgctgccaagctactccctccctccctggacttctcatcttcacaagatggggatcatgggggtttcttaccccacctatgtccccctcttccccaccctgtccctgtagaaaaccagtgaagcaggtacggagctgaggactgggccccaggaggtggggacaggggtctgaatgccgagtccctgaattcacccaggaccatccaaggggccaccgcagcattggccccatcaccacgtcctcacccaactctccctgatgaatagaatatacacactgtgctaggtgtatatatacatatatatatatataaatatatatataatatataaaatatagatatggaaatgactgttctgctgttaagataatgtatactcttttattttcttcctttcatggttaagattttttttttaagaaaagttaaatatccttcaaaaaaaaaaaaaaaa

SEQ ID NO: 3817 - DNA, 2501 bp, Homo Sapiens
  NM_014791
cgaaaagattcttaggaacgccgtaccagccgcgtctctcaggacagcaggcccctgtccttctgtcgggcgccgctcagccgtgccctccgcccctcaggttctttttctaattccaaataaacttgcaagaggactatgaaagattatgatgaacttctcaaatattatgaattacatgaaactattgggacaggtggctttgcaaaggtcaaacttgcctgccatatccttactggagagatggtagctataaaaatcatggataaaaacacactagggagtgatttgccccggatcaaaacggagattgaggccttgaagaacctgagacatcagcatatatgtcaactctaccatgtgctagagacagccaacaaaatattcatggttcttgagtactgccctggaggagagctgtttgactatataatttcccaggatcgcctgtcagaagaggagacccgggttgtcttccgtcagatagtatctgctgttgcttatgtgcacagccagggctatgctcacagggacctcaagccagaaaatttgctgtttgatgaatatcataaattaaagctgattgactttggtctctgtgcaaaacccaagggtaacaaggattaccatctacagacatgctgtgggagtctggcttatgcagcacctgagttaatacaaggcaaatcatatcttggatcagaggcagatgtttggagcatgggcatactgttatatgttcttatgtgtggatttctaccatttgatgatgataatgtaatggctttatacaagaagattatgagaggaaaatatgatgttcccaagtggctctctcccagtagcattctgcttcttcaacaaatgctgcaggtggacccaaagaaacggatttctatgaaaaatctattgaaccatccctggatcatgcaagattacaactatcctgttgagtggcaaagcaagaatccttttattcacctcgatgatgattgcgtaacagaactttctgtacatcacagaaacaacaggcaaacaatggaggatttaatttcactgtggcagtatgatcacctcacggctacctatcttctgcttctagccaagaaggctcggggaaaaccagttcgtttaaggctttcttctttctcctgtggacaagccagtgctaccccattcacagacatcaagtcaaataattggagtctggaagatgtgaccgcaagtgataaaaattatgtggcgggattaatagactatgattggtgtgaagatgatttatcaacaggtgctgctactccccgaacatcacagtttaccaagtactggacagaatcaaatggggtggaatctaaatcattaactccagccttatgcagaacacctgcaaataaattaaagaacaaagaaaatgtatatactcctaagtctgctgtaaagaatgaagagtactttatgtttcctgagccaaagactccagttaataagaaccagcataagagagaaatactcactacgccaaatcgttacactacaccctcaaaagctagaaaccagtgcctgaaagaaactccaattaaaataccagtaaattcaacaggaacagacaagttaatgacaggtgtcattagccctgagaggcggtgccgctcagtggaattggatctcaaccaagcacatatggaggagactccaaaaagaaagggagccaaagtgtttgggagccttgaaagggggttggataaggttatcactgtgctcaccaggagcaaaaggaagggttctgccagagacgggcccagaagactaaagcttcactataatgtgactacaactagattagtgaatccagatcaactgttgaatgaaataatgtctattcttccaaagaagcatgttgactttgtacaaaagggttatacactgaagtgtcaaacacagtcagattttgggaaagtgacaatgcaatttgaattagaagtgtgccagcttcaaaaacccgatgtggtgggtatcaggaggcagcggcttaagggcgatgcctgggtttacaaaagattagtggaagacatcctatctagctgcaaggtataattgatggattcttccatcctgccggatgagtgtgggtgtgatacagcctacataaagactgttatgatcgctttgattttaaagttcattggaactaccaacttgtttctaaagagctatcttaagaccaatatctctttgtttttaaacaaaagatattattttgtgtatgaatctaaatcaagcccatctgtcattatgttactgtcttttttaatcatgtggttttgtatattaataattgttgactttcttagattcacttccatatgtgaatgtaagctcttaactatgtctctttgtaatgtgtaatttctttctgaaataaaaccatttgtgaatataaaaaaaaaaaaaaaaaaaaaaaaaaaaaaaaaaaaaaaaaaaaaaaaaaaaaaaaaaaaaaa

SEQ ID NO: 3818 - DNA, 7909 bp, Homo Sapiens
  NM_014792
ttcaagtatggcagacaaaggatgttctgcgtggggaaatgtggtgacacccatttcacaaggacagctcacatagattgagtgctcaggaaggaccagcaccatacccagtgcctgatgtgtatcatctcaattagtccttgcctcagatgcaaaaggaaaccatcgccatcatcatcaccaccatcatcatcttcctcctgtgcagatggaaaggctgaggcatagagaggtgacggagtctgcccaggactgcaagcctgctggtggcagagccaggttccaatggaatgaaggctgtcatcctcagatggcagggtaggcaggtggctagagctcacttgggagaaggggaaaggacactgactttggctagggatggagcagagcttgggctggctttccatgcacgggcagggggcgtggctcatggctacgctccagccccgggtgtggacattgaatcttccaggtctaccctaggctatgggtctggacagcactgtgatggaaagaagacactctatgtcctgcattctgtgaccaatgatgtgactgtgggaatggcgctggcatctggctgccactctgggacgggtggccagctgccatcaggccccacccaggatgggaccaccatgcgacttcttccctcgctcctcctggtcatgtccagagccccaggaggaccagcaaagcctctcgagccgatggcagctcacgttctgccttgtcagctactcctctcctgggcaatattggctgcttgctgtggctctccccggggtatgtgactgcctctgtgctgggcacctggcctgggctttccttctgggcctgggcagctgggctcagcttggacccaggcagcagccacagaggggcccatggaggtgacagagttgcttctatgatggtgaacgggcagctgtgacacggaggaggcgaccactcctcagtttccaagtgctgcggtcagggccggggccagcaaagtccctcccatattcaaagagcgggtttgggtttgtcccaggaggacatagtcaggagcccatgctgggacatgcctcctccaaagttcagcctggatccccagcctctgccaacggccccgctccttagctaacccagcttgctcctgggttccacggcggagtcagatgtttctgggcagtttcacctttgtgccttaaatgcatgttgaggactttaaggaattgtggagaaatagggctgtggcaaaggcaagtgacaactgggaacaatgatcccgcagaggctgctgaggcctgggccccaggggcgtgggttcatccttctgcctgggctttggtgggaggggcagactctgtggtctgagacacaaaaaaacccaaaacatatgtgtgtacagacacacagcagagccacacacacacttgtgcccatgcacacactcacaggaggcccgtggactccgcacagggaagaaactcctccggtcgacagtggacggcgctgcagcagggactcacccccaagccctgcctgcctcccattgcccacctggccctggcttgatgggcttatctcatgctgtggccggggacctcttgcttcctgcaaccccttgctggactggggcctgggcctctcctgggctgtgcctagggtttgtaacccagggcctgtgccggcgtgcacagagcatctctccctgggaggctcagggctgcctcctcgagctctgtgggcctgcactggccggtgagcttgtggtgtgggttttcaggctgtatccttctacctcctgagcccaggggtcccaggcgccctgcagctgtctcctcggccatcctgtggggccccgaggccttgccctcacttcagtgcctgggtgctcaggctttgcccaggtgccaggagaaggtgtgagcatgagcctattggacacacctggcgacgtataccaggtgtcccacccctgccaccatggggcctcccgatacggcaaccaccacggacctgtggggaccaatgaggaaagagagaggcaggtctgggccaggctcacagggactccggcatagcagaccctgccccagcaggcccccttgtccttcctgggtcctggtccttcatgaggaactagcccatccctggtggggctcccaccccgcttctcagtgggctctatgcttgcctcgtcggagtcacccctcaggcagtcctgggatcctctcctttagacccactgtgccttcccggcctcccgggcttctgctgggggcagaagaaatgcctccccaggtctgtctctggaggctctgagggagatgggcttgggggctgtaggaggaggcagggattccagggtgtcaggaaggcaggggtgccaggtcccacctagtgaagtaataaaccgtgggtggtgatagtgacccagtgccctcactgcccagccccgcctgtcctcagccagcactgcagggatcccaggcccagactctggaggccttcactgatcccagccaccccagaaaagctgcagcctgcaggcaccagccgggccatatgcccagtgccagctagggcccaccgcccatcctgcacacggggccgctgggcaggtgcccctcacacccccaggatgtcagtgctcacctcgagcaaagcgccccagctcggccttgggaggtggtcatgtccagggggatgatggagagctgtccaaccaagagagcgggagggagggaaggagggagggagagagatagagagagagagagagagagaggaagtgtgggccctaaggctgccttagtggaggtgcgcgtggcctgcacctcaccaagcctagccactctcgcggctctgagtggctcacaggcttgtgagggccccgtcgctgcctgctgggtccccaccagggctccctctaggaatgcgccatggctgctatgacaatttgcacagcccagtggcttaaacaccatttataccacaggtccagatgaatcctgcagggccaaggtctgggggtgctggaggccatgctccctccaggcttgcggggagaacttccctgcctcctccagtctctccatccctgagctctcggctcctcctccgtcttcagggccagggcgtagcgtctgctctctcggcctctgcctccgcttcccacctcacctggcttctgtctatgtcagtctccctctgccaacctcctagaaggacacttgtgattacattagggctcacccctttaatccaggggagcctctccacttcatgattttcagctaacttgcttctgcacagaccccctttccctataagggcacacattcactggtcccggggctaaggaccttgctccaagtccctccacccatgatgctgtgccttccagaaacctgtcctctgcagctcggtcttgaccccaagcctgctggtgacctgaacttcacagggttatccccttggactgtgtgcagcacgatgcaatttctgggcctgaatgtcatgctccctggggcaggaccttgagcctgcagcacacactaggccacctgcagtctcacaggccatgccctgggtagacagggaggtgctcaaccccagctcgggtcctctagtctgcctggctaccatgcttctcactctcctgcatctgcagaccctgcgttgccatgtgaggcaggggtggggtggggctgagggcgtggctttggtccctggctgtccggatgaagtaccagagtgacgccacagcccatcccggtgacatgctcacccccaacccccgtgtccgggaccccggtcttgtgtggtccctgatgtggagtcctcagtccttaagatacatccagaaagtcctggccatgaattggaggtgcagagtcctgcagagcctctgggctgggctggtgcccccaggagatggagggcctggtggatgccctcctccctcagagctggggcagctgcctcccaggggtgggactctgggctcagagagaggcccttgagctgcagctcagggggatgcgaggcttcgtggactgtgtcctggtccatgtggtgcacgtgtctccacctccaaggagaggctcctcagtgtgcacctcccccacatccgtcctctctgccggccccgggcgtctgagcagtcattccatgccagcacctctgcagcctgctgggcctcaggttctctgtgagggacctccccggccttcggcggaggtggagtaagctccgtcaaggcaggtggcttcgtcccttcctgtgagtgacaccagtgatgaaatggacccctccacacaggcatcctcagggcacagggccctgggggcaccttcctcctttcgtatttgttgagaaaaaaagtggcattgcgctcacaccaggatgctggagcagagctgacatgctcgggaaagggcagaggtcactgggggtgggaaggtcatccagtccagactcagcacctcgtgggctggtaaactgaggctcaaagtgctggtgccaggcctgaggcctcgcggtgacccctctctctggttcccagcacctgcctgagacctgccccaggcacccataacctggaattccctgtttccttgtccagggcctgaggaaatggctccccaggtctgtctctggatgctctgaggcagatgggcttgggggctctaggaggaggcagggactccagggtgtcaggaaggcaggggtgccgggtcccacccagtggagtaacaaactgtgggtggcgtttgggcctccccgccttccccactgggtgtgctggtgctggcgctgctgggtcagggctgcccgtgaccccagacaccactgtccatcctgtgaggctcccgtctgggcatgtcctgggtggattcctcctttctgttaagtagctacatgaggcaggggctcctggatccaaagcaaatgacaggaattccagagccaggtgcatccactcagggcagccagtgttggtggagctgcctctagcacatggaggagagtgaaagtcagcctgcccctctcacgagaaaagaacctggggatacctctcagcctccagcgttgcaagtgcaaggccagtggagttaatctgcaacgtgcacgagggcgtgtgtcagtggctgtgtgcaggagtgtgagtgagcaagagcaagagcgcatggctcctgctgtacctcaaggtgtgggctcctggtggctgctcagtgttcccaggggtgagaggcctcatgtatcctaggctgcctgagatttctgtgtgctgatcgcatcctcagtttcttgtccaccgcttcactggcaagagtcccaggctccaaggacaccctccctgcacatgattgggtgttaatggtggcctgggttgtgtcttcccctggggatgagggttgggtgtccatggtgccctgggctgtgtcctcccctagggatgagggtcgggcctccacgatgccctgggctgtgtgctcttatgggaatgagggttgggtgtccaagatgccctgggctgtgtccttccctggggatgagggttggatgtccaagatgccctgggctgtgtactcccctaggaatgagggctgggtgtccaagataccctgggctgtgtcctcccctggggatgagggttgggtgtccatggtgccctgggctgtgtcctcccctggggatgacggttgggtgtccatggtgccctgggctgtgtttccttggggatgagggttgggtgctatggcatcctgggcaggtgcttcctttctgcacaagggttgggtgaccatgatgtcctggcaatggcttccctgggttgcctcttttctgccatgtgggaagagcaggggaggtttagttggtctcagcacatcattctctcaggataagtagaagagtgtctgagctgtgaggccagtgctccagctttggaattgtcttccccaccctcacctccatcccatcaaagcccgacatgtcgtgtggcagcagcgaggtgggtgttggctgttctcttgggctgggggttagtcgtggacggggaaaggagagatgctggtcaaagggcatgaagtttctgctgatgggaggagtcagttcttttgatctgttgcacagcatggtgactatagttaacaataatgactatttcaaaattgctaaaagatgagattttaaatgttctcaccacaaaatgataagtgtgtgaggtgatggatatgccacttaccttgttttaatcatcccacaatatagacaggcattgtcactttgcattgtaccccaggaatcttcacatttgcttttttgtcaattaaaaatagagacacaaaaggagagaggggagagcaatagactcttcacggaaccgtgggcttctgcctccgggtaaaataaactgcaaaaaggattcccaggaaaccgttccctctttcagcccttggttacaggaagccggatttgggaaatctgcctggatgacattcacatgaacgggcacatacaggaaaacacggtaatgtaattagaatagtcagagaaaagtagccagaaatgacattcacatgaacgggcacatacaggagaaaacacggtaacgtaattagaatagtcagagaaaagtagccagaaatgacattcacatgaacgggcacatataggagaaaccatggtaacgtaattagaatagtcagagaaaagtagccagaaatgacattcacatgaacgggcacatacaggaaaacacggtaatgtaattagaatagtcagagaaaagtagccagaaatgacattcacatgaacgggcacatacaggagaaaacacggtaacgtaattagaatagtcagagaaaagtagccagaaatgacattcacatgaacgggcacatacaggagaaaacacggtaacgtaattagaatagtcagagaaaagtagccagaagaatttgcaacgtgcccttgtaacaccaaatttgatcagttttttaaaaaatgatcgttatgtaggtgattgagaagtaaatgtattcttttttaaggtaaaaatttggacccttatcatgcatacccccctctgtgctcttcaaatcaacatcattattaatatctgtacatttttgctcatctgagccagcacaggctgaggctgtcagaatggacaccttttggttgttgggtttctgtcagtttctggggtgaagctgcgtgattgagaacgtagctcttggctgccatctcggggattattaaggactgtgaactctatccacaagccatggcaatatctgtcccaccgaatgctccctctaacacactcttactcccgtgatgtgtgttaagggctccgatgatgctgaaaacagcacaggatgtgaaaaggcaggaacagttctgaagtcaaaggctgatgtcctgtttctctttccctctgtgaccgactcccttcccagtggtaacaagtacccacagcttggtttgaatttctgcacgctgttgtctgtgcactcgctcacacttacgcacacagcaggcatgtgggcgatgctgggtattttgtgtatgagtgggatgcacatacacacatctacatccatatcatgcccatgcatctgtaacttgcttttcccgtgtaagaacacttcttagagtttgttcaatgcatgtgtctgtgtgaatgattgaaggcatttctaacccattttaaagatggctacttaggaccatatggatgttgtactgatgtcatttgaccacgtccattgtttccatcttttgggctgttcttgtgtattttactttccatgtaacactgtgacattgagaattggtacctacaacagtctatttgctttacattaaatttgtaggctaatttgtgtaaaaaaaaaaaaaaaaa

SEQ ID NO: 3819 - DNA, 2860 bp, Homo Sapiens
  NM_014793
acaagtgccggcggaaggggaagtccaggagcatgggtggtttttttccccctaccgaggtccgtgaggtgtgtgctaaccaaggggcggctcacaaccgtgacagactgccattcctgagtctcttctggccatgggcccccggagccgtgagcgtcgggcaggcgcggtacagaacaccaacgacagcagcgccctcagcaagcgttccctggccgcgcgcgggtacgtgcaggacccctttgccgcgttgctggttccgggcgcggcgcgccgcgcaccgctcattcaccgaggctactacgtccgcgcacgcgccgtgaggcactgcgtgcgcgcttttttggagcagattggcgcgccccaggccgcgcttcgcgcgcagatcttgtctctcggcgctggcttcgactcgctctattttcgcttaaaaaccgcgggccgcctggcccgggctgcagtctgggaggtggattttccggacgtggcgcggcgcaaagcagaaaggattggagagacgccagagctgtgcgcgttaaccgggcctttcgagaggggggagcccgcgtccgcgctgtgctttgagagcgcagactactgcatcctgggtctggacttgcggcagctccagcgagtggaggaggccctgggcgccgcggggctcgacgcagcctcacccactctgctcctggccgaggcggtgctgacctacctcgagccggagagtgccgcggccctcatcgcctgggcagcccagcgttttcctaatgcccttttcgtggtctatgagcagatgaggcctcaagacgcctttggccagttcatgctgcaacattttcggcagctaaactcccccctgcatggcctggagcgttttcctgacgtggaggcgcagcggcgccgcttccttcaagctggctggaccgcctgcggtgccgtggacatgaatgaattctatcactgctttcttcccgcagaagaacgccggcgggtggaaaatattgaaccctttgacgaatttgaggagtggcatctgaagtgcgcccattatttcattctggcagcttctaggggagacaccctctcccacaccctagtgtttccatcctcagaggcatttcctcgcgtaaatcctgcttcgccttcaggggtattccctgccagcgtagtcagtagcgagggccaggtcccaaacctgaagagatatggccacgcctctgtcttcttgagcccagacgttattctcagtgcaggaggatttggagagcaggaggggcggcactgccgagtgagccagtttcacttgctctcaagagattgtgactctgaatggaaaggcagccaaataggcagttgtgggactggagttcagtgggatggacgcctttatcacaccatgacaagactctcagagagtcgggttctggttctgggagggagactgtccccagtaagtccagccttgggggttctccagcttcatttttttaagagtgaggataataacactgaggacctgaaagtgacaataacaaaggctggccgaaaggatgattccactttgtgttgttggcggcattcaacaacagaagtgtcctgtcagaatcaggaatatttgtttgtgtatgggggtcgaagcgtggtggaacctgtactaagtgactggcatttcctccatgtagggacaatggcttgggtcaggatcccagtggagggagaagtacctgaagcccggcattctcacagtgcctgcacttggcaagggggagcccttattgctggaggtctcggggcttctgaggagccattgaactctgtgctctttctgagaccaatctcttgtggattcctctgggagtcagtagacatccagcctcccattaccccaaggtactcccacacagctcatgtgctcaatggaaagctgttactggttggagggatctggattcattcctcctcatttcctggagtgactgtgatcaatttgactacaggattgagctctgagtatcagattgacacaacatatgtgccatggccattaatgttacacaaccatactagtatccttcttcctgaagagcaacagctcctgctccttggaggtggtgggaactgcttttcctttggtacctacttcaacccccatacagtcacattagacctttcttccttaagtgctgggcagtaaggactggactaatattcaggacccactaaagtagacaataaagttttccacaaataggatgaccctctagctatagatactgccactcctcctttccccatcctttttttcccttagcactattcagtgcaaaaagtgaaaaaggttggtaaaataggtaaaatacctagaaacaatcactacagaaaacagctgaagacagtggccatgcagtccgagaggagtagtggtctgcctctaattttctaatctaagttcgtttattgagttacagtggtctttagtaaagtaaaacaatttcccaatcccaggccttgtgatttgagatggtaccttagaaaaagttacacgcagttccgtggttgaatatatttgagatggtaccttagaaaaagtttcacgcagatccttggttgaatatagttgagggagcgtagtattgacaattcttcatgtaggaaacctgaaatgaacacagtcacagtttgattaaaacattgtcctgtttgttgcaacagaaaactcggatagttttaacaacaggaaacacttgtaggacttcctttaccaacatactttttaaatgttttgctattggttccatatttatttagatttataagtgtcaataaagcaaacttttgatgcctcaaaaaaaaaaaaaaa

SEQ ID NO: 3820 - DNA, 9243 bp, Homo Sapiens
  NM_014795
atttcatttcttccactaaagcgtttgcggagacttcaaggtataatctatcccagatcctttcccagagagaaacttggcgatcacgttttcacatgatgctcacgctcagggcgcttcaattatccctccccacaaagataggtggcgcgtgtttcagggtctctcgtctctctcctacagaaaagaaaaagaaaaaaatgtcattagaagaggcgtaacacgtcagtccgtccccaggtttgtgtttcctggagtggccgaaagagatcagttctaacctgctctgcaggaataacggtcctgcctcccgacactcttggcgaggtttttgtacagtttgctccgggagctgtttcttcgcttccacctttttctcccccacacttcgcggcttcttcatgctttttcttctcaccatttctggccaaaactacaaacaagacttcgcagatcgagcctgcgtgctgccgaagcagggcgccgagtccatgcgaactgccatctgatccgctcttatcaatgaagcagccgatcatggcggatggcccccggtgcaagaggcgcaaacaagccaatcccaggaggaaaaacgtggtgaactatgacaatgtagtggacacaggttctgaaacagatgaggaagacaagcttcatattgctgaggatgacggtattgccaaccctctggaccaggagacgagtccagctagtgtgcccaaccatgagtcctccccacacgtgagccaagctctgttgccaagagaggaagaggaagatgaaataagggagggtggagtggaacacccctggcacaacaacgagattctacaagcctctgtagatggtccagaagaaatgaaggaagactatgacactatggggccagaagccacgatccagaccgcaattaacaatggtacagtgaagaatgcaaattgcacatcagattttgaggaatactttgccaaaagaaaactggaggaacgcgatggtcatgcagtcagcatcgaggagtaccttcagcgcagtgacacagccattatttacccagaagcccctgaggagctgtctcgccttggcacgccagaggccaatgggcaagaagaaaatgacctgccacctggaactccagatgcttttgcccaactgctgacctgcccctactgcgaccggggctacaagcgcttgacatcactgaaggagcacatcaagtaccgccacgagaagaatgaagagaacttttcctgccctctctgtagctacacgtttgcctaccgcacccagctcgagcggcatatggtgacacacaagccagggacagatcagcaccaaatgctaacccaaggagcaggtaatcgcaagttcaaatgcacagagtgtggcaaggccttcaaatataaacaccatctgaaagaacacctgcgaattcacagtggtgaaaaaccttacgagtgcccaaactgcaagaaacgtttctcccattctggttcctacagttcgcacatcagcagcaagaaatgtattggtttaatctctgtaaatggccgaatgagaaacaatatcaagacgggttcttcccctaattctgtttcttcttctcctactaattcagccattacccagttaagaaacaagttggagaatggaaaaccacttagtatgtctgaacagacaggcttacttaaaattaaaacagaaccactagacttcaatgactataaagttcttatggctacacacgggtttagtggcactagtccctttatgaatggtgggcttggagccaccagccctttaggagttcatccatctgctcagagtccaatgcagcacttaggtgtagggatggaagcccctttacttgggtttcccaccatgaatagtaatttaagtgaggtacaaaaggttctacagattgtggacaatactgtttccaggcaaaaaatggactgcaaggctgaagaaatttcaaagttgaaaggttatcacatgaaggatccatgctctcaacctgaggaacaaggagttacttctcctaatattccgcctgtcggtcttccggtagtgagtcataatggtgccactaaaagtattattgactatacgttggaaaaagtcaatgaagccaaagcttgcctccagagcttgactactgactcaaggagacagatcagtaatataaagaaagagaagctacgtactttaatagatttggtcactgatgacaaaatgattgagaaccacaacatatccactccattttcatgccagttctgtaaagaaagttttcctggccccatccctttgcatcagcatgaacgttacctttgtaagatgaatgaagagatcaaggcggtcctgcagcctcatgaaaacatagtccccaacaaagccggagtttttgttgataataaagccctcctcttgtcatctgtactttctgagaaaggaatgacaagccccatcaacccatacaaggaccacatgtctgtactcaaagcatactatgctatgaacatggagcccaactccgatgaactgctgaaaatttccattgctgtgggccttcctcaggaatttgtgaaggaatggtttgaacaacgaaaagtctaccagtactcaaattccaggtccccatccctggaaagaagctccaagccgttagctcccaacagtaaccctcccacaaaagactctttattacccaggtctcctgtaaaacctatggactccataacatcaccatctatagcagaactccacaacagtgttacgaattgtgatcctcctctcaggctaacaaaaccttcccattttaccaatattaaaccagttgaaaaattggaccactccaggagtaatactccttctcccttaaatctttcctccacatcttctaaaaactcccacagtagttcatacactccaaacagcttctcttctgaggagctccaggctgagcctttagacttgtcattaccaaaacaaatgaaagaacccaaaagtattatagccacaaagaacaaaacaaaagctagtagcatcagtttagatcataacagtgtttcttcctcatctgaaaactcagatgagcctctgaacttgacttttatcaagaaggaattttcaaattcaaataatctggacaacaaaagcactaacccagtgttcagcatgaacccatttagtgccaaacctttatacacagctcttccacctcaaagcgcatttccccctgctactttcatgccaccagtccagaccagtattcctgggctacgaccatacccaggactggatcagatgagcttcctaccacatatggcctacacctacccaactggagcagctacttttgctgatatgcagcaaaggagaaagtaccagcggaaacaaggatttcagggagaattgcttgatggagcacaagactacatgtcaggcctagatgatatgacagactccgactcctgtctgtctcgcaaaaagatcaagaagacagagagtggcatgtatgcatgtgacttatgtgacaagacattccagaaaagcagttcccttctgcgacataaatacgaacacacaggaaaaagaccacatcagtgtcagatttgtaagaaagcgtttaaacacaagcaccaccttatcgagcactcaaggcttcactcgggcgagaagccctatcagtgtgataaatgtggcaagcgcttctcacactcgggctcgtactcgcagcacatgaatcacaggtattcctactgcaagcgggaggcggaggagcgggaagcggcggagcgcgaggcgcgcgagaaagggcacttggaacccaccgagctgctgatgaaccgggcttacttgcagagcattacccctcaggggtactctgactcggaggagagggagagtatgccgagggatggcgagagcgagaaggagcacgagaaagaaggcgaggatggctacgggaagctgggcagacaggatggcgacgaggagttcgaggaggaagaggaagaaagtgaaaataaaagtatggatacggatcccgaaacgatacgagatgaagaagagactggagatcactccatggacgatagttcggaggatgggaaaatggaaaccaaatcagaccacgaggaagacaatatggaagatggcatgtaataaactactgcattttaagcttcctatttttttttccagtagtattgttacctgcttgaaaacactgctgtgttaagctgttcatgcacgtgcctgacgcttccaggaagctgtagagagggacagaaggggcggttcagccaagacagatgtagacggagttggagctgggtattgttaaaaactgcattatgcaaaaattttgtacagtgttaaggcctaaaaactgtgtggttcagagactaattcctgtgtttaatagcatttatactttaagcacaactagaaaattgtaagaattgcactctacttatgtatcactacaaactttaaaaaactatgtctaatttatattaatacattttaaaaaggtgcccgcactaccatacatcagtatttttattattattattgttattcctttttaatttaatgtgctcgcactacaatgcatcagtattatgattcctctgtactttcctttcgctattcatcaatttcccattttttttttcagcttaagtaaccacacaattttaggcctcaatttttttttttttctgtgaaggaacttgaagtgatgcatgtgtgaatttaagataccgaagtcttaaagtgacctggacgtgaaggaaaaagtaagatgagaaataaagaaagcctttgtaaggtggttttaaaagccttatatgcaaaccttttaatctgtgtttctgcaagtgccatccttgtacagtgttaagagggtaacatgggttacctttgcaccagcttcagtgttaagctcaccctgttctttgaagcacccatgtcagtattagaagaataggcagcagttccttagtttacatatgtttgtgcaattattttctgtacttttttgttcattaattttgtcagtattacaccaaactgtttttgcaacaaaaaaattttttttgcattcatttaattttaggtcaaataacattttatttatgtggctcattttatatttcctaattttatttatttcatactgtagtgtacagtattatagttcttcaatatatagatatattttagtaaaaaaggaacatgacgttgatcatttgggcaaattttacgtaaagagaagagcatttattgtgttttggaacattaattgtgagatgggatttttcaattttattattttatttttgtttttttccaattactggaaattccaaatttgggaacttttgatacgatcttgtgaaaacactgtattttcgactgaaaattccactttcttcatcttgttttttagctaaaaagagggactgttaaatacaatgtatgataccatgacaaaaatctttcctgaattgtctttgtaaaagtattattgaattttcaatttgtaatttcttttgaaaatgaccatgctcgaataaaaatgtagccaaactaagaatgtagttaatgagttctgtacttttagagagttttccttcaatgaccattaacatgtaacatgctttatgcttataataatgctaattatgtttttttcatataattttagtttagcaataattttgactggtaccaataactgttttttaaaattccatacctatgtacagcaattttacagcttttctcaactgatcctgattccagattgtgtatttttatgtgaggttatattattcaaatttagtctatttactttacagacatttctacttttgcattacgagtatttagagattatgtgttaaaaattcacttctctgtccaaggggtctttgtgatttattcaaaaaaaagtctaatttcaaaaagacagctattattcagtgttatttataatatgtaaccttttttaaaggattgggatagtttatctcactttttgaaatgcagacagtagtttaccgtttatctgaaactagaaggcgtgggtgggagaggaaaagctaaaagcaaatgctaacaaaaataaccgtgattttctaagacagtttttcagtttttacaagatgaccctaatattcagaatatgaatgtattcgtaggttttacataatgacttttatcaagaaactagattctgcttcttaaatctaattgccaagtgaagaataacagaaaaaacagattaccttatcaaatttacagctcttgaatatacagaactataatatagtagctgtccatgtattttttctactttagaatcaaagaagaaaagcatcattttgctattaaatttgctaaaattttgagtatgatatttccagttggcaagaacaacatatttatatttattccttagccataataccactttcctaaatttcacaaaagtcattctttgcaacttgaaactcaatagaaagtgtgtatgtgtgtgtgtgtatatatatatatatatacacacacacacatacacagaaaggatgtaatgaagatacagtaatagttgagcagacctttttagaaaaacatgtttttagctctatcttcaaactttctggcagagggggtggggggggcagggggaggagtggcatcaaaatgctatgcctcctgttatccacagcctagagtttttatatttggaaagtttagaaaattctatcctcgtttctccttctttgaatggcacaaataaatacactacataaatttttctggtttgaaaggctctaggcgataactttattaattcaacctgaaaatatcaagccattaaattttgtccgggtagaataaatccctgtggcctcttttaaagcaatgtaggtctctgttgcccatggggcatatctgtgtcccaatccacaagagataggaccaacaaacaatgaatgtgcaacctaactctttctccttggaaagaagaaagtgtgcacgaagtagaggagggtgggcagaccctgccttgcccctcctgttacccccttctctgtcatttgttcctaactccatttcataggcaggctcagaatacctgagtctgaaaatatcaggataacacttgtgaattgtgacaatcactacaatgtcccatatctgaggagttttttttaatgctatttatccgctggacacgattgcacattagggctgcataatcctctaactctagggaaaaataaaaacttttgatttgtcttaagattcttctccaaggtcgcaaacaagaaattcccctccacaaccaagagatgtgcattttagtaacatcagatgtgttcttctgttttatcaactacttactcttcccacacgcttagttctaaatctaacctttcccccctcgaatagggggcaggggaggatgaggaaacactggaacaactgaacacccctgcccattttctccaagagccttttgtattctagcatatctgtgcaatcttttcttttttcttcacatgacactgtaagcttaggcctgaaataactgggaagagagatgcgtatcagaatttctccgcaagagctaaacaaaacatacatcttccttagcatgaattggactgggggcggagtgggagggcttggaggaaaggggaaagaagggactatatttgaataaatatgaataaatgtattagatacttttcacaatcagataacttttaaaaaggtcattttttatctttctaataatgtaagccttaataaaagcaaatcttagtcacaaatttgaggagactgcccaataataagtttacatgtatttgaactgaaaaattgttaaccatgcttttgctccaagatgtgtgaggccattcaggggctgtagggccctggatatacacacaaacaagtgtgtgtatatctggagccccacacattgtaataaacacagctgcatttatttgactatgtgatcccatgtacatgtaaaaacattcaaacaaacacactcagcggatttatttattgtgcaatggggcaattattcaaataaacatgctcaatgcaattatttgaatctcacattgcatgttcatcaatcatagcactaaaaaaagagggggaaaaaacaccaaagaattcacatggggaaaaaatatatatatgaaaaccaccttattatagattttatagggcagctgaggttatggctcccttcttaactgtaactcaactattctgtattcaatgacatttgtttctaatgattaattggttcactcacttgatcatataatagcaaactttataaacctgtattgtgtagagatgtgaaatctctatatttcaagagcagaagagttctttctagacaccttacatcaagggacactggtccaattattatcgcttatataagcactcctataaattctgaaaaattttatacatgcaacaaaacattcctacatttgaagacattaagaaaaatcacaggtgactcatctgatcattctatatattaataaatattatgacatatatgtgaacacatcacaaatcatattggtgtaccaagaggcaatttatgcctctcttaagtatgtactgacataacctaatatactaaaatgggaaggggcttttagtcactgaaatatgcatcgtgtaacaaagatgaagaaaatacatggcttgtgcccatcataaaaaaagattcagactgaaggcttagctttggttttttcaattaaattgttaaactgtgcacagtgatttttttttagaacttgagacatttgtgatgttggctgtttaaatctttgttaccttcgctgtgaattgaaattgtacatatttagtaaatcatgcagacaaaacaaactttttagacaatatttttattggagagttttcttttcctgtatccatgttaaaaaaaaaaaagacctcctttcccaaaataaaaatgtcaatactaaatttaaagaagtataaaggaatgattgcttcctttagagcaaaatatttaaataaacatggagataattggcaacatgttctttttgggctagtaggctgtgtccaattttttgggtctgatgtttcagagggcctctgtttcagggttgaagatgatatattaatctcggaattaaacaaatgctattaaataac

SEQ ID NO: 3821 - DNA, 5597 bp, Homo Sapiens
  NM_014797
cgcgcttccgggttggctgtggctgtggctgcggcggcggcgcaggagcagaaaccggtgcggcgcagaagccccagaggcgggcggggcggagcggagggccagcgggccccggcgtgggtctcccgccaggccgccggatttaacccttagtggcttctgaagaaaatggcagaaacatcgccagagccttctgggcagcttgttgtacactcagacgctcacagtgacactgtgctggccagttttgaggatcagaggaagaaaggcttcctctgtgacattactttaatcgtggagaatgtacatttccgggcccacaaagccttacttgctgccagtagtgaatacttctcaatgatgtttgcagaagagggggaaatcggccaatccatttatatgctggaaggcatggttgcagacacctttggtatcctgctggaatttatctacacaggttatctccatgccagtgagaaaagtacagaacaaatcctggctactgctcagttcttaaaagtctatgacctggtaaaggcttacacagacttccaaaataatcatagctccccaaagccaacaactttgaacactgctggtgccccagtggttgttatctctaataagaaaaacgatcctccaaagcggaaacggggaagaccaaaaaaagtcaatacattgcaggaggagaaatcagaactggctgcagaggaagaaatacagttaagagtgaacaattcagttcagaatagacaaaactttgtggttaaaggagacagtggtgtactgaatgagcaaattgcagcaaaagaaaaggaagaatcggagcctacttgtgagccaagtagagaggaggaaatgccagttgaaaaagatgagaactatgatcccaagaccgaggatggccaggcaagccagagtcgatacagcaagcggaggatttggagatccgtcaaacttaaagattacaaacttgttggggatcaagaggaccatggttcagccaagaggatctgtggaaggagaaagcgccctggaggccctgaggcccgctgtaaagactgtggcaaggtctttaagtacaatcactttttagcaatccaccagaggagccacacaggggagcgacctttcaaatgtaatgagtgtggaaaaggctttgcccagaagcactcgctacaggtccacaccaggatgcacacaggcgagcggccgtacacctgcaccgtgtgcagcaaggctctgaccaccaagcactcactgctggagcacatgagcctgcactcaggacagaagtcttttacctgtgatcaatgcggaaaatatttcagccagaacagacagctaaagagccattaccgagttcatacaggccactcattaccggaatgcaaagactgccatcgcaaattcatggatgtgtctcagctaaagaaacatctgcgaacacacacaggtgagaagccatttacttgtgaaatctgtggcaaatctttcacagcaaagagttctcttcagacccacatcagaatccatcgaggagaaaagccatactcctgtggcatttgtggcaaatccttctctgactccagtgccaaaaggagacactgcattctacacactggcaagaagcctttctcctgccctgagtgtaacttacagtttgctcgcttagacaacttgaaggctcacttgaaaattcatagcaaggagaagcatgcttcagatgccagcagcatttctggcagtagtaatacagaagaggtcaggaatattcttcagctacagccatatcaactctctacctcgggagagcaggaaattcagcttctcgtaaccgattctgtacataacatcaatttcatgcccggtcctagccagggaatcagcattgtgactgcagagagttcccaaaacatgactgcagaccaggctgctaatcttaccctgctcacgcagcagccagagcaactgcagaatttaattctttcagctcaacaggagcaaacagaacacattcagagcctcaatatgattgaaagccagatggggccctcacaaacagagccagtgcacgtgatcactctgtccaaggaaacactggaacatcttcatgcccatcaagagcaaacagaggagctccatttagctacaagtacttcagatccagctcagcacctgcagctgacacaggagcctggtccgccaccacccactcaccacgtgccccagccaacgccacttggccaggagcagagctgacctgtaaacacgtttgactgcttgattgggctcttcttataagccagctctgactggattttgaacgcttgaaatcaggctctccacaccattgacttgcagatgcttctgtgagagctgtgatggctaactgatgtttataatgccctccatccaggtagcaagatgtgtgtatgtcttgtctaaggtactgatttgtattgagcatttcaatattattgaatggttttcattttaatctgcaatgtctcataaagactcgggtagtttttctttgggggcattgatctcagtttttctgtaaggtttaaatgttcacagccataggttatggtcttgccaacctccccagttatgtttttttgttttctaggacaaagggagtcattttggttgaactgggcagaatggtttgttctattttcttatttttcttaggcaacacagttgttaccacaagacaagtcagggctaaatatgacagatcacaatgtatggggaatttgcccttttaataatttccagtcccctaagacaaagtaaccctcaacgttttatctttatgcagtacagtgggcttattgtgttaacacttcagaaagattcaaactcataaactcagtattttaactcaaaattcatgtaacaagatagccaaaagcataggatttcttaaaattctgaattcgtcttttctgagaaacataaatttacatatttttcaacagaaggctatcaaaattttaattaagtttaaaatacaaaattggatcaagacattcaccctaaattctgaatttttgtcagaaaagagatttgattttcatgaaggtaaagctttcttcactattctggaacataaaactttattcagtgtaatttaagtcttatatatactctactgaattctaactgatctcctgaaaatgttgatctacgtgttgtgtctgataactttctggagatggaagcttataattcatttttattgcagactagttaaatcccacaaagtgaatatcttctcctaatctttccttttttagagacagggtctcactgtatcacccaggccagagtgtagtggcacaatcattgctcactgtaacctcgaattcctgggctcaagcaaccctcccaccttagcctccctagtagctgggactacagggatgtaccaccacacccagctaatcttcatctaatcttaaaactttgagcctcagagactttgtagccagcatgtgtctgtaattgtatgatttttaaatcatcatcaaaagattaaattatgtttgggttaggttttcaagctaagcttattgaattcttttaccactttcatgtaagctggtaggggatttttgagaaaagaaggtgggcactagtatatctaaattaacaatgctgatggggagtagggggtaatctactctaaaattaatagagcctttccatcaattgttttgttttagacatccttgatttctccctaaatcaaataagttatttggaggttagagtaatagagaattcttcaggtttgagagaagataaaaacattttggttgcatatttgctaagctatattttattatatgtaattcacaaaacttccaaaatgatatatatcttatatgtatcaaccaaactaatgttaaatcaggcctgactagagcaaagataacaattttttacaaacactgttaagccctaagtattatttcaggttctcgtttaaactgtttaattttattcttaaaacacaaagtttttaccaacttttcaaagcccaccaatccacattttctccaggaaattaaatatttaagtaagtgagtgtttactcactctggatagctaggtgattattcagaaaatacggttacatagctatttataagtcaagtttcactggctctataacagtctacctctacactaagagaactataacatgaacaacataggtcactttaaatgttctagtagcaacttttaaaaacataaaaagaagcaggtgaaaatgttaataaaagtttatttaatccaacatttgccaaatatttcaacatataaaaatatattagtgagacattttacattctctttttcatactaagctttcgaaatctggtgtgtattttacactttctgcacatctccatttggatgctaatgttcattggacatacttgatctgtatttagatttcatacaacttacagttgaaaacagattctcatatcaagtagctaagacaaaagtttttttcaagaattgaaataagtatcagtttaaaaatttatattaaatttattaaaattaaaatccagttccttgttgcatgggacacagtgcaaatgcttgataagcacatgtggctagtggctgctatattggacagcatgggccacctgtttctaacttgagcatcagtcctagctatgcctgaattatttgaccagctgtcaaagagaaacaaggaaatgatagctttgttaatctagcctctttctttgtcccacatatacattctacccctttgaataaaaaagttcaatgacgccgggcgtggaggctcatgcctgtaatcccagcactttgggaggccaaggtgggcggatcacgaggtcaggagttcgagggcagcctgaccaacatagtgaaaccccatctctactaaaaatacaaaaattagctgggcgtggtggtgtacccctgtaatcccagctactcgggaggctgagacaggagaatcacttgaacccaggaggcggaggctgcagtgagctgagatcacgccattgcactcaagcctggcgacagagcgagactccgtctcaaaaaaaaaagttaaatgacttgagtacccaaaagaaatgtcgtgaacatgaaagtacttctcatgtgtccttgagaaatgatgttgctagtgcagtgtttcacaattcattttctactaaatgtgtaccattttttaaattgttttaacagaaatatagagtgtgtttcttaggaaatagaatgttatgctttggggctcctgaaacacctcgttttgaaggtgaatctttggttttctcccagaagagggtctgccttgggatgattggagctcttaccatcaaaatcagttattcaagtgcttgcccagtgcttcttgaaactcacctctactctgtattttctacagttggttcttgtgttataaatgttgtgagcaacagattaaatgatgctgaggaatgaaaaaagattctcattataaatgcttacctaggattctcattatagatgcttatctaggttttcataaatgggaatgtaacaat

SEQ ID NO: 3822 - DNA, 6817 bp, Homo Sapiens
  NM_014801
tggcgctcacctgcccggccgcagcagccggctccggcgccgcggttcgcgggtccgggcggaagagcagctccagcttcaaacgtggggtggaaggaggcggcgggggcgacggcggcggcgacggcgggggcgcggcccgcgggcccgggtgttagacctgagggagcctggagatccggccggggcgcgcagggtgcagcggggcgctcaccagccccggggcgcagccggcatggtgtcccaggtgctgcagctgctccggcagggcgtgtgggccgcgctcaccgggggctggtaccacgacccggagcagagcaagttcaccaacagctgccacctctacctgtggctgttcctcctgctgctgcccctggccctgcacctggcttttcctccaaatgcgatcattgtatttttctactgcagtgcagtgactatattcttcacaataatcaaactggtcagttatcgcctacacctcatgtttgacaaaggagaagtaattcagcaaaagccctccagaaaggaagaaaagccaaataaagacaaggaggccaaaggtgaacacataactaatcacagaaatccaagcaataataggcagattcacaatggcaaaaaggaagaggccagtcgaaacctctccacgcctcccctccgctgcagctccagagggcaaagcataacctctcatcactcttctgggccattggagttgtcagcacaggaaactgtagaagatctcaaaggtgtcattctattagaagaccatcccatagcaccagtgtcatctacctcacctggtatcaaagtggaaagcttacctgcgtctcaagcacacatgctggaaaccacgaccaagtcagtaatacctgtaaaaccagttgccacagaaactctcatcaatggtaaaggaaaggaaagaggaggcaaggggcagcctcctttgcgccacagatccgagggtggcttagtggataagggacccttgaagaagttgccccacctgtctttgtctcagtatgacttactagaaacagacgtttctttccagccgtgggggagtgagaattcagtcctgattccagaacctgtcagttgtccccggggctccataagggaacgggtacaaagcaagtcacctcaggacagcctgagcagcagctgccctcaatgtgacaccatcgtggccaagcctgtggaggagccagcagacacatcctgtcaggtagatacctcctgccagggggacctgcccttgcaccaggaagtggactcctcagatagtgaggtagctgttactctcatcgatacttctcaacccggagacccactgagtctacatgagcccataaaaattgttatcacgatgagcagtaccccaaactccatgacagatttggaaagctccctccacctgagggtggttggcacagagaagaccagtgtaaagtctgacgctgagcccactaacccaggggcggccggttctccaaatgccgagcagatctcaattcctgtaatcaccctggacctgcctgagggtgggggaggaggtgttccctgtcccgaaggcaatggaagtgaaaggactccagagagactgaagacgagggtatccaccaatcagtgttctggctacggatctggggaggggggaaatgccatcaaggatcacagttcttcatcacgggaaccctgggaatcggtgtcccggcttacacctgatacaggctccgagtctaaggtggggaaggaaggccagactaaccttgacccatcgtcttgtaagtccagccatgaaaagaggcatgcccgggtgctcagtgtggacagtgggacagatgtcttcttgagtaaaagttctgcagaaattgttaacgatacagagaaaacaatgccaacttccaaatctgacctagaggctaaggaaggacaaatgccaaatgagtccaacttcctggaatttgtctccctgttagaatccattaatacttccaagatgacggcatccagtcaactgaatggctcagctgagcagaatgaagaaagtgggcttctccgagataactgttcccaggaaaaaaaggaggaaatcctggaaaatgaaaagcccagtggacacagttctaagcaaggaaaaccagatttgcaaagtcaagaccatactagcaccggccccgcatgcactcagcctgccaagaccacagccttttttcagggcaatagacaaagacagataatctacagggtaacttcccaacaagatagttctgtcttgcaagtcatcagtgggcctgaaacatctgtacaagaagagatatctgtggatgctatgcatgtcttcattgatgaacatggggaaattagatcctgttatttaaaatctggaaatcagaaagaaggccctttacagcctctaccatcaaataatgactgtctctctcaggctcgagagatgcaggtcagctcctccagtaccacaacttctgagagtcaagatccgtcttctggggaccctgccgtcagtgcccttcagcaacagctgttactgatggtggctcgcaggacccagtcggaaaccccacggcatgtgagtcaggatctggaagcctcgtcatgttcttcaacacaaggaaaatttaaccgagagcagttttacaaatttatcattttccctggcaagtggattaaagtctggtatgatcgactgaccttgctggcattacttgatcgaactgaagacatcaaggagaatgtactggcgattttactcattgtcctggtttccctccttggatttctgaccttgagccaaggcttttgcaaagatatgtgggtgctcctcttctgcctcgtcatggccagctgccagtactccctgctaaagagtgttcagcctgaccccgcctcaccaatacacggacacaaccaaatcataacatatagcagaccaatctatttttgtgtgctgtgtggccttattttgcttcttgatacaggggccaaagccaggcaccctcccagttacgttgtgtatggcctgaagctcttctctccagtgtttctacaatcagctagggactacttaatagtatttttatattgcttccctgctatttccctccttgggctcttcccgcaaatcaacactttctgcacttatcttttggagcaaattgacatgctgttttttggtggttctgctgtgtctgggataacctcggctgtttacagtgtggcccggagcgtcttggctgccgccctgctccacgcagtctgcttcagtgcagtgaaggaaccgtggagcatgcaacacatcccggcactgttttcggccttctgtggcctcttggtcgccctttcttaccatctgagccgtcagagcagtgacccatctgtactcatgtccttcatccaatgcaggctgtttcctaaatttttacatcaaaatctggcagagtcagctgctgaccctctccccaagaagatgaaagattcagtgacggatgtcttaaaatgggatctcatcgtctgcgcagtggttgctgtcctctcatttgcagtcagcgccagcactgtattcctgtcattgcgaccatttctcagcatcgtgctgtttgccttggctggagccgtggggtttgtaacacattacgtgctccctcagctccgcaagcatcatccctggatgtggatttcacaccccattctcaaaaacaaagagtatcatcaacgggaagtgagagatgttgcccatttaatgtggttcgaaagactctatgtttggcttcagtgttttgaaaaatacatcttgtacccagcgctaattttgaatgccctcactattgatgcatttttaataagcaatcaccggagacttggtacccactgggacatttttctgatgatcattgctggcatgaagctgttgcggacatcattctgcaacccggtttaccagtttattaacttgagcttcactgtcatctttttccactttgactacaaagatatttcagagagcttcttactggatttcttcatggtgtccattttatttagcaagctcggggacctgcttcacaagttacagttcgtcctgacatatgtggctccttggcagatggcttggggttcttcgtttcacgtgtttgctcagctctttgccattcctcattctgccatgcttttctttcagacgattgccacatcaatcttttctaccccattgagcccatttcttgggagtgtcattttcatcacatcatatgtcaggccagtgaaattctgggagaaaaactacaatacaaggcgagtggataattccaacacaagactggcagtccaaattgaaagagatccagggaatgatgacaacaatctcaattccattttttatgaacacttgacaaggaccctccaggagtccctctgtggagacttagttcttggacgttggggcaactacagctctggcgattgctttattttggcttcagatgacctcaatgcctttgttcacctgattgaaattggaaatggtcttgtcacctttcaacttcgaggactggaattccgaggaacctactgccagcagagggaggtagaagccatcatggagggcgacgaggaggacagaggctgctgctgctgcaaaccaggccacttgcctcacctgctgtcctgcaacgctgcctttcacctccgctggctcacctgggaaatcacgcagacccagtacatcctggagggctacagcatcctggacaacaacgcggccaccatgctgcaggtgtttgacctccgaaggatcctcatccgctactacatcaagagtataatatactatatggtaacgtctcccaaactcctctcctggatcaaaaatgaatcacttctgaagtccctgcagccctttgccaagtggcattacattgagcgtgaccttgcaatgttcaacattaacattgatgatgactacgtcccgtgtctccaggggatcacacgagctagcttctgcaatgtttatctagaatggattcaacactgtgcacggaaaagacaagagccttcaacgaccctggacagtgacgaggactctcccttggtgactctgtccttcgccctgtgcaccctggggaggagagctctgggaacagccgctcacaatatggccatcagcctggattctttcctgtatggcctccatgtcctcttcaaaggtgacttcagaataacagcacgtgacgagtgggtatttgctgacatggacctactgcataaagttgtagctccagctatcaggatgtccctgaaacttcaccaggaccagttcacttgccctgacgagtatgaagacccagcagtcctctacgaggccatccagtccttcgagaagaaggtggtcatctgccacgagggcgacccggcctggcggggcgcagtgctgtccaacaaggaagagctgctcaccctgcggcacgtggtggacgagggtgccgacgagtacaaggtcatcatgctccacagaagcttcctgagcttcaaggtgatcaaggttaacaaagaatgcgtccgaggactttgggccgggcagcagcaggagcttatatttcttcgcaaccgcaatccggagcgcggcagtatccagaacaataagcaggtcctgcggaacttgattaactcctcctgcgatcagcccctggggtaccccatgtatgtctccccactaaccacatcctacctagggacacacaggcagctgaagaacatctggggtggacccatcactttggacagaattaggacctggttctggaccaagtgggtaaggatgcggaaggattgcaatgcccgccagcacagtggcggcaacattgaagacgtggacggaggaggggccccgacgacaggtggcaacaatgccccgagtggtggcagccaggagagcagcgcagaacagcccagaaaaggcggtgctcagcacggggtgtcatcctgtgaagggacacagagaacaggcaggaggaaaggcaggagccagtccgtgcaggcacactcagcgctaagccaaaggccgcccatgctgagctcatctggccccatcttagagagccgccaaacattcctccagacgtccacctcagtgcacgagctggcccagaggctctcgggcagccggctctccttgcacgcctcggccacgtccctgcactctcagcccccgcccgtcaccaccaccggccacctgagtgtccgtgagcgggccgaggcgctcatcaggtccagcctgggctcctccaccagctccaccctgagcttcctcttcggcaagaggagcttttccagcgcgctcgtcatttccggactctctgctgcggaggggggcaataccagtgacacccagtcatccagcagcgtcaacatcgtgatgggcccctcagccagggctgccagccaggccactcggcacctctccgagccatgtgagccccctgatgccaccgagcaggggcagcttcatgaccgatgtctggctgaggctgtggcggacactctcggggttgtctgcaggagagcaagccaggaggacatgggcctggacgacacggcctcgcagcaaagtgtgtcagacgagcagtgacgggcgtgcggccgggcggggaggctggctcccccacacctcccacctgcattgctctccctcgtgctccccaaatcaccacaaccaaccaataccgcgatccatgagggactcctcctgtggaaaaggagagctgttccagaacacagaactgatctcaggtttttg

SEQ ID NO: 3823 - DNA, 4701 bp, Homo Sapiens
  NM_014804
aatccatccgcatggctttttgctctagttcctcagatctttctgcgctagctgcactcccaagcccaggcttagatctaccctaatctagtcccagccccgacctcatggacactggctgcaaaacttaccgccttgcaacacctggatccttaaatagttcagggcctcaaaggctcccaagccgccctgcgcctgttgctatggcgactgggcaggcggccggaagcgcggccttgttgggggcccccgttgcccgcctcccagtagccgcgcctcaccctaggccaggaatggttttagggaagactgttgccggatgacaaggctgtcactattgttctgtactacctgacattatgggaccaggccagccagcttcaacctgtgttcatctagcacctaggacccaacttgatgggaggagcgaccccaaagtacttcagacccagaaccagctgcagtttaataggaatgttcctacacattcaagcaacttggcgatccgatattcttgcccacatgccattagaattgaaaaactgaagcactcatacaatgaatcataccattgtaaagatgcagattgtagagttggtcctgacctgggcagttctgtttcattttccgtcatatcccaagagagacttagctatgctgtccacctagccagaagagatgtgaaacgaagacaatttgaaaaacatataaaagaacatcatctcagaagtcagcctcaaagctctcagaagtgtggacatactaagtataaaatacccgaccacagggtggaaaggaaggaatcaaagagtcaagcagcctgtcagtgtagccaccagccatccaaagtagaaatctccagctctggtgccaaagtatacctttactcatctcatccaggccagtcagatcttactgtgccaaattcgccacccacccatgatccgggacttcagcctcatcccaggataggtgaccacaaaaacataagtgaacagaaaagcctgctagaagtccagcgactccagaaagaactgagcagttgtatccacaaaattgaagaggtaactaaaaaagatagactagaagaagctttggatccagatgaagaacgtcgaatccgtatcaggagacaggagcaagctgctcgctctgcccgaatgctctacgtcctccagcagcaggtaaaagaaatccaggaagaattggataaattgagtccacataaaattaaacacactaagaagtcatgggcaatgtctaagctggcggctgcccatcgaggagccattcgggccttacagatgtttgtcactcagtttactgaccgaggggagcatccacttcctgctcggtgtaaggaactgggcagccttattcgccagctttcactttgttctgtcaagctggatgcagacccttctgttcctgatgtggttatagatattctgcaacaaattgaggctttggaatctctcctggaaaagaaactgtcaccaaaaaaggtgaaaaaatgtttcagtgaaattcggagcagatttcctatcggtagccaaaaggccttggagagatggccaagtacatcaccaaagggtgagaggaggcccctcacagcaaaggacacattcccacaggaaacaagtcgaccttctgtagcaaagcagcttcttgccgataagtatcagcccgatacggagcttccggagacccagaggttgcagagtgagcttgatgtattagatgcggatatagttctggaagaaggaccatttattctagaccaaagtgcaagcttcaaagacgaggtgttagccgtggcaaaaacaaaagcagggaaaaagaagcctgtgactgagaatgtgccgtttaggaagaaagatactctggcgccagcaagacagcaaggactccgcaaagctgaaagaggtagacaaagccaacctcacagtaaaagcagagtgcagcagacaacagtttcatccagattaaaaatgaaccggcagcctgtgaaagaccgcaaggcaccatggatacccccaaaccccacatccccaccagcgtctcctaaatgtgctgcatggctaaaggtgaaaactagccccagagatgccacaaaagagcctctccagcaagaagatcctcaagaggaaagtcacctgacaggtgctgttgagcatgaagcagccaggctcgcttggcttgatgctgaaacttccaaaagattgaaggaactagaagagttaaaagccaaggaaattgacagcatgcaaaaacagaggcttgattggcttgatgctgaaacttctagaagaacaaaggaactgaatgagctcaaagctgaagaaatgtatagactccaacaattgagtgtttctgccacccacttagcagacaaggtagaggaggcagttctggatcgtttgaagcctctcttggtcaaggcccagagagtcaattctactacagaagcaaatattcatttgaaagatggctcgtcagtaaacacagcgaaagcccagcctgcacaggaggttgcagctgttgattttgaatccaacaacattcgtcagcttgatgattttttggaagattgtgccagtgagctctgggctgtgactcatgctaagatcttggggtctgaaaccttagccaccgttgaggacagcaaggatagcccagatctggagatcatgatgcgccgaatggaagagatggaaaaataccaggagtctgttcgtcaaagatataataaaatcgcatatgctgatcctcgactttggatgcaggaagaaaacaatgaccaaaaaatctcagcaataagtgaaaagcctctatctcctcatccaatcagaatcacgaagacagtggatcgcaaggatccagccgtgaacatcatgttagaaaggccctgtaatggcaattccctggatgaaagtgtgggaacagaggaaggatcagagaaaagagaggcccctcttctctccctagccgaagattctcaacagaaagaaggccgagctcccctctttgtcccaccgggtatgcagcacagcatcggtgactactgtagtcgttttgagcagtaccttcggatcatatctcatgaggctgtaggctccttcaacccgtggctgatagctgaaagcttttcagaagagctggtagatgaagctctgggtgctgtggctgctgaacttcaggatatgtgcgaagattatgcagaagctgtgttcacctcagaattcttagaggctgctacataaaggctctctgaggcgaggccatttgtgtcacactggagaagggatggcaccaccctttgttttggcccacaggaaattttcatcctcagctgtccatccaggcccagaaggtgctgcccactgaaaggaaggcagtgccggggaggtcatcctcactttgcattttcttttgtcatggcaatggttctggaaatgtatgatgcaatgtatcacacttatcagtgcccaggcaacacaacttgattatggcaatattttcagaatgtgtacttttcctattgaaataccatgttcattcctctggctcagtttggtgatgaaaatgttttgaaagataatcgatacgtatatttcacacaaggattcaggttgctgttgaacccttgctggcattgataccaacacaagtgcggctactagctggtcccatcacggggcccctgttttgcatctttggcgatttcctgtcaggacctctggccctactaggctgtagactcagggagagcacagtctggctgtgctgccaaacctctcctctgctgcagtttattccaaacaggagccccctggctgtcagtgcacaataatagacacacatttcttcaacgttccattcctaggtgattttcacatttttagttcctcagcatattttattgctgtgtgttgacacaatctggtataaaaaactttctctggattcagaggaagtttgaggaatcaggagaggaccaggccttctcctgtgcctgggtgaaggtacagacctcgctgtgtctccgatgaggtcagaagtgtctctatttcataccacaaaggaacccaagtgggagtagggaacagatggatggcgcgaagacctctgtgtctccccagagaaaggaagaaacttaagaaccatcatagcctggtcctccaacatcttacagatcatgttttccaagagaaaagcctgtgttttcagaaactctgaattcagaaaaagaaacggaatgtgcgtaagaatcaggccactgcctggaaagactttctctcaattcgtagcctgaggctcagtgaaggaaacatgcagaaagaatgcctgagacgcccccagggaataagggaactctttataacctgtccagtgccgtcatctgggatttttctctgaagtacaagaatttcaggtgatttaagctgcttgatcacacttatttgtgcaaaattgattttcatttaatgttaatgttttcctgcttaattttatataacttcagaatgtaaagagcttcaaggtaaattacagggtgtttaacctggggagttaaatgtgtacacttgaattaataggagcaccggttgttgctagtataaagtaatttgtgtggcagtttgtactgtgctgagtttttaaaataaacccaatattttaaagtaaaaaaaaaaaaaaaaa

SEQ ID NO: 3824 - DNA, 3370 bp, Homo Sapiens
  NM_014807
gagccggtgccggcccgcgagccccagcgtctctgcagaccagtcccctccagggtccggcggggcccgcgcggtgggaggagtcgggcactggccggcgactaacgggtccgactgctgaccaagctaggagagacccggaccacggagacagagaccccggcatcgcgacccccgaggacctcctctcctcgccctgtggcacccactagtcctgggcactcagccgcggagagcccccgaccccgcgcgcccagccccgggggagcccacctcctccccgcggcccgcccgggccatgctcccccggggcagcgggtgagccccagccgggaccgggatcggagcccgcgcggagcatggatccgggctgggggcagcgggacgtgggctgggcggccttgctgatcctcttcgccgcctcgctgctcacggtgttcgcctggctgctgcaatatgcccggggcttgtggctggcgcgggcccgcggggaccggggcccgggacccgccttagccggggaacccgcgggttccctgcgggagctgggcgtgtggcgctcgctgctgcggctgcgggcgactcgggctggcgccgccgaggagccaggagtccggggcctcctggcgtcactcttcgccttcaagtctttccgggagaactggcagcgggcttgggtgcgagcgctgaacgagcaggcctgcagaaacgggagctccatccaaatcgcctttgaggaggtgccccaactcccacccagagccagcatcagtcatgtgacctgcgtagaccaatctgagcataccatggtgctgcgttgccagctctctgctgaggaggtgcggttcccagtctctgtgacccagcagtcccccgctgccgtctccatggagacctaccacgtcactctgacactgccaccaacacagttggaagtcaacctggaggaaatccctggtgaggggctgctcatatcctgggccttcactgatcgcccagatctcagcctaacggtgcttcccaagcttcaggccagggagagaggtgaagaacaagtggagctctccacaattgaggaactgatcaaggatgccatagtcagcacccagccagccatgatggtcaacctcagggcttgctctgccccaggaggcctggtacccagtgagaagccacccatgatgccccaggctcagccagccatccccagacctaaccggttattcctacggcagcttcgggcatctcacttgggaaatgagctggaaggcaccgaggaactgtgctgtgtagctgaactcgacaaccccatgcagcagaagtggaccaagcccgcgagggctggatccgaggtggagtggacagaagacctggcactggatctgggcccccagagccgggagctgaccctcaaagtgctgaggagcagcagctgtggagacaccgaactcctaggccaggccacactgcctgtgggctccccctccagaccactgtctcgaagacagttgtgcccactcaccccagggccagggaaagccctgggaccagcagccaccatggcagtggagcttcactatgaggagggctctccccggaacctgggtactcccacctcctccactccacgccccagcatcacacctaccaagaagattgagcttgaccggaccatcatgcccgatggcaccattgtcaccacagtcaccactgtccagtcccggccccgtatagacggcaaattagactccccctcccgctccccgtccaaggtggaggtgaccgagaagacgacaactgtgctgagtgagagcagtggccccagcaatacctcccatagcagcagcccaggggacagccacctttccaacggcttggaccctgtagcagagacagcgattcgccagctgacagagcccagtgggcgggtggccaagaagacacccaccaagcgcagcactctcatcatctctggtgtttccaaggtgcccattgctcaggacgagttggcgctatccctgggctatgcggcatccctggaagcctcagtgcaggatgatgcagggaccagcggaggcccctcttcacctccctcagacccaccagccatgtctccaggaccgctagatgccctctctagtcccacaagtgtccaggaagcagacgagacaacccgttcggatatttctgagaggccatctgtggatgatattgagtcggaaacggggtccactggtgccctggagacccgcagcctcaaggatcacaaagtgagtttcctgcgcagcggcactaagctcatcttccgccggaggcctaggcagaaggaagctggcctgagccaatcacacgatgacctctccaacgcaacggccacgcccagtgtccgaaagaaggccggcagcttttctcgccgccttatcaagcgcttttccttcaaatccaaacccaaggccaatggtaaccccagcccccagctctgaggacccagctctgaaagggcacgagttctctcagcccattccccacctccccttccataccccttcctggatctccagtgcctgggccaggaaagccctctgggttccgggaagccccgtccaccctgggccatggggccggttggaaggatacttggaacgggaagcacatgagaggtgggcacccggtgccgaggacatggacgagggactggtggctgggagggagaggagggccctgtccggcatgtgtgggtattccccagaagcatttgcctcctgctgagcctggtccctgagcggagtcccagggtgctcagctcttcagctgacccttcttcccttatttattctcttttctatttatatgtgtggcttaggaccctccgtgaacagatgatagagggcatctctcccaggtgacccttcttttctgtcccaggagggtgggtaattccctttgggatggggctcccacacctccctcaggtccccactcagaccagcaccagtgtctgcctctgagaatgttggcagctcacagagagcagggccggcccgggatggggggcaggtactccccaccttcctgcctcccctcctgctcctcatccctccctccccctttattaccgttttttgtacttgatgccttctctgtgagcagtggctctgtgggaaggagggagccgggagcctggtgggaagccttccccagagagatggctttaggggctttatttaaagactgtgatgatggagccacgcaaggctgcacctctgtgtgttgggagacgatgatgatgtccattgctgtgtgatggcttggaatttaatttattaaagtcaaattggagtttaaaaaaaaaaaaaaaaaaaaaaaaaaa

SEQ ID NO: 3825 - DNA, 6805 bp, Homo Sapiens
  NM_014809
gctgccgcgggcggtgggcggggatcccccgggggtgcaaccttgctccacctgtgctgccctcggcgggcctggctggccccgcgcagagcggcggcggcgctcgctgtcactgccggaggtgagagcgcagcagtagcttcagcctgtcttgggcttggtccagattcgctcctctggggctacgtcccggggaagaggaagcgaggattttgctggggtggggctgtacctcttaacagcaggtgcgcgcgcgagggtgtgaacgtgtgtgtgtgtgtgtgtgtgtgtgtgtgtgtgtgtgtgtgtgtgtgtaagacctgcgatgacgacgaggaggaacaagtgggacggcgagtgatgctcagggccagcagcaacgcatggggcgagcttcagtgtcgccagcagtgaccacagttcttgaggccaaatctggctcctaaaaaacatcaaaggaagcttgcaccaaactctcttcagggccgcctcagaagcctgccatcacccactgtgtggtgcacaatggcgccccccacaggtgtgctctcttcattgctgctgctggtgacaattgcaggttgtgcccgtaagcagtgcagcgaggggaggacatattccaatgcagtcatttcacctaacttggaaaccaccagaatcatgcgggtgtctcacaccttccctgtcgtagactgcacggccgcttgctgtgacctgtccagctgtgacctggcctggtggttcgagggccgctgctacctggtgagctgcccccacaaagagaactgtgagcccaagaagatgggccccatcaggtcttatctcacttttgtgctccggcctgttcagaggcctgcacagctgctggactatggggacatgatgctgaacaggggctccccctcggggatctggggggactcacctgaggatatcagaaaggacttgacctttctaggcaaagattggggcctagaggagatgtctgagtactcagatgactaccgggagctggagaaggacctcttgcaacccagtggcaagcaggagcccagagggagtgccgagtacacggactggggcctactgccgggcagcgagggggccttcaactcctctgttggagacagtcctgcggtgccagcggagacgcagcaggaccctgagctccattacctgaatgagtcggcttcaacccctgccccaaaactccctgagagaagtgtgttgcttcccttgccgactactccatcttcaggagaggtgttggagaaagaaaaggcttctcagctccaggaacaatccagcaacagctctggaaaagaggttctaatgccttcccatagtcttcctccggcaagcctggagctcagctcagtcaccgtggagaaaagcccagtgctcacagtcaccccggggagtacagagcacagcatcccaacacctcccactagcgcagccccctctgagtccaccccatctgagctacccatatctcctaccactgctcccaggacagtgaaagaacttacggtatcggctggagataacctaattataactttacccgacaatgaagttgaactgaaggcctttgttgcgccagcgccacctgtagaaacaacctacaactatgaatggaatttaataagccaccccacagactaccaaggtgaaataaaacaaggacacaagcaaactcttaacctctctcaattgtccgtcggactttatgtcttcaaagtcactgtttctagtgaaaacgcctttggagaaggatttgtcaatgtcactgttaagcctgccagaagagtcaacctgccacctgtagcagttgtttctccccaactgcaagagctcactttgcctttgacgtcagccctcattgatggcagccaaagtacagatgatactgaaatagtgagttatcattgggaagaaataaacgggcccttcatagaagagaagacttcagttgactctcccgtcttacgcttgtctaaccttgatcctggtaactatagtttcaggttgactgttacagactcggacggagccactaactctacaactgcagccctaatagtgaacaatgctgtggactacccaccagttgctaatgcaggaccaaatcacaccataactttgccccaaaactccatcactttgaatggaaaccagagcagtgacgatcaccagattgtcctctatgagtggtccctgggtcctgggagtgagggcaaacatgtggtcatgcagggagtacagacgccataccttcatttatctgcaatgcaggaaggagattatacatttcagctgaaggtgacagattcttcaaggcaacagtctactgctgtggtgactgtgattgtccagcctgaaaacaatagacctccagtggctgtggccggccctgataaagagctgatcttcccagtggaaagtgctaccctggatgggagcagcagcagcgatgaccacggcattgtcttctaccactgggagcacgtcagaggccccagtgcagtggagatggaaaatattgacaaagcaatagccactgtgactggtctccaggtggggacctaccacttccgtttgacagtgaaagaccagcagggactgagcagcacgtccaccctcactgtggctgtgaagaaggaaaataatagtcctcccagagcccgggctggtggcagacatgttcttgtgcttcccaataattccattactttggatggttcaaggtctactgatgaccaaagaattgtgtcctatctgtggatccgggatggccagagtccagcagctggagatgtcatcgatggctctgaccacagtgtggctctgcagcttacgaatctggtggagggggtgtacactttccacttgcgagtcaccgacagtcagggggcctcggacacagacactgccactgtggaagtgcagccagaccctaggaagagtggcctggtggagctgaccctgcaggttggtgttgggcagctgacagagcagcggaaggacacccttgtgaggcagctggctgtgctgctgaacgtgctggactcggacattaaggtccagaagattcgggcccactcggatctcagcaccgtgattgtgttttatgtacagagcaggccgcctttcaaggttctcaaagctgctgaagtggcccgaaatctgcacatgcggctctcaaaggagaaggctgacttcttgcttttcaaggtcttgagggttgatacagcaggttgccttctgaagtgttctggccatggtcactgcgaccccctcacaaagcgctgcatttgctctcacttatggatggagaaccttatacagcgttatatctgggatggagagagcaactgtgagtggagtatattctatgtgacagtgttggcttttactcttattgtgctaacaggaggtttcacttggctttgcatctgctgctgcaaaagacaaaaaaggactaaaatcaggaaaaaaacaaagtacaccatcctggataacatggatgaacaggaaagaatggaactgaggcccaaatatggtatcaagcaccgaagcacagagcacaactccagcctgatggtatccgagtctgagtttgacagtgaccaggacacaatcttcagccgagaaaagatggagagagggaatccaaaggtttccatgaatggttccatcagaaatggagcttccttcagttattgctcaaaggacagataatggcgcagttcattgtaaagtggaaggaccccttgaatccaagaccagtcagtgggagttacagcacaaaacccactcttttagaatagttcattgaccttcttccccagtgggttagatgtgtatccccacgtactaaaagaccggtttttgaaggcacaaaacaaaaactttgctcttttaactgagatgcttgttaatagaaataaaggctgggtaaaactctaaggtatatacttaaaagagttttgagtttttgtagctggcacaatctcatattaaagatgaacaacgatttctatctgtagaaccttagagaaggtgaatgaaacaaggttttaaaaagggatgatttctgtcttagctgctgtgattgcctctaaggaacagcattctaaacacggtttctcttgtaggacctgcagtcagatggctgtgtatgttaaaatagcttgtctaagaggcacgggccatctgtggaggtacggagtcttgcatgtagcaagctttctgtgctgacggcaacactcgcacagtgccaagccctcctggtttttaattctgtgctatgtcaatggcagttttcatctctctcaagaaagcagctgttggccattcaagagctaaggaagaatcgtattctaaggactgaggcaatagaaaggggaggaggagcttaatgccgtgcaggttgaaggtagcattgtaacattatcttttctttctctaagaaaaactacactgactcctctcggtgttgtttagcagtatagttctctaatgtaaacggatccccagtttacattaaatgcaatagaagtgattaattcattaagcatttattatgttctgtaggctgtgcgtttggactgccatagatagggataacgactcagcaattgtgtatatattccaaaactctgaaatacagtcagtcttaacttggatggcgtggttatgatactctggtccccgacaggtactttccaaaataacttgacatagatgtattcacttcatatgtttaaaaatacatttaagtttttctaccgaataaatcttatttcaaacatgaaagacaattaaaacattcccacccacaaagcagtactcccgagcaattaactggagttaattgtagcctgctacgttgactggttcagggtagttccccatccacccttggtcctgaggctggtggccttggtggtgcccttggcattttttgtgggaagattagaatgagagatagaaccagtgttgtggtaccaagtgtgagcacacctaaacaatatcctgttgcacaatgcttttttaacacatgggaaaactaggaatgcattgctgatgaagaagcaaggtatttaaacaccagggcaggagtgccagagaaaatgtttccccatgggttcttaaaaaaaattcagcttttaggtgcttttgtcatctcccgcagtattcatcctcatgggaccatcttatttttacttattgtaatttactggggaaaggcagaactaaaaagtgtgtcattttatttttaaaataattgctttgcttatgcctacactttctgtataactagccaattcaatactgtctatagtgttagaaggaaaatgtgatttttttttttaaccagtattgagcttcataagcctagaatctgccttatcaggtgaccagggttatggttgtttgcatgcaaatgtgaatttctggcataggggacagcagcccaaatgtaaagtcatcgggcgtaatgaggaagaagggagtgaacatttaccgctttatgtacataacatatgcagtttacatactcatttgatccttataatcaaccttgaagaggagatactatcattcttatgttgcagatagccctctgaaggcccagagaggttaaataacttcccagaggtcatggccaagaagtagtggctccaagaactgaatgcaaattttttaaactgtagagttctgctttccactaaacaaagaactcctgccttgatggatggagggcaaattctggtggaacttttgggccacctgaaagttctattcccaggactaagaggaatttcttttaatggatccagagagccaaggtcagagggagagatggcctgcatagtctcctgtggatcacacccgggccacccctccctctaggtttacagtggacttcttctgcccctcctccttttctgtccttggccatctcagcctggcctctctgatccttccatcacagaaggatcttgaatctctgggaaatcaaacatcacagtagtgatcagaaagtgagtcctgtcttgtcaccccatttctcatcagaacaaagcacgagatggaatgaccaaccagcattcttcatggtggactgcttatcattgaggatctttgggagataaagcacgctaagagctctggacagagaaaaacaggccctagaatatgggagtgggtgtttgtagggctcacaggctaacaagcactttagttgctggtttacattcaatgaaggaggattcatacccatggcattacaaggctaagcatgtgtatgactaaggaactatctgaaaaacatgcagcaaggtaagaaaatgtaccactcaacaagccagtgatgccaccttttgtgcgcggggaggagagtgactaccattgttttttgtgtgacaaagctatcatggactattttaatcttggttttattgcttaaaatatattatttttccctatgtgttgacaaggtatttctaatatcacactattaaatatatgcactaatctaaataaaggtgtctgtattttctgtaatgcttatttttagggggaaatttgttttctttatgcttcagggtagagggatttcccttgagtataggtcagcaaactgtggcctacagcctgtgtgtgcacgccccatgagccgaaaagtgggtcttatgttttcaaatggttaaaaataaataaaaaaatttgaaacatgtgaactatatgacattcagatttgtgttcataaataaagttttattggaacatatcc

SEQ ID NO: 3826 - DNA, 13473 bp, Homo Sapiens
  NM_014810
acagccgctgccgctggcgccgctcctcctccgtgtcagttgttgggctgtaatggcgactgggccgcccctgacgaagtgactcccgggccggggagcggggccagacctgcgccagagagaactgcagggagccgcagctcggggggtggcttgccctgagggaggggaggcagcctttccgccttgtcttccttcccagcggaccggcggatccccggagccggtgcgaggagggcacccggtgcgtccccggagcggggaggccaggccgggcagccctggggccggtcggggcggcgtcactgcaccctccgccaggctccgcgggatgcaccgtggtagccgagggcggaggcgacactctcaggtaaattggcaggatgaggagcagcaaatcaaaagaggtgcctttaccaaatccaaggaactctcaaagcaaggatactgttcaagcagatataaccacatcgtgggatgcactttctcaaaccaaggctgctctgagacacattgaaaataaattagaagtagcccctacaagtacagctgtgtgtgattctgtcatggataccaagaagtcttctacaagtgctactcgaaaaataagtagaaaagatggtagatacctggatgattcttgggttaatgctccaatctccaaatccactaaatcacgaaaagagaaatctcgtagtcctctcagggccaccaccctggagagtaatgtgaagaaaaataatcgtgtggaatttcgtgaacctttggtttcttatagggaaatccatggtgcaccttccaatttcagttccagccatctggaatcaaagcacgtatactgtgtagatgttaatgaagaaaagactgagagcggtaactggatgataggcagtcgagaagaacggaatatacggagctgtgattttgagagctcccaatcatctgtcatcaatgatacagttgttaggtttttaaatgatcgaccagcaattgatgcattgcaaaattctgaatgtttgattaggatgggagcttctatgagaactgaggaagaaatgcctaacagaacaaaaggaagtgagaataatttgaagctttctgtgaataacatggcccatgatactgatccaaaagcgttacgactaactgactcttctccatcctctactagtacttctaattcccaaagattagatattctaaagcggcgacaacatgatgtcaaactggaaaaacttaaggaacggattagaaaacagtgggaacactcagaagaaacaaatggccggggccagaagctgggtcatattgaccatccagtaatggttgttaatgttgataactcagtaacagcaaaagtcagaaaagtggcaacagcaccacctgctccagcatataaaggtttcaacccttcagagaccaagattcgaacacctgatgggaaagtgtggcaggaggctgagtttcaaaacatgagtagagaactgtatcgagatttagcacttcactttgcagatgatatttctataaaggagaaacctgctgaaaaaagtaaagagaagaaagtagtcaagccagtacgaaaagtccaaaaagtagcacagttatcaagtacagaatgcagaacaggtagtagtcatcttataagtacatcttcttggcgagatggacaaaaattagtaaagaagattctgggacctgctcccagaatggagccaaaagagcaaagaacagcatcaagtgacagaggtggaagagaaagaactgctaaatctgggggtcacattggaagagcagaatctgatcccaggttggacgttttacatagacatcttcaaagaaactcagaacgttcgagaagtaaatctcggtctgaaaataatataaagaaactagcttcatctcttccagataataagcaggaggaaaatactgccttaaataaggactttttacctattgaaattcgtggcattcttgatgacctacagctggattctacagctcacactgcaaagcaagatactgtagagttacagaaccagaagtcatcagcaccagtacatgctcctaggagtcacagcccagtaaaaagaaaacctgacaaaataacagctaatgaagatccccctgttatttccaaaaggcgccactatgacacagatgaggtacgacagtacattgttaggcagcaggaggaaaggaagagaaagcaaaatgaagagaagaaggctcaaaaggaggctacagaacagaaaaacaaacgattacaagagctctaccggaagcagaaggaagcctttactaaagtaaaaaatgtccctccttctgagccatcagcaactaggcgactacaggaaacttactccaaattgctactagaaaagaccttgcttgaagagccatctcatcaacatgttacgcaggaaacacaggccaaaccagggtatcagccatctggagaatctgacaaagaaaacaaagtacaggaacgtcccccaagtgcatcttccagtagtgacatgtctctctcagaacctccacagcctcttgcaagaaaagacttgatggaatctacatggatgcagcctgaaagattgagcccacaagttcaccattctcaaccacagccttttgctggaacagctggaagtttactctcccatctcttgagtttagagcatgtaggaattttgcataaggattttgaatctattttaccaaccaggaagaatcataatatggcttcaaggccattaacttttacacctcaaccatatgtgacctcaccagctgcttatacagatgccttgttaaaacctagtgccagccaatataagagtaaactggatcgtattgaagccttgaaagcaacagctgcttctttgtccagcagaattgaaagtgaagccaagaaattagctggggccagcattaactatgggtcagcatggaacactgagtatgatgtgcagcaggcacctcaagaagatggaccttggaccaaggctgtaactccacctgtgaaagatgataatgaagatgttttctctgccagaattcagaagatgctgggaagctgtgtatctcatgcaacttttgatgatgatcttcctggtgtaggcaatcttagtgaatttaaaaagcttcctgagatgataagaccacagagtgccatatcaagctttagagtgagatcccctggtcccaaaccagaagggctactggcacagttatgtaaaaggcagactgactcttctagctctgatatgcaagcctgttctcaagacaaagccaaaatatctcttggttccagcatagattcagtcagtgaagggcctcttcttagtgaggggagtctctctgaagaagagggagaccaggatggacagccccttttgaaagtagcagaaattttaaaagaaaaggaattttgtcctggagaaagaaatagttatgaacccatcaaagagtttcagaaagaagctgaaaaattcttgccactttttgggcacataggtggtacacaaagcaaaggaccatgggaagaattggcaaagggaagtccacatagcgtcattaatatttttacaaaatcctatcagttatatggaaaagggtttgaagacaagttggacagaggaacatcaacatcacggcctttgaatgccaccgcaactcctctaagtggtgtttcatatgaagatgattttgtctcctctccagggactgggacttcgacagaaaaaaaatcaactcttgaacctcatagcactttaagccctcaggaggaccattctaacagaaagtctgcctatgatccttcctctgtggatgttacctcccagcattcatcaggagcccagtctgctgcatcgtctcgttcatctacttcttctaaaggaaagaaaggaaaaaaggaaaagacagaatggttggattcattcactggaaatgttcagaactcacttcttgatgaggaaaaagcagaacgtggctcccatcaaggaaagaaatctgggaccagcagcaaactttctgttaaagattttgagcagactcttgatacagatagcactttggaggatctttctggacattctgtgagtgtctcatcagataagggaagatctcagaaaactccaacttctcccctgtcaccaagttcccagaaatcattgcagtttgacgttgcaggaacttcttcagaaagatctaagtcgtcagtaatgcctccaactataacaggatttaagcctaatgcacctctcactgatctgaacccggcagccagcagaacaacgacagagaacatggctccaataccaggttctaagcgcttttctcctgctggcctccatcatcgtatggcagcagaactcagttatctgaacgccattgaggagtcggtgcgccaactgtcagatgtagaaagagttagaggcatttcacttgctcagcaggagagtgtgtctctagctcagataataaaggcacaacagcaacgccatgaaagagacttggccctcttgaaactaaaggctgaacaagaggctctggagagtcagagacaattagaagaaacccgaaacaaagcagctcaggtccatgcagaatcattacagcaggtggttcaatcacaacgggaagtaactgaagtcctgcaggaagcaacgtgtaaaatagcagctcagcagtcagaaactgctcgcctcaccacagacgcagcacgtcaaatctgtgagatggcagagttgactagaactcatatctcagatgctgtcgtggcttcaggagctccccttgcaatactgtatgaccaccaacggcagcaccttccagactttgtgaaacagctgaggaccagaactgaaacagataggaaaagtccatctgtttcactctctcagagtaaagaagggacccttgactcaaagcatcagaagtattctgcttcatatgatagttattctgagtcttcaggatacaagaatcatgatagaagaagtagcagtggtagcagccgccaagaaagtccttcagttccatcttgtaaggaaaatgagaagaaacttaatggtgaaaagatagagagttccattgatgaacaggttcagactgctgcagatgattctctacgaagtgatagtgttccatctcttcctgatgaaaaagactcaacgtctattgcaacagaatattctctgaaatttgatgaatccatgacagaagatgaaatagaagaacaatcatttcgatcattactaccttcagagagtcaccgcagatttaacatggaaaagagaagaggtcatcatgatgactctgatgaagaagcttctccagaaaaaactacactgtctactgccaaggaactgaacatgccattctcaggaggacaagatagcttttctaaatttactatggagatggttcgacagtatatgaaagaggaagaaatgagggcagctcaccagtcttcactcctgcgtctccgtgaaaaggccttgaaggagaagactaaggctgaattggcctggttagagcatcaaaaaaaacatctacgagacaaaggagaggatgataaaatgcccccgctccggaagaaacagcgtggtttgcttttaaggttgcagcaagaaaaggcagaaataaaacgtcttcaagaagccaataaggcagctcggaaggaaagacagctgattcttaaacagcaggaggagatagaaaagatccgacagaccaccataaaactacaggagaaattgaagtctgcaggggagagtaaattggactctcatagtgatgatgatacaaaggataataaggcaaccagtcctggtccaactgacttggagacccgcagtccttctcccatttcaatctccagcagtgaaactagcagcattatgcagaaactgaagaaaatgagaagccgcatggatgaaaagtttctgacaaagcgggagcaaaaattaatgcaacggcgacaacatgcagaggagctcctagagtggaagcgacgtttagatgcagaagaagcagaaattcgtcaaatggaaaaacaagctttggctgcctgggacaaagaattaataaaacccaaaactcctaagaaagaactggaggaccagagaacagaacagaaagaaatagcaagtgaagaggaatctccagtacctctgtactctcatctaaacagtgaaagctccattccagaagaattaggcagccctgctgttgaatatgtaccatccgagtctataggacaggagcagccagggagtccagatcacagtatacttactgaagaaatgatttgttcacaggaactagaatcttctacctctcctagtaaacattcacttcccaaaagctgcacatctgtgtcaaagcaggagtctagcaaaggaagtcataggactggaggacaatgtcacctgcctatcaagtcccatcagcactgttatagttggtcagatgagtcattatctatgacacagtcagaaactacatctgaccagagtgatattgaaggtaggatcagagctctgaaggatgagttgcggaaaagaaaatcagttgtgaaccagctgaagaaggaacagaaaaaaaggcaaaaggaaagactgaaagcccaagaagccagtctgatcaagcagttagagtcatatgatgaatttattaagaaaactgaagccgagcttagccaagatttggaaacatcaccaacagccaagcctcagattaaaacgctctcctcagcttctgaaaaacccaagatcaaacccctcacaccactacacagatctgaaacggcaaagaattggaaatcactaacagagtcagaacgttccagaggatccctggagtctattgctgaacatgttgatgcttcactgtctggttctgagagatcagtatcagaaaggtctttatctgcatatgcaaagagagtaaatgaatgggacagtcgaacagaagattttcagaccccatctccagttctcagatcatcaaggaaaatcagagaagaatctggagattctctagaaaatgtacctgcattacatcttctcaaagaattaaatgccactagtagaattcttgatatgtcagatggcaaggttggagaatctagtaaaaaatcagaaataaaagaaatagagtatacaaaattgaagaagagtaagattgaagatgccttttctaaagaaggtaaatctgatgtcttactgaaattagtcctagaacagggagattcatctgaaattctttcaaagaaagatcttcctttagattctgaaaatgttcagaaagacctagttggattagctattgaaaatctccataaaagtgaggaaatgttgaaagagagacagtcagatcaagatatgaatcatagtccaaacatccaatcaggaaaagacattcacgaacaaaagaacacaaaggaaaaagatttgtcttggtcagaacatctttttgctcctaaagagataccatactctgaagattttgaagtgtcttctttcaagaaagaaatttcagctgaattgtacaaagatgattttgaggtgtcatctttgctgtcactcaggaaagactctcagtcttgcagagataagccacagccaatgaggagctctacaagtggagccactagctttggtagtaatgaggaaatcagtgagtgcctaagtgagaaaagcctttctatccatagcaatgttcattctgacaggctgttggaactcaagtcccctactgagctgatgaaaagtaaggagcgcagtgatgtggagcatgaacagcaagttactgaatccccttccttggcttcagttcctactgcagacgagttatttgatttccacattggtgatagggtgttgattggaaatgttcagccaggaattcttcgattcaaaggtgagactagttttgctaaaggattttgggccggagtggagttagataaacctgaaggaaataacaatggaacatatgatggtattgcatattttgagtgcaaagaaaagcatggtatttttgctcctcctcaaaaaatatctcacattccagaaaactttgatgactatgtagacattaatgaagatgaagactgttactcagatgaacgatatcagtgctataatcaagagcaaaatgatacagagggtccaaaagacagagaaaaggatgtcagtgaatatttttatgagaaatccctacctagtgtgaatgatatagaagcctcagttaatagaagtagaagccttaaaatagaaacagacaatgtacaggacatttctggggtacttgaagcccatgttcaccagcagtcttcagtggattcacagatttcttcaaaggaaaacaaagacctcatttctgatgccacagaaaaggtttccatcgctgcagaagatgacactttagacaataccttttccgaagaattggagaagcaacagcagtttacagaagaggaagacaacctatatgctgaagcttcagaaaagctttgtacaccacttctggatcttttaacaagagaaaaaaaccaactggaagcccagctgaagtcatcactaaatgaggaaaaaaagtcaaaacaacaactggaaaaaatcagcttactgacagacagtttactaaaagtctttgtaaaggacacagtcaatcaactacaacaaatcaaaaaaaccagggatgagaaaatccagcttagcaatcaggagcttcttggtgatgaccaaaagaaagtaacaccccaagacctatcccaaaatgttgaggaacagtcgccaagtatttcaggttgcttcttaagttctgaattggaagatgaaaaagaagagatttcctctccagatatgtgtcccagaccggagagcccagtatttggtgccagtgggcaggaagaacttgctaagagacttgctgaacttgaactcagccgggagttcctgagcgcgttaggagatgatcaagactggtttgatgaagactttggtttgagctcttctcacaagatccaaaaaaataaggcagaagaaaccattgtacctctaatggcagaacctaaaagagtaacccaacaaccatgtgaaacattattggcagtcccccatactgcagaagaagtagagattcttgtacataatgcagcagaagaactttggaaatggaaagaattaggccacgatcttcatagcatcagtattcctacaaaactgcttggctgtgccagtaaaggtctagatatagaaagcactagtaaaagggtctacaaacaggcggtttttgatttaacaaaagagatttttgaggaaatatttgctgaggatcccaacttaaatcaacctgtctggatgaagccatgtagaatcaactctagttatttccgacgagtgaaaaatccaaataaccttgatgaaatcaagagcttcatagcaagtgaagtactcaagttgttcagtcttaaaaaggagccaaaccacaaaacagattggcagaaaatgatgaaatttggaagaaagaaaagagaccgagtggatcatatcctggttcaggagctccatgaggaggaggcacagtgggtgaactatgatgaggatgagttgtgtgtgaaaatgcagctagccgacgggatctttgagaccctgatcaaagatactattgatgttctgaatcagatcagtgaaaagcaggggagaatgctacttgtgtgacatcttgcaaataaatcgaacgctgagtgctaatgtgagtcctgggcctttctgcctcctgatgtacacccatcgccatcatagcaagagtgcttctggaccttgtacttattcttaaagactaccagtatggagttcataggacaatgtggtacacctggtattacagcctttgcctttcgagactatccactggattaatgggttattttcagtgggcagggttgcacagtgtaatcctacaccttttgctaacacccctactaggtcccagagggccagaaacacctgacttacctctgagtttagactagggtatcacttctttgagtctgaagtcaagtgagagaggtatagataaatgcatcacatcacttttgaaatgtaattctggtctataccatggaagtcataaatggacattatagtctctaaacagtattaaacccttaaccacttctaaaataggcaagctcaataatgtctgccaacttcacattctggagtttatttcatttctttttgaagaccattttcttccattattgtagttgagcagcaccaagtggactgtcaggctaacaggaataagtggtagccttgctttctgagcaccatctaaagaattttaaacctctgcattatgtttagtgttctctgtgtgggcatgaaaacaaagaaatgcccctactgaagactgggctcaaaggaccaatgcagggctggttcttttaccccttggtttactcctgcacttgtcttactcattctgaatctctaccagctgctcccagaatcacagatactcaggaccatctcaggcatccaggcatggcaaagtggaaataattcattttggcctgcaaaccttcaactcccatctttccccaagaagtcagagatgctgttacttgaatgatttaggaaatgagtgtgtgcaccaaagacaaaaagatattgtctattgtttgtgtgcttgttttgcgctatggaacattttttaatttattttaagataaattattaagttgaaaatgtgtgtccctattcagaagtgaaagattcatcttgtaatagttaaacctccatcttgaagcttctatggttcatagtctttgcacaggaacctgtggttttaacaaaccaatacacatattgaagaagtcattttaattcagtgaaacgaagatgggcttttccagatcacctgcaatagcagcagtgggataaaatgatttaaaaacactgtacaatttaactctgcctctcttgcagcattgcttctcacaactattacctgcatctgaaaaaaaatctatagactccagctgctacattagagcataagagatgctctcctgggacctcagtaccctgccttcttgactggtttccgttcatcagtcctgtccctcttcaagtaatctagaagaatgtggatactcttaggcgtgaatgtaaatgccttaatattgaaggtcctggttagaagcatgatacaagacatctactggattcatatttacaaatatcctggaatgttatagcttcaaagtatattagaaaaaccccaaagatggtataatctttaagtgtgcacgttcgtttatttctgcatcttccctccaaacttgcctttgcatcttaaatatttcactatgcacactcccattcctcttgggtttcatcttgtcgtttaagaaatgtactgaaataatcattggaatatttgcattttgcacaatgactggtatgatagctcttgacaaataaggaaagcactgaaatgttgtgattgggtctcgggaaatgctcagattgatgtcttaccagcatttcttctgggcttgtgatgttgagctgtagtcttgtagccataatgagcaaattgactaagagaagcaaaggtttcttggggttattaaccagtagtgtggaaatactagttttatgtggccaaggaaaagcaaaggcttttcttttcagtttgtgttatttggaagacagaaaaacatcttgtctacatcctttggctgtttgtaggatcacgttgtccttacgatactgaaactttacagctgctgtaaattttttataaatgaatttcaaaatgttataatgggactgtaggttgtttttctacatcttcattatttggacctaaaaccagtttttaataagaaagtttatctttactctttctgaaattatgactccagaaaaagaaaaaaaaaatacaagtcatggaatcagcaatctggtaagaaatgctgccaagaatgtggcagtagctgtcctgacagactccaactgtctttactatctgaagaatcctaggctccacatgagaggcagaaatggatcagtcttattcttttctagaaatggttatctgtagtttggtagcaaaaaaaaagaaaaaagaatccataattagcagatttcttattaactatttggatctaattgaaatggctttattcttaggattaagaaagatagatgtggatacccagccactcgttccatattggtatctttttaaatcagctctgcctcttaatcaagaacctaaatattccctctttctaatctttgttccttctccctacaccctcatcctctttcactcttccttcataattcctctaagaaaaatatctttgcatcagcagtaatatcttttagaatagcactatcagaatttagcagtaaaccaacatacaggcttcagatttacttctgagtccaaaacaatttgtgctatccagggtagttaactctgggttaaacaagtacagggtatagattccctcttcaggtctacacaggaatttttaccatagggaaaagtggggagagctcaaacgtagttaataaggaaggtaatttgtttttcttttacctaaaagaaaagaaaattccttctgtgactacaggtctctgagaaattatctttcaaaagagatttcattgctcataagagtgttgtggcctattgataaaaacaattttgttcagtttcttgtcttgaaaaaaaagtggccttagctttttgcaatacttgaataaagtgtgtactcgcaaaagaatttctgtagcacagcattagagactcataacttttctgcaagaaatacaaacttacatcttccttttactaccttaagaatactagtgaataaaacattaattcaaagagcaaattatagaaactacaatgacatttaatgcaaattgtaggaatttacatgtttacaaatcatcttcaactggttgtgcagcaattcaataaaatatctttgtattataaaaatgtgaagaaaaaatgtaaactgatgtaaaggaggtactgtcattttaattaacctatgtttaatagcttttccttctggactttgcaaagccttcttggcaaacacattgcaaagcattctctgggaggttcagcctccttgtgtgtactgtactgtgcagacatgaaaaaataaacccgtttactgtgtgcgtgtaaatagcctggtcatcaggccattttcagccaatagtcacatccagtgcaattttgcaccgaacacttaagggtgtggtttgtaagtacgatctgtaaaataactgggatgaattcccatgtatacctgtgtaaatagatttgttaactgaaatatactttaagaaagataaaatctgtaaataaactgatttataaattaatttcaaaaaaaaaaaaaaaaaa

SEQ ID NO: 3827 - DNA, 4015 bp, Homo Sapiens
  NM_014813
gtccgtcaggccgtgtgtcccaggccgtcgaccccgctgtcgcgctgcgtctgctccttgcatgcctttagatggtacagccttcagccggggcttcgggagacagtgcagccaccgagcatctctgctgagcttctccgccgatcctccttttctagcaggcagctcttctaggccacgtccaggtcgagggggaaaatggcgccggcgcccctaggcgtcccggaggagcagttgctggggtgtcgatctagagtgctttctcggttactcttcattgcccagaccgctctcctcctgttgcccgccgccggagcaggtctctgccccgcgccctgctcctgccgcattcctctcctggactgcagtcgcaggaaattgcccgcaccgagctggagggcgctgtcgggcttgctgccccccgacaccgctatcctggatttcagtcataatcggttgtctaactggaacatcagcttggaatcacaaacattacaggaagtgaaaatgaattacaatgaactaacagaaatcccgtattttggagaacctacatctaatattactctactttcattagtccataatataatcccagaaataaatgcacaggcactccagttttaccctgctctggagagtttagacctcagctcaaatataatatcagaaatcaagacatcttcatttcctcgcatgcagcttaaatacctgaatttaagtaataacagaataaccaccttggaggctggttgcttcgataatttatcaagttccttattagtggtaaagttaaaccgtaaccgaatgagcatgattccacctaagatcttcaagctgcctcacctccaattcttggaacttaaaagaaacagaattaaaattgtggaaggtcttacattccaagggcttgactccttaagatctttgaaaatgcagcggaatggaattagcaaacttaaggatggagcattttttggcttgaataacatggaagaactagaactggaacacaacaaccttacacgagtaaacaaggggtggttgtatggcttgcgaatgttacagcagctctatgtgagccagaatgctattgaaagaatcagccctgatgcatgggagttctgccaaagactatccgaacttgatttgtcctataaccagctgacccgcctggatgaatctgcctttgtgggtctgagcttattggagagattgaatttaggagacaacagagtcactcatattgctgatggtgtatttagatttctttccaatcttcagacattagacttaagaaacaatgaaatttcatgggccatagaagatgctagtgaagcctttgctggactcacaagtctcactaaactaatcttacaaggaaaccagattaagtcaattacaaagaaagcattcattggtcttgaatcccttgagcatctagatttgaacaataatgctataatgtctatccaagaaaatgctttttctcagactcatttaaaagaactgattctgaacacaagcagtttgctctgtgactgccatttgaagtggctacttcaatggttggttgataataactttcaacattctgtgaatgtaagctgtgcacaccctgaatggctagcagggcaaagcatcctgaatgtggatctgaaagattttgtctgtgatgattttctcaagccacagataaggacacatcctgaaaccataattgctctaagaggcatgaatgtgactctgacgtgcactgcagtgagcagcagtgattcacccatgtccactgtgtggcgcaaagacagtgaaatcctgtatgacgtggatactgagaattttgttcgttattggcagcaagctggagaagctctggaatatactagtatcttacatcttttcaatgtgaatttcacagatgaaggaaaatatcagtgtattgttactaatcactttggttctaattattctcagaaagccaaactgactgtaaatgagatgccatcttttctgaaaacgccaatggatctgactattcgcactggtgccatggccagattagaatgtgctgcagagggacaccctgcacctcagatttcctggcagaaagatggtggtactgactttcctgcggctcgagaaagacgcatgcacgtcatgcccgaggatgacgtcttctttattgccaatgtgaaaatagaagatatgggaatctatagctgcatggcacaaaatacagcaggaggtctctcagcaaatgcttccctaacagtgttagagacaccctcatttattagacccctggaggataagacagtaacccgaggtgaaactgcggtgttacagtgcatagctggagggagtcctgcccctcgtctcaactggactaaagatgatgggcctttgctggtgacagaacgacatttctttgctgcagccaatcagcttctcatcattgtagatgccgggctagaagatgctgggaaatatacctgcattatgtctaacacccttgggacagaacgtggccacatttacctaaatgtcatttcatcccccaattgtgactcttcccagagtagcattgggcatgaagatgatggctggaccacagttggcattgtcatcattgttgtggtctgctgtgttgttggcacttctttgatctgggtcattgttatttaccacatgagaaggaaaaatgaagactatagtatcacaaacacagaggagctcaatctgcctgcagacattcccagctacttgtcttcccaaggaacgctgtctgagccacaggaaggctacagcaactctgaggcaggcagtcatcagcaacttatgcctcctgccaatggatatatacacaaaggcactgacggtggcactggtacccgggtgatttgctcagattgttatgacaatgccaacatctactccaggacccgagaatactgtccatacacctatattgctgaggaggacgttcttgatcagacactgtccagcctcatggtccaaatgcctaaagagacatatttagtacatcctccccaggatactactgccctagagagcctgataccgtcagccaacagagagccatctgcctttcccaccaaccatgagaggataagtgagaagaaacttccctccacacagatgagcggtgaaacattgcagcggcccgtgtggaacataaacagagaactaggcctgcctcatcctcctttttcccagcagccagtccatgagtcaccacaacttcatcaaaatgagggcctggcagggagagagccagactgttctgcttcttccatgtcctgccacaggttacaggatcatgcttttgattttagtaggactcggaacattcaagatggtagtgagggcacatgaaactcacttcaggatgaaatctgggcagagacttattaattaattttgcatttactacctcagagctcagaagaaactccgaagtcagcatttgctttactctttctttatgattgcatctgaccgcaccaaggtgggccatgcgttgtttggtcttatacctgatgaagaaatggcaacagctgacagaaatgggtacagctcatcaaaaatgtgcagcaccggcagagggaagatacggggcaaatgtgcttcctgatgcttccatggggatgtgctctggtgtgcatctgcttgtcaggaagagtcacattgctgcttaacatgctggattgccctagtcttcagaatggtcctgagaaaacatcactacttcgatgttctactttgctttccaaggagcaaaaataactttggagccttctgggaagtgtgcctgggattcttcagtggtttcaggcagatagttgagactggggctttgatattcaaggtctttggcaagaatcccaggcttgaccaactggtaccaggtcaaagatttttgtattcttgtgaatttttttttttgtccctattgcccagggatgtcattgtaaatatatgtgcatttataaat

SEQ ID NO: 3828 - DNA, 1308 bp, Homo Sapiens
  NM_014814
gtcagccgctgtccccttagccgcgatgccgctggagaacctggaggaggagggtctgcccaagaaccccgacttgcgtatcgcgcagctgcgcttcctgctcagcctgcccgagcaccgcggagacgctgccgtgcgcgacgagctgatggcggccgtccgcgataacaacatggctccttactatgaagccttgtgcaaatccctcgactggcagatagacgtggacctactcaataaaatgaagaaggcaaatgaagatgagttgaagcgtttggatgaggagctggaagatgcagagaagaatctaggagagagcgaaattcgcgatgcaatgatggcaaaggccgagtacctctgccggataggtgacaaagagggagctctgacagcctttcgcaagacatatgacaaaactgtggccctgggtcaccgattggatattgtattctatctccttaggattggcttattttatatggataatgatctcatcacacgaaacacagaaaaggccaaaagcttaatagaagaaggaggagactgggacaggagaaaccgcctaaaagtgtatcagggtctttattgtgtggctattcgtgatttcaaacaggcagctgaactcttccttgacactgtttcaacatttacatcctatgaactcatggattataaaacatttgtgacttatactgtctatgtcagtatgattgccttagaaagaccagatctcagggaaaaggtcattaaaggagcagagattcttgaagtgttgcacagtcttccagcagttcggcagtatctgttttcactctatgaatgccgttactctgttttcttccaatcattagcggttgtggaacaggaaatgaaaaaggactggctttttgcccctcattatcgatactatgtaagagaaatgagaattcatgcatacagtcagctgctggaatcatataggtcattaacccttggctatatggcagaagcgtttggtgttggtgtggaattcattgatcaggaactgtccaggtttattgctgccgggagactacactgcaaaatagataaagtgaatgaaatagtagaaaccaacagacctgatagcaagaactggcagtaccaagaaactatcaagaaaggagatctgctactaaacagagttcaaaaactttccagagtaattaatatgtaaagccatgtaactaacaaaggatttgctttagagataattatttggaatttttatagcttacttcacaatgtgcccaggtcagctgtataaaataaatactgcattgttgtttc

SEQ ID NO: 3829 - DNA, 3735 bp, Homo Sapiens
  NM_014815
ctccctcgagtccctgagtctctgtagtgcctcagctcctggatgtcctcccttaaaggagaagaacaatgcgggccgactagacgagtcccttagtttcctcgccggcgcagacaaatacggtttcagtccaaggaactaccattcccagaagacagcggggcgttccttgctgcatttctattggttggcgtttgttactcccagccaatagaaagtgagcttcttgacaagtgccaaaatggcgatgcctaccacctagaactggattgtgcgctggccgccaccgctgccacctgctcagagtgaaataatgaaggtggtcaacctgaagcaagccattttgcaagcctggaaggagcgctggagtgactaccaatgggcaatcaacatgaagaaattctttcctaaaggagccacctgggatattctcaacctggcagatgcgttactagagcaggccatgattggaccatcccccaatcctctcatcttgtcctacctgaagtatgccattagttcccagatggtgtcctactcttctgtcctcacagccatcagtaagtttgatgacttttctcgggacctgtgtgtccaggcattgctggacatcatggacatgttttgtgaccgtctgagctgtcacggcaaagcagaggaatgcatcggactgtgccgagcccttcttagcgccctccactggctgctgcgctgcacggcagcctctgcagagcggctgcgggaggggctggaggccggcactccagccgctggggagaagcagcttgccatgtgccttcagcgcctggagaaaaccctcagcagcaccaagaaccgggccctgctgcacatcgccaaactagaggaggcctcttcttggactgccatcgagcattctctcttgaaacttggagagatcctggccaatctcagcaacccgcagctccggagtcaggccgagcagtgtggcaccctcattaggagcatccccacgatgctgtctgtgcatgcggagcagatgcacaagaccggcttccccactgtccacgccgtgatcctgctcgagggcaccatgaacctgacaggcgagacgcagtccctggtggagcagctgacgatggtgaagcgcatgcagcatatccccaccccactttttgtcctggagatctggaaagcttgcttcgtggggctcattgagtctcccgagggtacggaggagctcaagtggacagctttcactttcctcaagattccacaggttttggtgaagttgaagaagtactctcatggagacaaggacttcactgaggatgtcaactgtgcttttgagttcctgctgaagctcacccccttgttggacaaagctgaccagcgctgcaactgtgactgtacaaacttcctgctccaagaatgtggcaagcaggggcttctgtctgaggccagcgtcaacaaccttatggctaagcgcaaagcggaccgagagcacgcaccccagcagaaatcgggagagaatgccaacatccagcccaacatccagctgatcctccgggcggagcccactgtcacaaacatcctcaagacgatggatgcagaccactctaagtcaccggagggactgctgggagtcctgggccacatgctgtccgggaagagtctggacttgctgctggctgccgccgccgccactggaaagctgaaatccttcgcccggaaattcatcaatttgaatgaattcacaacctatggcagcgaagaaagcaccaaaccggcctccgtccgggccctgctgtttgacatctccttcctcatgctgtgccatgtggcccagacctatggttcagaggtgattctgtccgagtcgcgcacaggagctgaggtgcccttcttcgagacctggatgcagacctgcatgcctgaggagggcaagatcctgaaccctgaccacccctgcttccgccccgactccaccaaagtggagtccctggtggccctgctcaacaactcctcggagatgaagctagtgcagatgaagtggcatgaggcctgtctcagcatctcagccgccatcttggaaatcctcaatgcctgggagaatggggtcctggccttcgagtccatccagaaaatcactgataacatcaaagggaaggtatgcagtctggcggtgtgtgctgtggcttggcttgtggcccacgtccggatgctggggctggatgagcgtgagaagtcgctgcagatgatccgccagctggcagggccactgtttagtgagaacaccctgcagttctacaatgagagggtggtgatcatgaactcgatcctggagcgcatgtgtgccgacgtgctgcagcagacagccacgcagatcaagtttccctccaccggggtggacacaatgccctactggaacctgctgccccccaagcggcccatcaaagaggtgctgacggacatttttgccaaggtgctggagaagggctgggtggacagccgctccatccacatctttgacaccctgctgcacatgggcggcgtctactggttctgcaacaacctgattaaggagctgctgaaggagacgcggaaggagcacacgctgcgggcagtggagctgctctactccatcttctgcctggacatgcagcaagtgaccctggtcctgctgggccacatcctacctggcctgctcactgactcctccaagtggcacagcctcatggaccccccgggcactgctcttgccaagctggccgtgtggtgtgccctcagttcctactcctcccacaagggacaggcgtccacccgccagaagaagagacaccgcgaagacattgaggattatatcagcctcttccccctggacgatgtgcagccttcgaagttgatgcgactgctgagctctaatgaggacgatgccaacatcctttcgagccccacagaccgatccatgagcagctccctctcagcctctcagctccacacggtcaacatgcgggaccctctgaaccgagtcctggccaacctgttcctgctcatctcctccatcctggggtctcgcaccgctggcccccacacccagttcgtgcagtggttcatggaggagtgtgtggactgcctggagcagggtggccgtggcagcgtcctgcagttcatgcccttcaccaccgtgtcggaactggtgaaggtgtcagccatgtccagccccaaggtggttctggccatcacggacctcagcctgcccctgggccgccaggtggctgctaaagccattgctgcactctgaggggcttggcatggccgcagtgggggctggggactggcgcagccccaggcgcctccaagggaagcagtgaggaaagatgaggcatcgtgcctcacatccgctccacatggtgcaagagcctctagcggcttccagttccccgctcctgactcctgacctccaggatgtctcccggtttcttctttcaaaatttcctctccatctgctggcacctgaggagagtgagcagcctggaccacaagcccagtggtcacccctgtgtgcgcccgccccagcccaggagtagtcttacctctgaggaactttctagatgcaaagtgtgtatgtgtgtgtgtgtgtgtgtgtgtgtgtgtttgtgtgtattttgtaatatgtgagggaaatctaccttcgttcatgtataaataaagctcctcgtggctccctttgtgaaaaaaaaaaaaaaaaaaaaa

SEQ ID NO: 3830 - DNA, 4878 bp, Homo Sapiens
  NM_014819
accgccgccgccgccgccacagccgccagccgcttcgcgttcggcgggggaggagttggaggcggagaagaaggcggtggtggcgggtggaggttcgagcgctgttctcgctccggagccgctgcacatttcggaatcttctgcggcttgtccatagtgtgaataaaaactaaatcacatctataattctactgaactggtcacacagacgctgccatatatgtcacagtacactgaaaaggagccagcagcaatggaccaagaatctggtaaggctgtctggcccaaaccagcaggagggtatcagacaattacaggcaggagatatggaagaagacatgcttatgtcagttttaaaccatgtatgaccagacatgaaagaagcttaggtcgggctggtgatgactatgaagtgttggaactagatgatgttccaaaggaaaattcctcaggttccagtcctttggatcaagttgattcttctttacccagtgaacctatatttgaaaaaagtgaaacagaaattcccacttgtggttcagcattgaatcaaaccactgagagcagtcaatcctttgttgcagtacatcacagtgaggaaggcagggataccttaggaagcagtacaaatcttcataatcactctgagggagagtatattccaggagcttgtagtgcttcaagtgtccaaaatggaattgcattggttcatacagactcttatgatccagatggcaaacatggagaagataatgaccatcttcaactttctgcagaagtcgtggaaggtagtagataccaggaatcattaggcaatacagtatttgagttggaaaacagagaggcagaggcatacactggtctttcaccaccagttccctcatttaactgtgaagtaagagatgagtttgaagagttagattctgtaccattagtgaaaagttctgctggtgatactgagtttgtccatcagaatagccaggaaattcagaggtcttctcaagatgaaatggttagtacgaaacaacaaaataatactagccaggaaagacagacagaacattcacctgaagatgcagcctgtggtccagggcatatttgtagtgaacaaaataccaatgatagggaaaagaaccatggaagttctcctgaacaggtagtgaggccaaaagttagaaaactgataagttcaagccaggtggaccaagaaacaggttttaataggcatgaggcgaaacaaagaagtgttcaaagatggagagaggctttggaagttgaggaaagtggctcagatgacctcttaataaaatgtgaagaatatgatggagagcatgactgtatgttcttggatccaccatactcaagagttattacacaaagggaaacagaaaataaccaaatgacatcagaaagtggagccacagcaggaaggcaagaggtggataacaccttttggaatggctgtggagattattaccaactctatgacaaagatgaagatagttctgaatgcagtgatggggaatggtctgcttctttgcctcatcgattttctggtacagaaaaagatcaatcctcaagtgatgaaagctgggagactctgccaggaaaagatgagaatgaacctgagctacaaagtgatagcagtggccctgaagaagaaaaccaagaattatctcttcaggaaggggaacagacatccttggaagagggagaaattccttggttacagtacaatgaagtcaatgaaagcagcagtgatgagggaaatgaacctgccaatgaatttgcacagccagctttcatgttggatggtaacaataacctggaggatgactccagtgtgagtgaagacttagatgtggattggagcctatttgatggctttgcagatggactaggagttgctgaagctatttcatatgtggatcctcagttccttacctacatggcactagaagaacgcttagcccaggctatggagactgctctggcccatttagagtctcttgcagtggatgttgaggtggccaatccaccagctagtaaggaaagcattgatggtcttccagagacccttgttcttgaagatcacactgctattggtcaggaacaatgctgtccaatctgttgcagtgagtatattaaggatgatatagcaacagagttgccctgtcaccatttctttcacaaaccttgtgtctcaatttggctacaaaagtcgggaacatgccctgtgtgccgccgtcatttcccacctgcggttattgaagcatctgcagctccttcctctgagcctgatcctgatgccccaccttcaaatgacagtattgcagaagcaccctaaaccttgacagttgaaatgagatcagtgtatcaaagtaaatctgcaaattccttctaaatttcatgtgcaaataattatatataaatatatttaaaaatgctatatatagtatatgccatagtttagaaagaatattaacctttctaaactaaatttaggtttgcagaaagtattaaacatttttaagctgaatgttgagacagtgcatccattttctttagttgaatatgtttgtattaattgtaaagccaagcttatcagttgactctctccagaataaataatcatctgtgtggcatacgttattggctttgtctgtaatactgccactaagtgattataattaagctgtcctgtttgcatcaaatgtaaagactgtgttcacaaccgtagtaaaatttggtttcattggaaatgaaacaaattctaaagtatgctttttcactagtccctttgattttgctatatcataacctcttggttcatatgctgagaaatttttcagaaagtccatttttgtttaaaattagaacttttcagaatgccaaatgaaggctaaaattttggccagaacattacaaaagttttaaatcgtagacgtaactccccctgaaataaagttaggtagtaaaatccttaatgaaaccagtggatgtgcttaacgtaaggttagtaaagcatacaaagaatctagtgtgctcagggcttggtacaatgagctgaattagatggccttatgaaactctttctaacctcttacccaacctgtttctccttggttaaaattatacttgaaggcccagaacactcatggcacatttgtttaatattgcttatagttagtttaaggtaattttgcttctacagtattttggaaggtctgaaaacttgcacagggtcatctttgtaattatataaccccaaactaagatgcacaatgtctccttcaggtgatcacacacagtggacgagtatgtgcaaacatggacataatagttcacttacaaatgtgatttgatgttaacactagagaatgatgactgtagaacatttgagcaagtaaaatagtaaagcacatagtgagtgtatgtccgtctaactggtacattgataatttagtttgggcacataaaaggaatatttatatggcttcccaaatgcagagttacatcttattcgtgtatttctctgagtatttatatcccgtctccttttttcattcttaaaaataaatgaattttcactgttggcacatatgaggcttaaatataaggaacataacacttgcattctaatttttgcatatattgtaaatgtgtctggtatttacagcaaaatactgtgtatccttttatgggtaaaacaaaagtgaacattgcatgcatgtaatgtgatgaatttgtaatttaggagttctttggggcttctgtgacttgggaaatgcttacattcaggccttaatgttgcattagctagcatgttttccctctgatgtatatagtcactgttgtataaactaatctttgcttgttttctactctgtgatctttccatatcatatttcattaatgatcagttagtgtcaaggagtcaaaacagattaaaattaatttcatgtgtatatggtggaaatttgtggctagtgtgatttttgtttgtttccttttaagtactgttgatcagttgtgacacttactggttaaacttacgttgctaaagatttctctataataagccacacattatatttagactatattaagggaccttggttttcttctagatagcagctgtcccaaagaaaatatttcttctttgtctgttaagatttagctattatctgccagttgttaagaggttttggttccaaactcaaccagcaatgttgagagctgaacttaagatagctgttgtactttttgctttccatctgttactgtccttcattcttggctccctactatctataaacagctgctgtgaagaagaaaagttgaataagagttggcttaaattttaaaaaagaaaaagaaaattgaggttttaggattttcatggtaacaagctctggtataagctaaggctggcaagttcagatactaaaatattatttgatcatatcttggatccttttgaaaaagttaagactatatgaaggtaaattagaaataagtatgaatattaataaaatagcatttatcttatttctctattttatgttgtgacttaacctaattttatttttttaacattttcttatttcttataatatgaatgctgatatttaaaggtagatctatgtggtattctttgtgtttcttaattgtttaactcttaagattatttgtgatctggatttatgtatttgttagatacatacgaattgttaaaatggaatgcaagtttttcaaaagcccaggtctaaatgtaatggttggtttattgttctataaccccagcccatcattttctgtgtaaatcataaacaataaacagaatatactcggtggtcatttctaataaaaaaaaaa

SEQ ID NO: 3831 - DNA, 4376 bp, Homo Sapiens
  NM_014820
cgctgtatacgcgcccctcctcggcttcagtaggcaagagggccatctgcccttctttcctgaaggtagaggggacaacaccagctacgacggggactccagaagtccatctcccgaacagcagcggggcgaaaagaaagaaaaagggtttccgaagactcctactcacacccacgctttcccttaacccggaagtgatttccgcccctcctctccctcttcggttgatactggaggagaaggacggccaggtctggcccggcatgccctgggcttccggtgacctctggcccttttctgtcgtccgctctctctgcctagcgtgctcgctcgctcattgctttccttccctccctcggtcttccttcgcacgctgtttggtgattgtggcgctcgcgacagacagggaggcggtggcagaggacacttgtcatggccgcctctaaacctgtggaggcagcggtggtcgcagccgctgtaccgagctccgggagtggggtgggcggcggcgggactgcgggcccgggcacgggggggctgccgcgatggcagctggctctggcggtcggggcacccctgctgctgggcgcgggtgccatatacctgtggagtcggcagcaacggcgccgggaggccagaggccggggcgacgccagcggcctgaagcgcaacagcgaacggaagaccccggagggcagggccagtccggccccgggcagcggacaccctgaaggtcccggtgctcacttggacatgaactctcttgatagagcccaagcagccaagaataaaggcaataaatattttaaagcaggaaaatatgaacaagctattcagtgctatactgaggctattagcttgtgccctacagagaagaatgttgacctttctacattttatcaaaacagagctgctgcctttgaacagttgcaaaaatggaaagaagtggcacaagactgtacaaaagctgttgaacttaatcccaaatatgtgaaagctctctttagacgtgcaaaagcccatgagaagctagacaataagaaggaatgtttagaagatgtcactgctgtgtgtatattagaagggttccaaaatcaacaaagcatgctgttagccgataaagttcttaaactccttggaaaagagaaagccaaagaaaaatataagaatcgtgaacctctgatgccatctccacagtttatcaaatcttacttcagttctttcacggatgatatcatttcccagcccatgcttaaaggagagaaatctgatgaagataaagacaaggaaggggaggctttagaagtgaaagaaaattctggatacttaaaggccaaacagtatatggaagaagaaaactacgataaaatcataagtgaatgctcaaaagaaatagatgctgaaggcaaatacatggcagaagcattgctactacgagctaccttctacctgcttattggcaatgccaatgcagccaaaccagatttagataaagtcatcagtttgaaagaagctaatgtgaagcttcgagcaaatgctctcatcaaaagaggcagcatgtacatgcaacagcagcagcctttgctgtccactcaagattttaacatggctgctgacatcgatcctcagaatgcagatgtttatcaccaccgaggacagctgaaaatactccttgatcaagttgaagaagcagtggcagattttgatgaatgtattaggttaagacctgagtctgctctggcacaagcacagaaatgttttgcattgtaccgccaggcatatacgggaaacaactcttcacaaatccaagcagctatgaaaggttttgaagaggtcataaagaaatttccaaggtgtgccgaaggctatgcactatacgcccaggcattaacagatcaacaacagtttggtaaagctgatgaaatgtatgataaatgtattgatttggaaccagataatgctacaacatatgttcataaaggtttacttcaacttcagtggaagcaagatctggatagaggtttggaacttatcagcaaggctattgaaattgacaataaatgtgattttgcctatgaaaccatgggaactattgaagtacaaagaggaaacatggagaaagccattgacatgttcaacaaagctattaacctggccaaatcggaaatggagatggcccatctgtattcactttgcgatgccgcccatgcccagacagaagttgcaaagaaatacggattaaaaccaccaacattataaaacagggggaaagcagactgaccctctttttaaaagtttaccccctcttcaactgaaccctaaagacactgtcatgaactgtgttgaatggtggaaatcagtatttctgtttgtggtgttgttatttgttacatctgtttcatgtctaggtgttgtgggtgtggctgttgaaggaagtttgcagtcttgcagcttttattccctgtgcaacaaaagattagaacatgttaaagggatttttaaataaagttgcaaagagtacaaatgataattggccatgcaaataaaaactgatttgttgattttttttttaaggggggttggcagttgattatgttctggatgattccgtctatatatgtgtgaataatgtaagtattttacagcatgttgatttttaaattaacgtagtaaatgctgtaaaatagatttatattcagttaaccgctttcagttgattttttgaaagaaacaaaggttaaatgggggattaaagtaaaattgagagaccctttaaaccattgtcagcatgcacaatgcctctgattctgcagttttagaaacttggtggcacttattaatcctcttggcccctttccactctaatggatagtgtacattcttcttaaagtccacaacagcagattttcttgcagtaaattatgcagatgcaaaatattctaattgatatatgtgttggaagactgagtattgatgggggagtggaccagacaaagaggtaagatgaaacagtagtgtgtttataattgtctgtgactattttctataataattagtactatttaatggtgagcttttaaaaatgtaggatagagggtacagtggcactgtatatactatttatagtctcagctactagggaggctgaggcaagaggcttgagaccaggagctcgaggctgtaatgtgccatgatgattgcacctgcgaatagccactgcactccagcctgggcaatatagcaagaccccatcctttaaaaaattttagaacttttttaaaatcaaagtgcagattgcttgtatgtaaaacccaaataaaggtagagtaagtgtgatatatgggagtattaaaatagcttaaaatttctcgtgaaggacatgtggctaaagggtcaaaaaggatgtaagacttggagccagagcatagtatttcctgaaataacaagtttagtgctttaactatggctacatgtgcttaaggaattttgagccacttatttttgaagatgctgaggacatgtagagtgctttttgtagtgagctaaccttgatctctaaggactaactacccaggtccaggtcttcactaggggtactgacagtgtttaagctttactccacctccttacttagaaatcactttacgatttatttccattttccacttttatagaccatccttttgcttatatgctagatttttctggtgagggaagggttgtgttcttcaggggtcttttgttttgaaatactcaggatggggagaggtttatttaagaacgaattataattatggtttacactgttgggagtaaaggagcatttttacaccccttaagggtgcttaattctgttgaaaccaaaaagatttgtctacaaatgctatcttttttagaaactattagaaatgactccctttcaaagtcaatctttggaaaatattgaggaggtcactaattagttggtgcagttaatataattcaagatgatttggatgatgggaagtttgagaccgctgcattttgtttttaaattatgcaccttctgataacccccaaatacagaaatgttctacatctctgaatgacctctgactttaaaaaagtttttatttgcatggctgtatttacattaacactgacattttcttctactcttctcccttctttcatcttggggttgggtagagaaacacaaaggaaactgaagcatgtgccattctatactgtcattccaaattctcatggactattgcctgttgtgaaaatgtttgaaactgcactgaaagctgcatctgtctgtatctttcttttgtaaatgacctcacatgtaaattcaccaaataaatattacattcaaaaaaaaaaaaaaaaaa

SEQ ID NO: 3832 - DNA, 5695 bp, Homo Sapiens
  NM_014829
agcacgtcctgttttcgttggccgcgctgggatggccgccacagctgtaggtgctgctagtgtttagcgctggtctttgccgggcgttgagggcagctcagcctccttgtttgtccggttcgcctgtgcgtggtactcaagggcaccagtattcccgcggtcggcagcatgggtcgggagtcacgccactatcgaaaacgatcggcatcccggggtcgctctggaagtcggtctagaagtcgctcaccctcagacaaaagaagtaaacgtggagatgacagacggtctagaagtagagatagagataggaggagagagaggtctcgtagcagggataaaagaagatctcggtcaagggacaggaagcgtctgagacgttccagaagtagagagagagacagaagccgagagcgaagaagatctcgaagtagagacaggagacgctcaaggagtagaagccggggccggcgatcccgatcctccagtcctggaaataaaagcaagaaaactgagaatagatctaggtccaaagagaaaactgatggtggggaaagttctaaagagaagaaaaaagacaaagatgacaaggaggatgaaaaagaaaaagatgctggcaactttgaccagaataagctggaagaagaaatgagaaagcgaaaagaaagagtagaaaaatggcgagaagagcaacgtaaaaaggctatggaaaacataggagaactgaaaaaggaaatcgaagagatgaaacaagggaaaaagtggagtttagaggacgatgatgatgacgaagatgatcctgcagaagctgaaaaggagggaaatgaaatggagggtgaggagttagatccattagatgcttacatggaagaagtgaaagaggaagtaaaaaaatttaacatgagaagtgtaaaaggtggtgggggaaatgaaaagaagtctgggccaacggtcacaaaagttgtcactgttgtgacaaccaaaaaagcagttgtggattctgataagaagaaaggtgagctgatggagaatgaccaggatgccatggagtattcttcagaggaggaagaagttgatcttcagacagcccttacagggtatcaaacaaaacagcgaaagcttctagaaccagttgatcatggaaaaattgagtatgagccatttaggaaaaacttctatgttgaagttccagaactagcaaaaatgtctcaagaagaggtaaatgtgtttcgattggaaatggagggcattacagttaaaggaaaaggttgccccaaaccaattaaatcctgggtccagtgtggaatttccatgaagatcttaaattccctcaagaagcatggctatgaaaagcccacgcccatccaaacccaagctattcctgctataatgtctggacgagatttgattggcattgccaaaacaggaagtggaaagaccattgcttttctgttgcccatgtttagacacatcatggatcagaggtcattagaggaaggagaggggccaatagctgtcatcatgactccaactcgagaactggctttacagattactaaagagtgtaagaagttttccaagactttgggacttagagtggtctgtgtttacggaggaacaggaatcagtgagcagattgctgagctgaaaagaggtgctgaaattattgtttgcacacctggtcgaatgattgacatgttagccgctaacagtggtcgggtcacaaatcttcgaagagtgacatatgttgttttagatgaagcagacagaatgtttgacatgggttttgaaccccaggtcatgcgcatcgtggataatgttcgtcctgatcgacagacggttatgttttcagctactttccccagagctatggaggctttggctcgcaggatcctcagtaaacctattgaagtacaagttggaggcaggagtgtggtttgctcagatgtggagcaacaagtgattgtgattgaagaagaaaagaaattcttgaagttacttgagcttctaggccattatcaagagtcaggatctgtcattatatttgtggataagcaggaacatgctgatggtcttcttaaggatttaatgagagcatcttatccttgcatgtctcttcatggaggcattgatcaatatgacagagatagcatcataaatgactttaagaatgggacctgcaaacttcttgtggctacctctgttgctgcccgaggtctagatgtgaaacatctgattcttgtagtaaattatagctgccccaaccattatgaggattatgtacacagagcagggcggactggaagagcaggaaacaagggttatgcttatacttttatcacagaggatcaagctcgctatgctggtgacataattaaagctcttgaattgtcagggactgcagtacctcctgatttagagaaactgtggagtgatttcaaagatcagcagaaagctgaggggaaaataattaaaaagagtagtgggttctctggtaagggattcaagtttgatgaaacagaacaagctttggctaatgagaggaagaagttacaaaaagcagctcttggtctacaagattcagatgatgaggatgctgcagttgatattgatgagcaaattgaaagcatgtttaattcaaagaagagagtaaaggatatggctgctcctggaacatcaagtgttcctgctccaactgcaggaaatgctgagaaattagaaattgctaagagattggctcttagaatcaatgcccagaagaatttgggcatcgagtctcaggatgtgatgcagcaggccaccaatgcaattcttaggggtggcaccattctggctcccactgtttctgcaaaaaccattgcagaacaacttgctgaaaagatcaatgccaagctcaattatgtgccgttagagaaacaagaagaagagagacaggatggtggacagaatgaatcttttaagagatatgaagaagaattagagatcaatgacttcccacagactgctaggtggaaagttacctctaaggaagctctgcagagaatcagtgaatactctgaagccgcaattacaatcagaggaacctacttccctcctggcaaagaacccaaggaaggcgagcggaagatttacttggcaattgaaagtgccaatgaactggctgtgcagaaagcaaaggcagaaatcaccaggctcataaaagaagagctgatccggctgcaaaattcataccaaccaacaaataaaggaagatacaaagtcttatagacatccggaaaaaagatttttacctgtgctggtctatgatgtatgtggcagttgctgtctgcagtttacaatgtattgtaaatgaagattttttaaattctatcttgctgattttttttaaatataagaaactggtacttggtaaagaaatctgtccgtaagtacccccacaatcagtcaaactatatttaaagccagcctgttttcagagtatgatgtcctttaatgtaaactcaaatatcaatattttaaatgtccggataatattctagaggtttaaaaaatggaaatatttgaactttctattgaagacaataaagtacacaagtcgttaaggggctattcactttatcctgtactttcaatgaaattgtgatcatttcctaagaaaaggtaaaattcactatcatattttgtgtccccaccttgatgttacatgactctggaacaatatgaactggatttaagaatgttataatagaagtcttacaaaatgggttgagagtttttgtttcaatttttatcatcataaatgggcaaaaagtagttggactaatttcggtttttatacaagtaaagatttaatagtataaggatttttttgcatttctttacactgagtgtaaaactctacaaagagttatagtatttactactttgaggtttccctcacaacttctggctccatacctagcccctcttttataatcttccttaaaagaaagagtgtagcctataaatactaaatatgataccttttccttctagaaagtgtttatttatatatctatacatgttgtatgtacaaatatcctactacttttaatctgatttttcttcaggattattgagtaggttgtgaattttctttcttaaaaattgtaaaacataatggtacccaagttttaaacttagatgtgcttcatcttagtgaaatttaattcacaaggaatcataaattgtgtttttgaggctgggcgcagtgactcacacctgtatcccagcaatttgggaggccgaggtgggcagatcacttgaggtcaggagttcaagactagcctggtcaacatggtgaaaccctgtctctactaaaaatacaaaaattagtcggcatggtggtgggtggctgtaatcccagctactcaggaggctgaggcagaagaatctgagccaagataacaccattgcactccagcctgggcgacagagtgagactatctcaaaaataaataaataaataaataaatagtatttttgagccttcaagatacagttcctgaatattctaatttaaattgttataattggattacctaatattcttttcaagactcctgatgtattaacttcatgttattgtcacttttcaaaaaaggaatttttttcaggagttaaataaagtcagtcttttatatccaagggtttcaaacccacagattaaaccaaccacagatcaaaaatagaaaaaaaaaaaaaaagaaaaaaagaatgtaaaattttaaaaatacagtttaacagctgtaaaagttttactataacatttacattgtgttaggtattttaagtaatttaaaggttacagtatacaggcggttaaagtatacaggaggatgtgcatcggttatatgcatatagcaagccatttcatataagaggcttgaacatccatggattttggtatagaggaggggtttaaggggtgtcctgcaatcagtccccctctcataccaaaggatgactgtatatttcttaaatgaagagactttcattctttaaatattattgacttacagtttaaaaataaataaataaaagcatactatagttgtaaaaacaaataattttaatagtatattcagtggctgaagtgatagggagtattaatcattatttcttcagtataaagttattcttcctgaaaaagtaagatatacctgggaaatattcttggatccttcacacatccacttaatttcttgaaggaagaaaacagacaaaagacatgtaacaacagaaacaaataaaccacttactgtaaaatttcagaaattgtgggctcattccctccctctagtttatttatttgctcatctttatcacctaatggtagtttgttttctttggtagagtatatggcagtcccacatcgatgataattggtgctcccttcatccaactggatcactttgagattcagttttacatcattttagcattttgtttgtatatcagttgtgatgagccactgataaaattttgttctaaaatgaaacatattactttgttagtacattttttagtgtcacactgacttttaaaatttgaatgatatatagactttgtttttttaatgcaatatgaatatttgctcatgttttctaaattccttataaaataaaattaattcgaattcaaaaaaaaaaaaaaaaaa

SEQ ID NO: 3833 - DNA, 6256 bp, Homo Sapiens
  NM_014830
agtctggccgcggccggcggcgccgcctcctcgtcgggccgggcacggcgggccggggcctttgtgtgaagcggcggcggcgatggtgctcggggcgccgcagagccggattaactgtgctgataaggaggtaatttcataggagctgctaagatgggcatgaggatcaaactgcaaagcaccaaccaccccaacaacctgctgaaggaactcaacaagtgccggctctcagagaccatgtgcgacgtcaccattgtggtggggagccgctccttcccggcccacaaggctgtgctggcctgtgcagctggctacttccagaacctcttcctgaatactgggcttgatgctgccaggacctatgtggtggacttcatcacccctgccaactttgagaaggttctgagctttgtctacacttcagaactcttcacagacctgatcaatgttggggtcatctacgaggtagctgagcgtctgggtatggaggacctcctccaggcctgtcactctacctttcctgatctggagagcactgccagggccaagcccctgaccagcaccagtgagagccactctggtaccctgagttgtccttcggcagaacctgcccatccccttggagaactccgaggtggtggggactaccttggtgctgatagaaactatgtgttgcccagtgatgctggagggagctataaagaggaagagaagaatgttgccagtgacgctaaccatagcctgcatctgccgcaaccgcccccaccaccgccaaagacagaagaccatgacacccctgctcccttcacgtccattcctagcatgatgacccagccactcctaggcactgtcagcacgggcatccagaccagcacgagctcctgccagccatacaaagttcaaagcaatggagacttcagtaaaaacagcttcctcacccctgacaatgcagtagacattaccactgggaccaactcctgtctgagcaatagtgagcactccaaagatcctggctttgggcagatggatgagctccagctcgaggacctgggggatgatgacttgcagtttgaagaccctgctgaggatataggcacaactgaggaggtgattgagctgagtgatgacagtgaggatgagttggcttttggagagaatgacaatcgggagaataaggccatgccctgccaggtgtgcaagaaagttctagagcccaacattcaactgatccggcagcatgctcgggaccatgtggacctgctgacgggcaactgcaaggtctgcgagacccacttccaggaccgaaactcccgggtaactcatgtcctgtcccacattggtattttccttttctcctgcgacatgtgtgaaactaagttctttacccagtggcagctgacccttcaccgacgggatggaatatttgagaacaacatcattgtccaccccaacgatcccctgccagggaagctgggtctcttttcaggggcagcctccccagagctgaaatgcgctgcctgtgggaaagtattggccaaagatttccatgtggtccggggccacatccttgaccatctaaacttgaagggccaggcctgcagtgtctgcgaccagcgtcaccttaacctctgcagcctcatgtggcacacgctgtcccatctcggcatctcagtcttctcctgttctgtctgtgcgaacagctttgtggactggcatcttctagagaagcacatggctgtgcaccaaagtctggaagacgccctcttccactgccgcttgtgcagccagagcttcaagtcagaggctgcctatcgctaccacgtcagccagcacaaatgcaacagtggccttgatgcacggcctggttttgggctgcagcacccagctctccagaagcggaagctgccagcagaggagtttctgggtgaagagctggcgctgcagggccaacctgggaacagcaagtatagctgcaaggtctgtggcaaaagatttgcccacacaagcgaattcaactaccaccggcggatccacacgggggagaagccataccaatgtaaggtgtgccacaagttctttcgaggccgctcgaccatcaagtgccacctaaagacacactcgggggccctcatgtaccgctgcacagtctgtgggcactacagttccacccttaacctcatgagcaaacatgttggtgtgcacaaaggcagcctcccccctgacttcaccatcgagcagaccttcatgtacatcatccattccaaagaggcggataagaacccggacagttgactgggtcccggcagagccacggggagctcccaagcagcagccaggatgctgatatctaagaggtgttggtccctccccagctgaagttataattttgccttggtaggaattctgttctgtgttgtgtttaaagaagaaaagaagaagaaatagcacataagctgttactgttgttgagaagcaacagccctatcacatttacctccatacctgttcttgcccatgcagggctatgtttttcattcttttgaggctggttttgggatctagtcaagcagttggtgtccactagacccccttccccagcctctctagttttagtttactgataggttttatgctgctaagaatccaaccaacagcctcacttaacagaggaggtaaagggaggttttcactgtgggtgttactgcaggcctccaactgggatgaccagcaatgagaaagattttgggaatgtgatcattcagaaaagacaggtcagcagggcagtcccctcaggttccagccctcagcagggacaagacatcagggatgttggtgtctgcttatctacagccctaatctgctgattgaacagtgaaaatcttttggcagctagatccatactaggcacagagctttctatttaggtcagaaagctttgggatgaacccctgccagccagaaggggtgtcctgcagtgccaccagaagtggcagcctggatggacaggagaggtttctcttttctcctcatttccaaagaaacaggattttatggagtgatggcccgggacgtccggccttctgtggggcagagaggatagggaaccactttgatatagtcatctgttttggccacttctgttggccatgagtgtcttggtggagaggtggggatgtatctgacagcagcagccttgccttaatttatatctggtctcccgtccagaagtgtttggcccgtggtgtagatgagctgactccatgaagtggtggagtggcagaccgcgagcccttcaggattaaagggacctgagtaactggtggtgtgtagcagggtgtgcgttctgactgtctgtcctagtcgggtaacctgtttactttgtgctaacagtgccggagctttgtcagctcacctttgacctgctggaatttatcctgatctgtcgttgccatcacctccagggggcgctattggatggcagctggttcaggccctccgtgggtggctgcagagtgtgccggcacagcccacgcagctggttagctccactcttacttggttttctaaggggctttgcccaaagaagtcttgagggatagggccctcgatcttgcatacttgtgaggtgccacctcagtagctcatactacctcaccctgctcaggtgagctctgggagtccctggcctcagccctggcactgcccctggtgggattcagcaacaccccgggctgtttcacaagcaagtggttttcattaactcacaaagcctttttggacattaatatttatttatttttgtttttgtatacacattacccagcatctcttttgtataagagactttaggaaaatgagtttctccccagcaagtagccatattccagagaacagccttgaccagagatgtggagaaccaggggtataactaagggaagacatgtcaagcccttaagcaaattcttcttctccagattgtctctagcataataaacccagggaacactttaggccatgggtgtatgttctataaagttcgggacagttaaattccaggcctttcatcccccttccttcctgtgatggagtagattggggacagggttgaggggaacaagtgacatgaatgacctatttgcacagtttggaagcctcctgtctttatttatattgagatgtcagacaaaccaaagctccatccttgttggacctgctgcttctccccagccctgaactgataaagcctcagagttggagtgcctggctctctggtggggtgaccattagatgaagggacttgtacagtggccagtttaaaggtccacctttgaccatctaaacccaccttgttcagtgtcctctgaggacatcctcatcaggaaagcagtgttgagactcttcattgctgactggcttctccctttcttactcacactgaccattagaatttaagaaggaaatgtgtaacagactacagtcaagtgtctgctacattttcaagcatgagcaatccctcccagactgttggtgaggactgatttttgaaatgctggtgtgagagaggtggtaattacaggaaccagccgagtggctgagagcagataaatgtgctggagaaacctttttccttaacagagggcatcatggatgctgggtggtctgtgtacttaacctgaaactgtgaagttttccctttttgccagtaaaccaaaaagcagatccttgaaacttggcccttgaaacacgaaacagaaaactgcatcccctgatcccccgggggctgatcagattgatcagggtggctcagttggtcccagtcagatacgtcataggatcagtagctcatgagatttgttgaccaaaccctctccctgttggtgacccctgtattcacacctgaacttcccgtttccccccaccccaccaaagtcatgtctgcttcctctgcctccagctcaccctcttctgaatggttttgcttgaaacactatattgtggcagagggcaccctgggatacctggtagaaggtattcattttattttgcatttttaattgttttgactttctgttcatttgattttgttgctccctctctcctggaacctagtttactactctcttctgtgttactctgaagttctgtttaagccttgaacatcctcttctcccattttcttggtatgtactcaggaccagctacatcatttgtggagccctcttattcataaattattaaaaatttcaaggtggtggtcatagagcattaaaccaaatatgaggccattcccaacttgttttccgaggggaaaatggtaatacttgtgtggcacccggggttaaacagcagaggctccatgtggccagaggcagagattagtatcctggcactccagtgacccactgggtgactcactgatgccacagcacccgctaggaagctctgctgaaccttagtatttggtcctaaattttatgactccatggagttcccgtagtccatggctagttaggaagaaaggaggtgggataagggtcaggcccaggtgacccctaagaaccaggagatgggtaaaagtttttttttatattctgcttttctgatctgtgagtacctgtttgtctccaggccaaacctttgggcttaaatatctttttcctagacaggtttttgctagtgttgaattttcttcttcctctggcctccttctgtgcccctttccccaagcccaagactgcttaacttccaaagcaaattctagatagacactgtatttattggtatgggagtgggctctatggggtggtctgcacccatctgggactcttttccctaaatcctgcaccaaatgagtcaggaggcagggtgcacagcattagtttcaatgtggttatgcatcataagcttaacatcagaatgaaaatgaaactcgattttgatgtttctttaaaacccttcccctgtccaatccactcgccgcccccaccttgaatagctaaagtctcttatgaaacagagaagagttgttgacgtctaactccttccattaaattaataagtactgacctcctaatatttaagtgtttactatctattgctgtaaagttttgtatattttgtaaacttttttccccaaatagtagatgtctaaaatcattgtacatctgattcttttatattccattgttcagcacaaagtgtggtttttatttagaataaaaaaagaaatttgaaatgaaaaaaaaaaaaaaaaaaa

SEQ ID NO: 3834 - DNA, 10499 bp, Homo Sapiens
  NM_014831
cttggaataggtctgcggctgcacaccgcccggacgccggggttcctgcgtcccccgccccctctgatcgcggctgggtagccgagccgcaggcagctgggggcccccgaacgccgcctctgcatcgcgccgcccctgccccgggctccggtagctttcgggcttccgcactgcccgccgcgccctgcccacagggaagcgcttccccaggcggcggcggtcctggtgcggaccctccggccgcagccatgtgggacccgcgggcagctagggttcccccgagggacttggctgtgctgctgtgcaacaaatcaaatgcatttttcagccttgggaagtggaatgaggcatttgttgctgccaaggaatgtctccaatgggatccaacctacgtgaagggatactaccgagctggttattccttgctgaggttgcaccagccttacgaagccgctcgcatgttttttgagggtctgcgacttgtgcagagaagccaagaccaggcaccggttgctgatttccttgttggagtcttcaccactatgagcagtgactccattgttttgcaaagtttcttgccttgctttgatcatattttcacaactggattcccaacagaagtgtggcaatctgtaatagaaaagttggcaaagaaaggattatggcattcatttctgcttctgtcagcaaaaaaagaccgattaccaagaaatattcatgtcccagagttatcactgaaaagtctctttgagaaatacgttttcattggactttatgagaagatggaacaagtgcccaagttagtccagtggctcatctccattggtgcaagtgttgagactataggaccgtatccccttcatgccctcatgcgactctgtatccaagccagagaaaaccatcttttccggtggttaatggatcacaagcccgagtggaaaggccgcattaaccagaaggatggggatggctgcactgtcctgcacgtcgtcgctgcccactccccaggatacctcgttaagcgacaaacagaggatgtgcagatgctcctgcgctttggggcagatcccactttgctggatcgacagtctcggtctgttgtggatgtcctgaagaggaataagaacttcaaagccatcgagaaaatcaacagtcacttagaaaagctagctacgtgttctaaggacctatcaggattcagcaatggtgatggacccactagtgaaaacgacattttcaggaaggtcttggagcagctggtgaagtatatgaactcaggaaaccggttattgcataaaaactttctgaagcaggaagtagttcagaggttcttgcgtctcctttctactctgcaagaaattcctcctgacctggtctgtgatattaatcaagactgtgccaccaccgtcttcaaattcttattggaaaaacagagatggcctgaggtgcttctgctgctgacccgcaaagtaagtggagaaccaccgcttggggattgcctcatcaaagactgcaacttctcagacctcgacatctgtaccatcatcccccatctcagcacctgggaccagcggaagaaacagcttctgggctgcctgatagacagtggagccttgcctgatggtcttcaggagagccaggagaggccagttgtcacgtgcctgaaacatgaggacttcgagttggctttccttctcttgaccaagggcgcagacccccgtgctatttctctcacggaaggtgatactcctttgcatgcagcactccacatctttctagagattaaagctgacattggttttagcttcctcagccatctgttggatctgttttggtccaaccccactgaattcgactacctcaaccccaatgtccaggacagcaatgggaacacgctgatgcacatcctcttccagaagggcatgctaaagcgcgtgaagaagctgttagacctgctggtgaagtttgacatcaacttcaatctgaagaacaaagagggcaaagatgcacggcaccggattaagaagaacgactctctgctcttggcctggaacaaagctctgatggagaacaggaggaggagccggcaggactctgctgcccacctggggaagctctcaaagtccactgcccctggtcacacatctcagctcaagtcccagggttcattcaagtcagtgccatgtggtgccactgccagaacactgcctgaaggaagtgcagtccctgacagctgggagactctcccaggtacccaggtgaccaggaaggagcctggagctctcaggccctgctcgctgagagactgccttatgcaggacatcacagttttgattcagcaggttgaagtggatccgtctttcccagaggactgtcttcagagctctgagcctctggaggcaggagctggcaaagaaggaaagaaagatgacaagccgactctgggtgcaggggcccctgactgtagtgaggtgggggaaggacatgctcaggtgggccttggggccttgcagcttgtgcctgatgataacagggggaaggagggcaatgatgatcaggatgactggagcacgcaggagattgaggcctgcctccaggacttcgataacatgacctgggagatcgagtgcacttcagaaatgctgaagaagctgtctagtaaggtaatgaccaaggtcatcaagaagaaaatcatccttgccattcagcagctgggaaatggcgagtggacccagggcctgcagaagcgactgaagcacctgaaaggaagcatccagctcttcgaagctaagctggacaaaggagcccggatgctctgggagctcgccattgacttctcccctcgatgcagtgagaaccctgagaagatcattgccacggagcagaacacgtgtgcaatggagaaatcagggcggatctacacggaaatcatccggatttgggacatcgtcttagatcactgcaaactggctgattccatcaaggccatctgcaatgcctacaaccggggcttgtcctgtgtcctgcggaagaagctgaaaggtatcaataaaggccaagtgtcagctaacatgaaaattcaaaagcgtatacctcgctgctatgtggaggacacagaggccgagaagggcagggagcatgtcaatcctgagtactttcccccagccagtgcagtggagacagaatataacatcatgaagttccacagcttcagcaccaacatggcctttaacatcctcaatgacacgacagccacagtggagtaccccttccgggtgggtgagcttgagtacgcggtgatcgacctcaatcccaggccactggagcccatcatccttattgggcgaagtggcactgggaagacaacctgctgcttgtacagattgtggaagaaattccacgtttactgggaaaaagctgagcaggcaggaagcccattgctggccaaacaggtctggctgaagagaaggttggaagtggaacccggaaaagagagtccaggtggggaggaagaggaggaggaagaggacgaggaagaggaagattctattgaagtggaaacagtagaaagcatagatgagcaggagtatgaagcctgcgcaggaggagccggtgtggagccagcaggggacggccaagctgcagaagtatgtgcaccagaacatccccaccagctggagcatttacatcagatctttgtgaccaagaaccatgtgctgtgccaggaggtacaaaggaatttcattgagctttccaagtccaccaaggccactagtcattacaaaccactggaccccaacattcacaaactccaggacctgagggacgagaactttcctctgtttgtcacttccaagcagctgcttcttctgcttgatgcttctctgcccaaaccattttttctgagaaacgaagatggaagcttgaaaagaaccatcataggatggtctgcacaggaagagtcaaccattcctagttggcaagaggatgaagaggaggctgaggtggatggggactacagtgaggaggataaagctgtagaaatgcgtacgggtgacagtgacccccgggtgtacgtgacgtttgaggtgttcaaaaatgaaatatggcccaaaatgaccaaagggaggactgcctacaaccctgcactgatttggaaagaaataaaatcttttctaaagggttcttttgaggccctcagctgtccccatgggagactcactgaagaagtatataagaaattagggaggaaacggtgccccaatttcaaggaagaccggagtgagatctacagcctcttcagtctgtatcagcaaatcaggtcccagaaaggttattttgatgaagaggatgttctgtacaacatatcccggaggctgtcgaagctcagggtgctcccatggtccatccacgagctctatggtgatgagattcaagactttacccaggccgagctggcgctgctgatgaaatgcatcaatgaccccaactctatgttcctcacgggggacacggcccagagcatcatgaagggcgtggccttccgcttcagcgatctgcgctctctgttccattatgccagcagaaacaccatagacaagcagtgtgctgtccggaagcccaagaagatccaccagctgtaccagaattacaggtcccactcaggaatcctcaatctggcatctggagtggtggatttacttcagttctatttcccagaatcttttgatcgccttccaagggattctggcctctttgatggtcctaagccaactgttctggagtcttgtagtgtaagcgacttggcaattttgctacgagggaataaaaggaaaactcagcccattgaatttggagcccaccaggtaatccttgtggccaatgaaacggcaaaggagaaaattccagaagagctggggttagcacttgtgctaacaatttatgaagcaaaaggcttagaatttgatgatgtcctcctttacaacttttttactgattctgaggcttataaggaatggaagatcatttcctcattcacacctacctcaactgactccagagaggaaaaccggccattggttgaagtacccctggacaaaccaggctcttctcagggtcgatctctcatggtgaatccagaaatgtacaagctcctcaacggagagctgaagcagctgtacaccgccatcacacgggctcgggtcaacctctggatctttgatgaaaaccgagagaaacgggctcccgcattcaaatatttcattagaagagattttgtccaagttgtaaagacagatgaaaataaagactttgatgatagcatgttcgttaagacctcaactcctgcggagtggattgcacagggagattactacgccaagcaccagtgctggaaggttgcagccaagtgttaccagaaaggaggtgcatttgagaaggagaagttggccctggcccatgacactgccctgagcatgaaatccaagaaagtcagccccaaggaaaagcagttggaatatttggaattggctaagacctatttggagtgcaaagagccaacactgtcccttaagtgtctgagctatgccaaggagttccagctctctgcccagctgtgcgagaggctgggaaagataagagatgctgcctatttctataagcgaagccagtgctacaaagacgctttcagatgctttgagcagattcaggaatttgatctagcactcaaaatgtactgccaagaggagctttttgaagaagctgctattgcagtggaaaagtatgaagaaatgctaaagactaagacccttcccatttccaagctctcctattctgccagtcagttttacttggaagctgcagcaaagtatctgagtgcaaataagatgaaggaaatgatggctgtcctctcaaagctagacatagaagaccagctggtgttcttgaagtctcggaaacgcttagcagaagctgcagacctgctgaacagggaaggtaggagagaagaggctgccctgctgatgaagcaacatggctgcctcctggaggctgccaggctcactgccgacaaggacttccaggcctcatgtctgctgggggccgcccgcctcaatgtggccagggattccgacatagaacacaccaaggacattctgagagaagcacttgatatctgctatcaaactggccagttgtctggcattgcggaggcccacttcctgcaaggggtaatcctgagagactttcagaagctcagggatgccttcttcaagtttgacacgctcaaccactcagctggagtggtggaagcactctacgaagcagccagccagtgtgaggccgagcctgagaagattctgggcctggctccagggggcttggaaatcctcctcagtctggtcagggctctcaaaagagtgaccaacaatgctgagaaggaaatggtcaaatcttgctttgagttttttgggatttcccaggtggatgccaagtattgccagatagctcagaatgaccctgggcccatattaagaataatttttgacctggatttgaacttgagagagaaaaaaacaaaagatcattttttgataatgactgaccaagtgaaattagccctaaacaaacaccttttgggcaggctgtgtcagatcacacggagcctgcttgggaagacctaccgaggagtctgcatgaggtttattgtaggcttaaaatgtgaggatgaaaactgtgaacattttcacaggcctctgcggcgttgtgaagccaagtgtttagttcagtcgaaaatgaacttggtggcaatcaacgggttgcttttggaagccaaaaaagtattccctaaaatcttagcagaagaacttaaagaaattgattatattttgtctacagatatgtatggcctttgcaagtccattctggatgtccttttccctaagcatttccatcagagagtgttgtcagaaaaccccatggcatgcaaagaaatcctcaaaccaaattacaaatccttccggttctacagatttgctttgaaggagtacatccactttctgtttgaaaatgaaagcgcacgcaaccgccgggaatccacagacctgtggctgagtgccatgcaagctttccttctctcttccaactacccggaggagtttgaaaagctgctccaccaggaggaggacaactacaacagggaactcaaagctctagagtctgaaaaggatgaaaggggcagggggagaggcagcaggataaaaggaatagaagggaaatttggcatgctggcacccaacagggatgatgaaaatatggacaagacccacctgtgcttcatccggcttctggagaattgcattgatcaattctacgtgtacaggaacccagaagactacaagaggctctttttccgtttcatgaatgtcctcatcaagaggtgcaaagaaccactcatccccagcattggaaacacagtagccctcctggagttccagttcatccactgtggggtggtgctggcccgcctctggaagaatgtcattctatgcctccccaagagctacattgcactcttgcactactgggagttcctgtttagcaagaaggacaaggagcttggggatgtgttctccatcattcaggaatacaaacccaaggacgtgacaagagccattcaggatttccggttccatctctcctacctcgccaaggtgctatgtggctatgagaatgtgaacttcaacgtcctgcttgatgccttcagtgaaatagactatgtggtctcgggtgaggctgagcggacactggtgctgtgcttggtgatgctagtgaatgctgaggagatcctgcagccatactgcaagcctctcctgtatcgccacttccgggagattgagtcaaggctgcagctcatgagcatggactgccctggccaggttcccgagaggctcctgaaggtggtgaagcgggtcttggtggcagtcaatgtgaagtctgtggctgaggcactgcaggacctgctctttgagcgggatgaagagtacctaatggactgtgactggcggtgggaccctgtgcacaccaaagggtccatagtccgtggcctctattatgaggaggtcagactaaaccgcctgctctgtttggaccctgtggactactttgctgaacctgagtgtgagtttggccaggatgagatggatgaactggcattagaagaccgagaccacgtcctggccaccattctttcccaaaagcaacggaaggcctccatacagcggaagttgaggagggcatgcctggtggtgtctctgtgcatcagttggaggagaagagtgggcacccagatggagcgtgtcagggaggaggccagggagcccagggctgggaacttcaaaaaggcagacgtggacaggacccagtgtgacctatgtggagtgaagtttacccgtggcccagagaactatttcagccccagcaaagcgtttgagggggcagcttccgaggtggcagtcctttccagggctgagctggaaagggaggagtgtcaggagaggaacagcgagtcttacgagcagcatatccatctagaacaccaccagaggcagcaagtggcctaccagaaatactcagaatttttccacgagaaggtggacccggccattgatgaaggcaagctggtggtgcaggacatcgagcaaagtgtatggatccacagtcacgtgggctccaaggagcacagccacatgctgcagaaggtccaggagcacatcaagagggtttcggatatggtggaggacctctacaggcggaaggcctgggctggcgcggaggaggcgatgactcggctggtcaacattctgatcctgtcagtcagggatgcacgagactggttgatgaaaacagagacccgcttaaagaaggaaggtattgttcaggaagatgattatgaaaatgaagttgaagactttggtgagcttcggcctagaaggcgttctcggaaatgtggaaagcagagaaaatactaatgtccacacagctgcagcctcctcatccttcggaacattccattctgacttagaattctgagcgctggggcagaagacaaaaagaatgtgaattagcattttaaaaataggggagtctaacaacaccattgctttttattctcattacttctctttcagtggcttaggatctgattgctccctcacctctaaagtgtttccaagtagagtctggcagtattagtttcccccacaaacaaattcaggtagagaagttgtagtcgaagggaatgttgggactcctcactgcatggtccctggggtgtctggctcatccccatcatgacatgagttggtagcagaggactaggtgttaggacagactctcctcacctcagttgctgctgctctgggccaggaaatctctctatggattccctcatctcctgccacactgctgcagcatcaagtgtgctatgagagctgtatgtgcccaggggtgggccctgccactggccaccccgagcccaggacgcattctggtcatctctgagcccacttgtagtgtagcttcttctgttagagatgttagccttttctctctgtggcgacttttctgccttcccttcttctgttttttgtgatcattcttagctacctgtgccaagtcacagttagactacctcagaatgtagtcaagaattcacccagtgttctttggatgtcccttccctagggggaaaggctggggaatgttgctgggagcattcccagctgcctctccaaagtggtcctaactctgccttggctatggtgcagacattccaaaaagtgttttgtatacagccctgtacatctagttttcttggttctccctggcaagttcgctaccctagcttaggctgacgttctgatgagtctctgcttgctgagctcatcactgtgggatggtgacctgcagagctgcagattggagcaagtggacagaggagggagccagctaagccaaatccgtcactgccacttggctggcaggccttataagagggcggatctgggcccgtttgcaggaggccattgcctaccctctccccacagtgagccagcagccatcagctgatcccacctgggaaaccttcatgcctctctgatggttactgcccacccttaccccacccctcagctcagcctggtatggaaagcaaggtgcacgttggtctttgattgttctgtcctcacagcagagccagctttccccccatgttgctgctgcttttgctgctcatgctgcttgttgttttctcttccttatctttccaaattgtttccttgaaatgcttgtttccaatttttcttagattatgtttctaatttttattccaggtgtttttttttcttacttgacagaaaaaaagaaaaccccaacaatatcttgctgtattatcacattttttataaagttaaagcatttctcttacaaaaaaaaaaaaaaaa

SEQ ID NO: 3835 - DNA, 6363 bp, Homo Sapiens
  NM_014832
gcggccgcggggaccctcggcgtggtcctctgaccctgcaaacccgcgacggaggaaggggaggtcctgcccgaggcgccagcccaaggaggaggatgcccatttaacccgccctcgcctgccgggcgcttgcctcggtgcccgccgccggagcctccgagccgcgcccgtggaagtgctgcatggggcagggctgctgaagcgcggagttcggggtcgcgccgctcccaggcaggcgcgggagcccggtgcggcagttggcacagtttcggcggcgccttctgcgcgggagtggggggcgcggtgcgcccggccggcctccgcggtgccctggtgaggcgagagttatggagccgcccagctgcattcaggatgagccgttcccgcaccccctggagcccgagccgggcgtctcagctcagcccggccccgggaagccaagcgataagcggttccggctgtggtacgttggggggtcgtgcctggaccacaggaccacgctgcctatgctgccctggctcatggccgagatccgcaggcgcagccagaagcccgaggcgggcggctgcggggcgccggcggcccgagaggtgatcctggtgctcagcgcgcccttcctgcgttgcgtccccgcgccgggcgctggggcctcggggggcactagtccgtcggccacgcagcccaacccggcggtattcatcttcgagcacaaggcgcagcatatctcgcgcttcatccacaacagccacgacctcacctactttgcctacctgatcaaggcgcagcccgacgaccccgagtcgcagatggcctgccacgttttccgcgccacagaccccagccaggttcctgatgttattagcagcataaggcaattatctaaagcggccatgaaagaggatgccaaacccagcaaagataatgaggacgccttttacaactctcagaagttcgaagtcctgtactgtggaaaggtgaccgtgacccacaagaaggccccctcaagcctcatcgatgactgcatggagaagttcagcctgcacgaacagcagcgcctgaagatccaaggggagcagcgcggtccggacccaggagaggacctggctgacttggaggtggtggtgcccgggtcccccggagactgcctgccggaggaggctgacggcaccgacacccaccttggcttacctgccggggccagccagcctgccctgaccagctctcgggtctgcttccctgagcggattttggaagattctggctttgatgagcagcaggagtttcggtctcggtgcagcagtgtcaccggcgtgcaacggagagttcacgagggcagccagaaatcccagccgcgacggagacacgcgagcgcacccagtcacgtccagccctcggactcggagaagaacaggaccatgctcttccaggttgggcgatttgagattaaccttatcagtccagacactaaatcagttgtgctagaaaagaattttaaagatatctcctcttgttctcagggtataaagcatgtggatcactttggctttatctgccgggagtctccagagcctggacttagccagtatatttgttatgtattccagtgtgccagcgaatctctggttgatgaggtaatgctgactctgaaacaggccttcagtacggcggctgccctgcagagtgccaagacgcagattaaactgtgtgaggcctgcccgatgcactctttgcataagctctgtgaaaggattgaaggtctctacccaccaagagccaagctggtgatacagaggcatctctcatcactgacagataatgagcaagctgacatctttgaaagagttcagaaaatgaagccagtcagtgaccaggaagaaaatgaacttgtgattttacacctgaggcagctgtgtgaagccaagcagaagacacacgtgcacatcggggaaggcccttctactatttcaaatagtacaatcccagaaaatgcaacaagcagtggaaggttcaaacttgacattctgaaaaataaagctaagagatccttaactagctccctggaaaatatcttctcaaggggagctaacagaatgagaggtcggcttggaagtgtggacagttttgaacggtccaacagtcttgcttcagagaaggactactcaccaggggattctccaccagggacaccgccagcgtccccaccgtcctcagcttggcaaacgtttcccgaagaggattccgactccccgcagtttcgaagacgggcacacacgttcagccacccaccttcaagcacaaagagaaagctgaatttgcaggatgggagggctcagggtgtgcgttcccctctgctgaggcagagctccagtgaacagtgcagcaatctttcgtcagttcgacgcatgtacaaggagagtaattcttcctccagtcttccaagtcttcacacttccttctctgccccttccttcactgccccctctttcctgaaaagcttttaccagaattcaggtagactgtccccacagtatgaaaatgaaatcagacaagacactgcttcagaatcaagtgatggagaagggagaaaaaggacctcatctacctgcagcaatgagtccctaagtgtgggaggaacctctgtcactcctcgccggatctcctggcggcagcgcattttcctcagggttgcttctcccatgaacaaatctccctcagcaatgcaacagcaagatggattggacaggaacgagctgctgccactgtcccccctctctccaaccatggaggaggaaccgctggttgtattcctgtctggggaggatgacccagaaaagattgaagaaagaaagaaatcaaaagaactgaggagcttgtggagaaaagctatacaccaacaaatcttgttacttcgaatggaaaaagaaaaccagaaacttgaagcaagcagagatgaactccagtccagaaaagttaaattagactatgaagaagttggtgcatgtcagaaagaggtcttaataacttgggataagaagttgttaaactgcagagctaaaatcagatgtgatatggaagatattcatactcttcttaaagaaggagttcccaaaagtcgacgaggagaaatttggcagtttctggctttacagtaccgactcagacacagattgcctaataaacaacagcctcctgacatatcctataaggaacttttgaagcagctcactgctcagcagcatgcgattctcgtggatttaggaaggacgtttcctactcacccttacttttcagtacagcttgggccaggacagctgtcactgtttaacctcctgaaagcctattctttgctggacaaagaagtgggatactgtcaggggatcagctttgtggctggagtcctgcttctgcacatgagtgaagagcaagcctttgaaatgctgaaattcctcatgtatgacctcggcttccgcaagcagtacagacctgacatgatgtcgctgcagattcaaatgtaccagctgtccaggctccttcatgactatcacagagatctctacaatcaccttgaagaaaatgaaatcagccccagtctttatgctgccccctggttcctcacattgtttgcctctcagttttcattaggatttgtagccagagtttttgatattatttttcttcagggaactgaagttatattcaaggttgcactcagcctactgagcagccaagagacacttataatggaatgtgagagctttgaaaatattgttgagtttcttaaaaacacgctacctgatatgaatacctctgaaatggaaaaaattattacccaggtttttgagatggatatttctaagcagttgcatgcctatgaggtggaatatcatgtgctacaggatgagcttcaggaatcttcatattcctgtgaggatagtgaaactttggagaagctggagagggccaatagccaactgaaaagacaaaacatggacctcctagaaaaattacaggtagctcatactaaaatccaggccttggaatcaaacctggaaaatcttttgacgagagagaccaaaatgaagtctttaatccggaccctggaacaagaaaaaatggcttatcaaaagacagtggagcaactccggaagctgctgcccgcggatgctctagtcaattgtgacctgttgctgagagacctaaactgcaaccctaacaacaaagccaagataggaaataagccataattgaagaggcacggcctcagcagaaagtgctccttagaatactacagagaggaagagcctgcatgtcgctggcccaaggctggaccctgaagctgatggaaccacctaatactggtgctgagcgcctagtcacagcaggtggacctcgtgctcatcagagcatgccaatcctaagccattggacatatgtagactggtttttgttgttgctatgtacatataaatatatatataaaatgaacatagttcatgctttcagataaaatgagtagatgtatatttagattaatttttttagtcagaacttcatgaaatccacaccaaaggaaaggtaaactgaaatttcccttggacatatgtgaaatctttttgtctttatagtgaaacaaagccagagcatctttgtatattgcaatatacttgaaaaaaatgaatgtatttttttctccaaagaacagcatgtttcactcaatggtgaaaaggtggaaacatttatgtaactttatgtgtatctgtcttgatatctactgacattgtctatatgaggaaaatgattactggtcatgctcctgtgagttttttgggaaggtagggtcatttctccctgcctgctttgtgccaactagcatgttgcatctacatgcattatgagtctggttaggcattactttaaacatacataaagagacagtaggacattgtggctgagtctacccagctcaaggtaaaggagaatgttgctaattttttagcaaactagaccagcattattactcaaactaaaaatatcacacctgaaaaatttaatttaggacctaaaatgtctagattagctttctgctttttttatttgaataactcattcagttgtgaatgaattcctctttatttggtgccacagtcaccaaatgacaaggatttgccactttcccaccaaattgtgagtgcttgtaatttaggtctctctaccttaaattcagtataaggaaacgtaattatgattgattttttccaaagatgacaagctgtgttgaaatacattttttcttttgaccaattgacagaatctaataagctttaataatcttccccttttatgtgaaaagttttgagaactgtgaaatgtttaggaacaaactgttgaaatccattggaagggaaaaaagaaagtggtaccagtgttaccagctcaactaaaacctgcaattctgcatttcaactcttcacttcctcagcctacaaatagctcattagatgacattcacgcatgctgggtataggcaaggaaagtaattttcaaagtacatttgcagttctctttttcagagatgattctatgatagtgcctctgaaagttgatgcagcatttttgcctttccaaaaagtatttatcctcactgctttttgcagtacttgtattttcacagatggattatctggggtaattttcttcaaagggagtttgttatacacagtgaaaatgtattatagagtagaatagtaaagctctaggggtttcagaaagctttgatgaacagatgacaaacatctgaaaccccctccgcactgttacccagtgtgtatataatgacttgttatagctcagtgtgcccttgaatccatacagtttcttaaaagacaataaaatcttattaataaagttaatgtaacttctaagttctagaaaatgctgattctgtctgccccattcaattgggggctactaattgatttgttgcttggatttcctgagaatttctctatttgtaggaggggttttttctttttacggtctgttgatgacaattactttatgggtgtgatgcaccgatggtagccaaggaatctgttggggaagttcggaaagaaaccttttctttcttttattcagtttaaagtaaactttatcctggatgtttagaatcaacattaagagttatattatggtgttcagagattaagctgacttggatacaatattttcttttgaaaatgaattttctttttcatttgtgatttttaaaaaatgttgcaccagttatgcttcatgcatcgttacatcttcatcaggttaatgtaatgtctagttcctttgcaataaatatattgctgcagcttt

SEQ ID NO: 3836 - DNA, 6821 bp, Homo Sapiens
  NM_014840
aatctcccaaggcctaaggaggcaagaggcctgcaaatcgcctcctgctcagcaaacgggttgctcagcaggcccggggtcctggtccaccccaggtccctggtttgcccacctccgatggcggccttcgctggcagggtgggcgcctctggggagccagctccgtcccggcgcctttagagccccatctcttccacgtccctggccttcctccccttccaggcggctgtccccgccggggtccagatggtgtcggagggccggcggttcgacggcgggcccggggttcagcctcccggcctccctccgtccctgactctcctttcttcggagagggcgcgggggccggggccaaagcgccgctcttggggttctcctggactcggagttgccccaggcgggcgcagctctgccccgcggggtgccagcctcgggcgggcaaggtccgtgagtcaccgcctgtaaccgaacaccaggcctccctgccccctcccccagctccggccgccaggctgcggcgacacctacaagaaaatgaaggggcgcccaggcccgcggcggccccggccgtatcgcgagcaggtcccggcggcccccggctcgcggcgctctttcttccccggccccggggctcggccagccgcaaccgccgccccggcgccagcaggaatccaggccgagcgaccggccccggagcccgaggcggcggagggcccgcggtagctgcgactggcgagcccgagagcgcccggggagggggcgcccggcttggaatttcccggtcccttccggcccagcgaggacaaagcactcctggccgccgccgccgccgccgccgtggcctacgccgcgccgcacaaagggcgagtcgcgacacgctcccatccccctcccagctcacggcggccccggccccgggtggctgcagggaggtgggggaagccctggctgcaccgcccctcgctccccctcccctggggccgcgcgagcgccgcccccgccccgtctgcgcgtcctcccggggaggggttggggggcgcggcgccccacataacactccccctcctgcgctgcgagccaccctctcccctccctcctgcaaacaccaccgcctcccctgccaccgccgccacctcgcccgacgctccacagctcgccgcggccggggggcggtgcgcggaccgtgcgcgccgcgggcgccagatgtgcagtccccgccgccgccagtgaccgagccgcagtccgagcggtatcgggccgcctccctgatgctgcgggggcgaccttgagcgtacagcggcttccctcggtggggaccccgacatcccagcgctgtgcccggtcttgccctctgtagcccggctcgccccgcgcttggacatggaaggggccgccgcgcctgtggcgggggaccgccccgacttggggctgggggcgccgggctctccccgagaggcggtggcgggggcgactgcagccctggagcccaggaagccgcacggggtgaagcggcatcaccacaagcacaacttgaagcaccgctacgagctgcaggagaccctgggcaaaggcacctacggcaaagtcaagcgggccaccgagaggttttctggccgagtggttgctataaaatccattcgtaaggacaaaattaaggatgaacaagacatggttcacatcagacgagagattgagatcatgtcatctctcaaccatcctcatatcatcagtatttatgaagtgtttgagaacaaagataagattgtgatcatcatggaatatgccagcaaaggggagctgtacgattacatcagtgagcggcgacgcctcagtgagagggagacccggcacttcttccggcagatcgtctctgctgtgcactattgtcacaagaacggtgtggtccaccgggacttgaagctggaaaatatactgctcgatgacaactgcaatattaagattgctgactttgggctttccaacctgtaccagaaggataagttcttacaaacgttttgtgggagtccactctatgcatctcctgagattgtcaatgggagaccttaccgagggccagaggtggacagctgggccctgggtgtgttgctttacactcttgtttatggaacaatgcccttcgatggtttcgatcacaaaaacctcattcggcaaatcagcagcggagagtaccgggagccaacacagccctcagatgctcgaggactcatacggtggatgctgatggtgaaccccgatcgccgggccactattgaggacattgccaaccactggtgggtgaactggggctataagagcagcgtgtgtgactgtgatgccctccatgactctgagtccccactcctggctcggatcattgactggcaccaccgttccacagggctgcaggctgacaccgaagccaaaatgaagggcctggccaaacccacgacctctgaggtcatgctagagcggcagcggtcgctgaagaaatccaagaaagagaatgactttgctcagtctggtcaggatgcagtgcctgaaagcccatccaagttgagttctaagaggcccaaggggatcctgaagaagcgaagcaacagcgagcatcgctctcacagcactggcttcattgaaggtgtagttggtcctgccttaccctctactttcaagatggagcaggacttgtgcaggactggcgtgctcctcccaagctcaccagaggcagaggtgccgggaaaactcagccccaagcagtcggccacgatgcccaagaaaggcatcttgaaaaagacccagcagagagaatcaggttactactcttccccagagcgcagtgagtcttcggagctgttggacagtaatgatgtgatgggcagcagcatcccctcccccagccccccggacccagccagggtaacctcccacagcctctcctgccggaggaagggcatcttgaaacacagcagcaaatactcagcgggcaccatggacccagccctggtcagccctgaaatgcccacactggaatccctgtcagagcctggtgtccctgccgagggcctctcccggagctacagccgcccttccagtgtcatcagcgatgacagcgtgctgtccagcgactcttttgacttgctggatttgcaggagaatcgccctgcccgccagcgcatccgcagctgcgtctctgcagaaaacttcctccagatccaggactttgaggggctccagaaccggccccggccccagtacctgaagcggtaccggaaccggctggcagacagcagcttctccctcctcacagacatggatgatgtgactcaggtctacaagcaagcgctggagatctgcagcaagctcaactagcattccagggcgcccaggggcgggcgggggtacgagggaggaaggggagcaagacttgggctcacaggctggttacctctttgctggctgtgacaacagactgaaaaaggattggcactgtctcacttggccaagtttgcagccttgagccaacacctaaaagggagaggtgggctcttctgccagttctgtcaattgtcagtcagaatttgggccctgtttggcatttgctttatggcacctcctagaggaccagctgtccaggggaggtggtattgaccggcactcagtgggtggagaggaagcatatgtggaaggagcatttccttagaagtcatccagatgcttctggaggaggggcaggagacacttgggctgtttgccttgggtgagcccaaagaacttgccccttttctccttgtattagcaagctaggtctggctgcgtggagctggcaagtagatttcagcaacttgagcttgagttgacgatcaattaatagtggctgccagttgtgctggcgtaagtggcccacatcatggggaaggagtgctgtgattgactagtaatggctaccacgggaaagggaaggggaagcagtagcactaatgctatgtagttgtcatctttgatctggctaggccctgggaatcgggtttagtcatcctgtgggatctatgttaactctttcatgccactggtgaggcatttgttaatttgctactcaactttgaggaaagacagggccttggtcagagagagaatgctctgaactctgctaaggacatagagtcagcccatggtgatttagctccttgctgttcacctcctctttcctgatgtctgccttgctctacagcacaacctcttgagggtggacagggagaaagatgatggtgtcagaggtcaaaactattatatatgacagggcacaagatggtctgtgatctttgcacagatgaatggaagttgatgcacaccaacaagaggcaacttgtcactttctttctcaatattaactggaatgctgcctcttgggttctcacctgcatggatgctttgagttggacgtgatactgtccatattctccagaggattacctggctgaaccattggctctgttcaccagtgacagatggtttccccatccactgagtgtagcatcctcagaggtaggcaagtttgcttctagggagttagcatgtagatgggatattgggatgaggaaaggaaaatcaggtagatggtgctttttttcccccaaatctaagtattctatgtcatggttttaaactttgccatgaactcctgggctttgggggaagagaaagttccattcatttaaatgaataaggtgttgaaagagtgcagggggttgggaggaagcatgtaagagagggaacatttccttagatgttacccagatggttctgggggagacagaaaagaggtgcggcaggactcttatcttaaaaagtaaacaaaacaaaacaaaacaaaacaaaaaactagatatgtaatttctaaacacccagatcacaatgacaagatgccactccaaccatgggacaccttcatgatactaggtttgtacttcctggtctctgggatgacttcagattctgctggccaaggcaaattgaactcagttcaagatggccaccactggtagacgtgtagatagaaaagaggactggtcttgggaacatctttggaaaaaccaacaaacaatagttctagggagatgagaaaaaaattcaccttacagtgctaagaaagtgcattagaatggaattgccctttccttaaggagacagtttgggctctccccttgccaccggctctggtgttttggcttatgcgttccttcaggttgagctgagcagtgtgttatgggaagctgctcaatttcctttcattcaattccacctccttcctgaactctaatagaggttaaaagggaaaaaaaaaattctgtagatagcaaattgtgtgtgtgggggggggtgggggtgtgggtgcatggaggacaacctgcaactctgagctccctacttcctgcctcatttcatgcagtcttttctgaacagcctatgctgctgccctgctggccccttgtgcacggcagctggccgtgtccgtagctgtcagtatgacttagatctagctcctacctactggttgatgtgttttttccttttgccaagtgattgagtctgtttagtagtttccatcattctagtctttaagtaaaaatgacactattgaggaaagtcagtctactcccttcttcctccccccaaacacgtgttctcttttgtcaggaaactcagccagtggactgtggcagagaaagtcctccactcagaggcagagactgagttaagtcataggtggccttaggcatctgcattgtttgcaggggttaagttttccttccagtgagggctggagggatgaattagctggtacctgaagccccgcttagctctgacactctgccaacatcctctgattctaggtgtggtgttgactgtcctttcaaggaaaaacttgcaatagagggaaaagccattaaagcagctccctgcttcatcattaagtcctgtcatccctaccagccaatcccagtcaaagaagttatgctttattcacttctgtggaattacaagtgagagacacttttaggacctgatggacaaagcaggagattcactgtcagctttcctggtcctctccttacttctgtgggccttgcaccgtcttagtttacacatctgccaaaggggtagaattacacttctttttacaggtaaatgtcaaggcacaatcagttttcaggaagtgcttcaagaccccaggtgaaatgaaaatgctaagtaccctctgaatggccatgcctgttaccaggtgctgcttcttcagatgatggggagcacttttcagggtgaaattcaggcgagttttgcccaggcctgctgtcttgagtacaaatgtgaatgatcgactgactgcttgttgccaaactggaaatgttctgtagggatttactggcatggtatcattcctagaagaaaaaaagagagaaacttgactgcacattaaaaaaaaaaaaaaatccacattgtgacttttatttaatttctattttttttggtaataaaaagttgacttttttatttgaatttgtcttttttatttattggtctgaaaggcatttcaaaggtattataataatatattggtgtaatttaattggtgcaacatgctttatggctcctgtcaaaattggttttcactcatttgattggtttgagcccagaacagcctacaggggaaaaacaagctggataaccacccaaagtgtttgtattttcgttggaaactgatttttgtttcattttggtttttgtttctgtttttatttttaaattaaataaattgcaatgaactg

SEQ ID NO: 3837 - DNA, 8703 bp, Homo Sapiens
  NM_014844
cccccggcggagccagctgctgctcttcggtgctggccccggtgccggccccgttgcccagggaacaggctcccggcagcccccgcggcccggagtccatcccgcctcctccggcccggcggggccgacgagtccggaggggctgccgcgggagcccccaggtttccctagatgacaaataaacattccttttcctgcgtgaagatagtctgtggaaaccttggccatggcatcgatatcagagcctgttacattcagagagttctgcccgttgtactatctcctcaatgccattccgacaaagatccagaagggtttccgctctatcgtggtctatctcacggccctcgacaccaacggggactacatcgcggtgggcagcagcatcggcatgctctatctgtactgccggcacctcaaccagatgaggaagtacaactttgaggggaagacggaatctatcactgtggtgaagctgctgagctgctttgatgacctggtggcagcaggcacagcctctggcagggttgcagtttttcaacttgtatcttcattgccagggagaaataaacagcttcggagatttgatgtcactggtattcacaaaaatagcattacagctctggcttggagccccaatggaatgaaattgttctctggagatgacaaaggcaaaattgtttattcttctctggatctagaccaggggctctgtaactcccagctggtgttggaggagccatcttccattgtgcagctggattatagccagaaagtgctgctggtctctactctgcaaagaagtctgctcttttacactgaagaaaagtctgtaaggcaaattggaacacaaccaaggaaaagtactgggaaatttggtgcttgttttataccaggactctgtaagcaaagtgatctaaccttgtatgcgtcacggcccgggctccggctatggaaggctgatgtccacgggactgttcaagccacgtttatcttaaaagatgcttttgccgggggagtcaagccttttgaactgcacccgcgtctggaatcccccaacagtggaagttgcagcttacctgagaggcacctggggcttgtttcatgtttctttcaagaaggctgggtgctgagttggaatgaatatagtatctatctcctagacacagtcaaccaggccacagttgctggtttggaaggatccggtgatattgtgtctgtttcgtgcacagaaaatgaaatatttttcttgaaaggagataggaacattataagaatttcaagcaggcctgaaggattaacatcaacagtgagagatggtctggagatgtctggatgctcagagcgtgtccacgtgcagcaagcggagaagctgccaggggccacagtttctgagacgaggctcagaggctcttccatggccagctccgtggccagcgagccaaggagcaggagcagctcgctcaactccaccgacagcggctccgggctcctgccccctgggctccaggccacccctgagctgggcaagggcagccagcccctgtcacagagattcaacgccatcagctcagaggactttgaccaggagcttgtcgtgaagcctatcaaagtgaaaaggaagaagaagaagaagaagacagaaggtggaagcaggagcacctgtcacagctccctggaatcgacaccctgctccgaatttcctggggacagtccccagtccttgaacacagacttgctgtcgatgacctcaagtgtcctgggcagtagcgtggatcagttaagtgcagagtctccagaccaggaaagcagcttcaatggtgaagtgaacggtgtcccacaggaaaatactgaccccgaaacgtttaatgtcctggaggtgtcaggatcaatgcctgattctctggctgaggaagatgacattagaactgaaatgccacactgtcaccatgcacatgggcgggagctgctcaatggagcgagggaagatgtgggaggcagtgatgtcacgggactcggagatgagccgtgtcctgcagatgatggaccaaatagcacacagttacccttccaagaacaggacagctctcctggggcgcatgatggggaagacatccaacccattggcccccaaagcactttttgtgaagtccccctcctgaactcactcactgtgccttccagcctcagctgggccccaagtgctgaacagtggctgcctgggaccagagctgatgaaggcagccccgtggagcccagccaagagcaggacatcctaaccagcatggaggcctctggccacctcagcacaaatctctggcatgctgtcactgatgatgacacaggtcagaaagaaatacccatttctgaacgtgtcttggggagtgtgggaggacagctgactccggtctctgccttggcagccagcactcacaagccctggcttgagcagcctccacgggatcagacattgacgtccagcgatgaggaggacatctatgcccacgggcttccttcttcatcctcagagacgagtgtgacagagctcggacctagttgctcccagcaggacctgagccggctgggtgcagaggacgccgggctgctcaagccagatcagtttgcagaaagctggatgggctactcgggtcccggctatggcatcctcagcttggtggtctccgagaagtatatctggtgcctggactacaaaggcggcctgttctgcagcgcgttgccgggcgccgggctgcgctggcagaagtttgaagatgctgtccagcaggtggcagtctcgccctcaggagcccttctctggaagattgaacagaaatctaaccgggcttttgcttgtgggaaagtcaccatcaaggggaagcggcactggtacgaagccctgccccaggcagtgtttgtggccctgagcgatgacacggcctggatcatcaggaccagtggggacctatacttgcagacaggtctgagcgtggatcgcccttgtgccagagccgtaaaggtggactgtccctacccgctgtcccagatcacagcccggaacaatgtggtgtgggcgctgacagagcagagggccctcctgtaccgggagggcgtgagcagcttctgtccggaaggcgagcagtggaagtgtgacattgtcagcgaaaggcaagctttagaacccgtctgcataacgctcggggatcagcagactctctgggccctggacatccatgggaacctgtggttcagaactggcattatttccaagaagccccaaggagatgacgaccattggtggcaagtgagcatcacggactatgtggtgtttgaccagtgcagcttatttcagacgataatccatgccactcactcggtggccacagcagcccaagcccccgtagaaaaggtggcagataagctgcgcatggcgttttggtcccagcagcttcagtgccagccaagccttctcggggtcaataacagcggtgtctggatctcctcgggcaagaatgaattccacgtcgctaagggaagtctcataggcacctactggaatcatgtggttccccgtgggacagcttctgctacaaaatgggcctttgtgttggcttctgcagctcccacgaaggaaggaagcttcctgtggctgtgccagagcagcaaggacctgtgcagcgtcagcgcccagagcgcacagtcgcggccctccacggtgcagctgcctcccgaagccgagatgcgcgcctatgccgcctgccaggatgcgctgtgggcgctggacagcctcggccaggtgttcatcaggacgctctccaagagctgccccacgggcatgcactggaccaggctggacctctcccagctaggagctgtaaaattgacaagcttggcatgtggaaatcagcacatctgggcctgtgattccaggggtggagtttacttccgtgtagggactcagcctctcaatcccagtctcatgcttccagcctggataatgattgagccacctgtccagcccgccggggtcagcttggtcagcgtccattccagccccaacgaccagatgctgtgggtgcttgacagcaggtggaacgtgcacgtgcggaccgggatcaccgaggagatgcctgtggggaccgcctgggagcatgtgccagggttgcaggcctgccagctggcgctgagcaccaggaccgtgtgggcccgctgtccaaacggagacctcgcccggcggtacggcgtcacagacaagaaccccgccggggactactggaagaaaattcccggcagcgtgtcgtgtttcacagtgactgcgtcagatgagctgtgggctgtgggcccgcccggctacctcctccaacggctgacaaagacgttcagccactcgcacggcacccagaagagcagccaggccgccatgccccaccctgaggacctggaggacgagtgggaggtcatctgaaggagccctggccgagtcacgcggaggggcccggcgtctgtggcgggcacaggggcttcagagtgactccctggtggacgcgctgcctcaacacttgtccagacacctctggccaggttggacccgcacacttactttcatctatgttggtttctgtctcgttccagaacccacagcctccacccgtggctggcgtgattgctgcagcagtggcgcctcctagctcaggacagtggcgactgcccggctgcatgcactccgattacccacgtgctgccgtcctggtctcatccacagatagctccagcttttgttggtgggagtggtctccggaggcctcccagaaccaagggtagccgggcagctggtttggcccagggcctccttccacattagtagccccagggccagatggagccaaaggtcagctctctgcagcgcgggatgtgctcggtgatggctttgtcccatcataggggggtgtccccccagagacaaagctgcagagcacattccatgccagacgctctggccaggaagctgaggccgggcttgagaggagagcgctggccatgccaggagagaacccacgcacatgcacaccacaacacacaacacacctcacctcacaccacagcacacctcaccacaccacaccgcactgcaccatacctcaccacatctcaccacaccacagcacacctcaccacacaacacaccacaccccacaccgcactgcaccgcaccgcaccgcaccgtacctcgccacatctcaccacaccacaccacaccacacctcactgcccacacacggcgcaggctgcccgcctcctggagagcacacttcagctgaaacagtaaagcctgatgggtgcaaatggaacctggatgtgtgcacgtgtgtcccaggtagggacggcacaggagggtgcatggggcgtgggggagctgagcaagggtcgctcacttagaaatgtctttggaatggtgtttaactaatgctgctggcggacatcctaaaaccagatgcatcctcagaggacgagtctactaattattgcctttgttgttgtattacaaatctgcataaaatacctcatttcaaatcaaatcttacaaatttagaagagagatatgttttccgaaaacagtggaagccctttgttccttcccgggtttgtcctgagcctgcactgtcctcgcctgcagcctcagaggggcaggcatccccgcacagacttgactggcagggcggtcacgggacctgcgggctggctccgagtggcagcccatgccttctgcggggtatgggttgacacttgacaggttgaaaccagtgcctctatggacggctgctgtggccccttcagacaatgggcagtgcccaccccgcccactggcatctgcgtgtgagggctaggccgccctgccacacatcccgccccctcccggaggcagcttcaggacaggacaccaggctggctgctttttttagcctgcccctggcccaggcccagtccttggtgtcagggagcccccaggccgcaggtggagggtgataaaatatgttctctgacaggacccagccagccacataggtggaggttttccatgtccaaatgaggtcaagatgccgaaatcccagatctgacttcacacttcccttttctagaaccttttgtaaaagttggtggcagcagaggcagccccaggccgggctgcatctctctgtgtctgttgtgccttgcccggcgcctcacggatggcaaagctctcctcacccatgggactgtagtgcaattaaacccgcgtctaggtgatgcttttaaagttgtagcttcgtgctttgtacagttttctttctggttttaatttttagttgtgctttgagtcagtgcaataaactagactttttccaaacctggccgagtgtggtgcctgagctgtgagaagtgtcctcagccgacactcacgagggcagtgcaagggagaacctgccagcccagccccaccacagggagagtgcgtcagcagacctgtcctggcctggctggtgttgaaatacacaccggtttgcccaagtggctgttatgggggaatggccgctccagagctggctgtaccccatggtagcctctgaggaggacgctgtggggtgaggtccagggctgcctcctcatggagctgtgtgtgagcaggcgttggaggggttcgagcccctggttctgtatcttcagccagcaaacgaaaccatatcgcaaaccagagctgctggaaaccagcacacgcaaaagatgacgcccagcacagcagcaggacacaccatgtgccaggaaatgacctcagcaagaaacctcaggccgtgtgaagagcagcaaagctttccagaaggcataaaaggaaacttgaataaaggaagatatgttccacattcctggatggaggactacacacattatggaaagacctcattctttccaaaggaatttataggtgtagcttgatttcagttcaaatccccactgggattgttttgttggggcaggcagggaggaataatgttagtacccacaaatgcccatgactgtgcccaatgtgcttctcaccagagccctgcaaggggaagtctcattagccccttgagactcagagaggttaggtaacttgctcaaggtcacacagcactgggactggaagccagctctgtagaactgcagacctgtgctgtttgatgcctcctcactgtcccgtcactcctgggaagaagaaacgggtgagaactgctaagtgatgacaggtggagccccagcaggggccactctattgaatggcatggcccagaccctcggagggccaggcaacaggctagcaaggcccacagggagggagcagaatggagagggcatctcagatgcgcttaaggagcggcgggggcggggcatggggggtgtcacaactaatgtggccactgcttcattctctgggcaaaataatattaaatggattaaagaatctaaaaccagtgggaaaactgtctgatttctggatggcaaaggctttctaaactcaaaagtgataggacaagctacagaggaaaataagtacatagatttgatttctccaaaatacagaaatgctgctgggcacagtgatgtgcagttatagtcccagctacttgggaggccaaggcaggaggattacttgagcccaggagtttgaggctgcaatgaactatgatcacaccactgcactccagcctcggcgacagagcaagaccttgtttctcaaaaataaataaatagaaggaaataaatgtaaaaatgctgcaaattaaaaacctcaaagaagggaaataattgcaacaaatgggaattgatgttgaatatttaccttaaaaacctatacaacaataagaggagtgcgcccttcagcagcatgtatacaaaaattgcaacgatacagagattagcatggcccctgcacaaggatgactcgcaaattcataaagctttccataaatatatttattaaaaaccaataggaggagcacttcgagtcgagtgtaagggcccttcacaaaagcagaaggaacactggcccaaacccccagcaccccggaagcagaggtgagatgggagcagcttgggagccccccattggcgccgccctactggggaagccggtccgtacgtaggccttgcatctcgccacctccacttctgtcctcaagaacaagtcctaggtcaagggaaacagcacagcctgtttataattaggaaacacttaaaacagcctggcatttgggaacagccatgttaacgtgagcaaattcctctcatgaaatagcctgcagctattaagaagcacgtgtgtgcaggaagcggaggcgcaggacctcaccgcgccagcgtgaagttcccgggcatggtcatgaaagcgtggttctgtaagaaatcagagggagaaagggagagaagggggagggagacaacccaaacgttggagggtatttgttgtaaacttcaaacttttggcaggtttgaaatttttcataactccggggaggagcaagaggggtgaaaagaaacaagttctctacttgtgatcagcagctggtcatagtggttgcctggagtatatgcctttttgtatcctttgaatttccagccatgtaaatgtattatttattccaaaaataaagcagatttacattttaaaaattcaaaaaaaaaaaaaaaaaa

SEQ ID NO: 3838 - DNA, 3123 bp, Homo Sapiens
  NM_014845
acgtcctccagccccgctcccgacgtgaggggcggggcttgcctggaggcggggcgcagggatccggaaacacctgatcatctataggtttagtgcctaatgggtgttgttcctggctggacttgatgtccagggcctgaggggttttctcgccgagtctcctggggcggtccggaggctcgtgccctgttgtggggcccccatttgccgccgccatgcccacggccgccgcccccatcatcagctcggtccagaagctggttctgtatgagactagagctagatactttctagttgggagcaataatgcagaaacgaaatatcgtgtcttgaagattgatagaacagaaccaaaagatttggtcataattgatgacaggcatgtctatactcaacaagaagtaagggaacttcttggccgcttggatcttggaaatagaacaaagatgggacagaaaggatcctcgggcttatttcgagcggtttcagcttttggtgttgtgggttttgtcaggttcttagaaggctattatattgtgttaataactaaaaggaggaagatggcggatattggaggtcatgcaatctataaggtcgaagatacaaatatgatctatatacccaatgattctgtacgggttactcatcctgatgaagctaggtatctacgaatatttcaaaatgtggacctatctagcaatttttactttagttacagctatgatttgtcccactcacttcaatataatctcactgtcttgcgaatgcccctggagatgttaaagtcagaaatgacccagaatcgccaagagagctttgacatctttgaagatgaaggattaattacacaaggtggaagcggggtatttgggatctgtagtgagccttatatgaaatatgtatggaatggtgaacttctggatataattaaaagtactgtgcatcgtgactggcttttgtatattattcatgggttctgtgggcagtcaaagctgttgatctatggacgaccagtgtatgtcactctaatagctagaagatccagtaaatttgctggcacccgttttcttaaaagaggtgcaaactgtgagggtgatgttgcaaatgaagtggagactgaacaaatactctgcgatgcttctgtgatgtctttcactgcaggaagttattcttcatatgtacaagttagaggatctgtgcccttatactggtctcaggacatttcaactatgatgcctaaaccacctattacattggatcaggcagatccatttgcacatgtggctgcccttcactttgaccagatgttccagaggtttggctctcccatcatcatcttgaatttagtgaaggaacgagagaaaagaaagcatgaaagaattctgagtgaagaacttgttgctgctgtgacctatctcaaccaatttttgcctcctgagcacactattgtttatattccctgggacatggccaagtataccaaaagcaagctgtgtaatgttcttgatcgactaaatgtgattgcagaaagtgtggtgaagaaaacaggtttctttgtaaaccgccctgattcttactgtagcattttgcggccagatgaaaagtggaatgaactaggaggatgtgtgattcccactggtcgcctgcagactggcatccttcgaaccaactgtgtggactgtttagatcgcaccaacacagcacagtttatggtgggaaaatgtgctctggcctatcagctgtattcactgggactgattgacaaacctaatctacagtttgatacagatgcagttaggttatttgaggaactctatgaagatcatggtgataccctatcccttcagtatggtggttctcaacttgttcatcgtgtgaaaacctacagaaagatagcaccatggacccagcactccaaagacatcatgcaaaccctgtctagatattacagcaatgctttttcagatgccgatagacaagattccattaatctcttcctgggagttttccatcccactgaagggaaacctcatctctgggagctcccaacagatttttatttgcatcacaaaaataccatgagacttttgccaacaagaagaagttatacttactggtggacaccagaggtgataaagcatttaccattgccctatgatgaagttatctgtgctgtgaacttaaagaagttgatagtgaagaaattccacaaatatgaagaagagattgatatccacaatgagttctttcggccatatgagttgagcagctttgatgataccttttgcttggctatgacaagctcagcacgtgactttatgcctaagaccgttggaattgatccaagtccatttactgtgcgtaaaccagatgaaactggaaaatcagtattgggaaacaaaagcaatagagaagaagctgtattacagcggaaaacggcagccagcgccccgccgccccccagcgaggaggctgtgtccagcagctctgaggatgactctgggactgatcgggaagaagagggctctgtgtctcagcgctccactcccgtgaagatgactgatgcaggagacagtgccaaagtgaccgagaatgtggtccaacccatgaaggagctatatggaattaacctctcagatggcctctcagaagaagatttctccatttattcaagatttgttcagctggggcagagtcaacataaacaagacaagaatagccagcagccctgttctaggtgctcagatggagttataaaactaacacccatctcggctttctcgcaagataacatctatgaagttcagcccccaagagtagacagaaaatctacagagatcttccaagcccacatccaggccagccaaggtatcatgcagcccctaggaaaagaggactcctccatgtaccgagagtacatcaggaaccgctacctgtgaaaagagcgcaggtccacctggtggacacgtctgattagcttagaacctgtcttgtctcatcttcaaaaggtaacttattaaaagtcctttgcgtctgaagcctttctccttttctgtcacttgcaaattccaaattatagctaataaagatgactagataatttgcaaaaaaaaaaaaaaaaaa

SEQ ID NO: 3839 - DNA, 4173 bp, Homo Sapiens
  NM_014846
acatgatgcccctccctgctcccagccgcttcggtcatgtgaccgcctggggagtcaggggcggaagtcggggtctgacccgctccaggtccgggactgcggatagaagaggaccgccgccttgagggaggggtggaaactgggtgccggctccgcgcgcgacctccggccctgcgcgtgcgccgtggcgcggcccggctgacaggttctttaatggaggagccaatctctctgcacacctggtttcatctaataatatacagacaccagctctgaggccagttaatcatccccagtgtccaggcacagagtagtcggtccgcctcacaatgttggactttctagccgagaacaacctctgtggccaagcaatcctaaggattgtttcctgtggtaatgccatcattgctgaacttttgagactctctgagtttattcctgctgtgttcaggttaaaagacagagctgatcaacagaaatatggagatatcatatttgatttcagctattttaagggtccagaattatgggaaagcaaactggatgctaagccagagctacaggatttagatgaagaatttcgtgaaaacaacatagaaattgtgaccagattttatttagcatttcaaagtgtacataaatatattgtagacttaaacagatatctagatgatctcaatgaaggggtttatattcagcaaaccttagaaactgtgcttctcaatgaagatggaaaacaacttctatgtgaagcactgtacttatatggagttatgctactggtcattgaccaaaagattgaaggagaagtcagagagaggatgctggtttcttactaccgatacagtgctgctcgatcttctgctgattcaaatatggacgatatttgtaagctgcttcgaagtacaggttattctagccaaccaggtgccaaaagaccatccaactatcccgagagctatttccagagagtgcctatcaacgaatccttcatcagtatggtcattggtcgactgagatctgatgatatttacaaccaggtctcagcgtatcctttgccggagcatcgcagcacagccctggcaaaccaagctgccatgctgtacgtgattctctactttgagccttccatccttcacacccatcaagcaaaaatgagagagatagtggataaatactttccagataattgggtaattagtatttacatggggatcacagttaatctagtagatgcttgggaaccttacaaagctgcaaaaactgctttaaataataccctggacctttcaaatgtcagagaacaggcaagcagatatgctactgtcagtgaaagagtgcatgctcaagtgcagcaatttctaaaagaaggttatttaagggaggagatggttctggacaatatcccaaagcttctgaactgcctgagagactgcaatgttgccatccgatggctgatgcttcatacagcagactcagcctgtgacccaaacaacaaacgccttcgtcaaatcaaggaccagattctaacagactctcggtacaatcccaggatcctcttccagctgctgttagatactgcacaatttgagtttatactcaaagagatgttcaagcaaatgctttcagaaaagcaaaccaaatgggagcattacaagaaagagggttcggagcggatgactgagcttgctgatgtcttttcaggagtgaaacccctaaccagagtggagaaaaatgaaaaccttcaagcttggttcagagagatctcaaaacaaatattgtctttaaattatgatgattctactgctgcgggcagaaaaactgtacaactgatacaagctttggaagaggttcaagaattccaccagttggaatccaatctgcaagtatgtcagtttcttgccgatactcgaaagtttcttcatcaaatgatcagaaccattaacattaaagaggaggttctgatcacaatgcagatcgttggggacctttctttcgcttggcagttgattgacagtttcacatccatcatgcaagaaagcataagggtaaatccatccatggttactaaactcagagctaccttcctaaagcttgcctctgccctcgatctgccccttcttcgtattaatcaggcaaatagccccgacctgctcagcgtgtcacagtactattctggagagttggtatcctatgtgagaaaagttttgcagatcatcccagaaagcatgtttacatctcttctaaagatcataaagcttcagacccacgacattattgaagtgcctacccgcctggacaaagacaagctgagggactatgctcagctaggcccacgatacgaggttgccaagcttactcatgctatttccatttttactgaaggcatcttaatgatgaaaacgactttggttggcatcatcaaggtggatccaaagcagttgctggaagatggaataaggaaagagcttgtgaagcgcgttgcctttgccctgcataggggactgatattcaaccctcgagccaagccaagtgaattgatgcccaagctgaaagagttgggagcgaccatggatggattccatcgttcttttgaatacatacaggactatgtcaacatttatggtctgaagatttggcaggaagaagtatctcgtatcataaattacaacgtggagcaagagtgtaataactttctaagaacgaagattcaagattggcaaagcatgtaccagtccactcatattccaatacccaagtttacccctgtggatgagtctgtaacgtttattggtcgactctgcagagaaatcctgcggatcacagacccaaaaatgacatgtcacatagaccagctgaacacttggtatgatatgaaaactcatcaggaagtgaccagcagccgcctcttctcagaaatccagaccaccttgggaacctttggtctaaatggcttagacaggcttctgtgctttatgattgtaaaagagttacagaatttcctcagtatgtttcagaaaattatcctgagagacagaactgttcaggacactttaaaaaccctcatgaatgctgtcagtcccctaaaaagtattgtcgcaaattcaaataaaatttatttttccgccattgccaaaacacagaagatttggactgcgtatctcgaggctataatgaaggttgggcagatgcagattctgagacaacagattgccaatgaattaaattattcttgtcggtttgattctaaacatctggcagctgctctggagaatctcaataaggctctcctagcagacattgaagcccactatcaggacccttcacttccttaccccaaagaagataacacacttttatatgaaatcacagcctatctggaggcagctggcattcacaacccactgaataagatatacataacaacaaagcgcttaccctattttccaattgtaaactttctatttttgatcgctcagttgccaaaacttcaatacaacaaaaatctgggaatggtctgccgaaaaccgaccgacccggttgattggccaccacttgtcctgggactgctcactctgctgaagcagttccattcccggtacaccgagcagttcctggcgctgattggccagtttatctgctccacggtggagcagtgtacaagccagaagatacctgaaattcctgcagatgttgtgggtgcccttctgttcctggaggattatgttcggtacacaaagctacccaggagggttgctgaagcacatgtgcctaatttcatttttgatgagttcagaacagtgctgtaactgtttttcctacttcttcaatggaaggattgtccttagatcttcccaccatcacaaatgaatttgaagatgaaaagaaactcagttgctcatacaactgcattttttctgtctattatgggaaacatcagacgttctgagtaagatatatctcatggcattagttaatataactgatattgtttaaatcatggtattacatgcaatttatatcagataaaagcagaacacatttttgtactgcctctcttaaatgctgaatgtaactgttatgtataaatccatttagttttatgttctaaagaactatttgtgcaactccagattttcagtaaaatagtattactagtacccaaaaaaaaaa

SEQ ID NO: 3840 - DNA, 4006 bp, Homo Sapiens
  NM_014847
aagtgggcgggggaaggcgcgagagcgagcgcgagagggaaaaggagggagggggtggggaagagggaatcttatatcacgtgacaggggcggcgcggcccggggtgtcagtgtggaggagactgagtattctaccttgtaaatactgttatttgtatatactgtaaatgatgacatcggtgggcactaaccgagcccggggaaactgggaacaacctcaaaaccaaaaccagacacagcacaagcagcggccacaggccactgcagaacaaattagacttgcacagatgatttcggaccataatgatgctgactttgaggagaaggtgaaacaattgattgatattacaggcaagaaccaggatgaatgtgtgattgctttgcatgactgcaatggagatgtcaacagagctatcaatgttcttctggaaggaaacccagacacgcattcctgggagatggtcgggaagaagaagggagtctcaggccagaaggatggtggccagacggaatccaatgaggaaggcaaagaaaatcgagaccgggacagagactatagtcggcgacgtggtgggccaccaagacgggggagaggtgccagccgtggacgagagtttcgaggtcaggaaaatggattggatggcaccaagagtggagggccttctggaagaggaacagaaagaggcagaaggggccgtggccgaggcagaggtggctctggtaggcgaggaggaaggttttctgctcaaggaatgggaacctttaacccagctgattatgcagagccagccaatactgatgataactatggcaatagcagcggcaatacgtggaacaacactggccactttgaaccagatgatgggacgagtgcatggaggactgcaacagaggagtgggggactgaagattggaatgaagatctttctgagaccaagatcttcactgcctctaatgtgtcttcagtgcctctgcctgcggagaatgtgacaatcactgctggtcagagaattgaccttgctgttctgctggggaagacaccatctacaatggagaatgattcatctaatctggatccgtctcaggctccttctctggcccagcctctggtgttcagtaattcgaagcagactgccatatcacagcctgcttcagggaacacattttctcatcacagtatggtgagcatgttagggaaaggatttggtgatgtcggtgaagctaaaggcggcagtactacaggctcccagttcttggagcaattcaagactgcccaagccctggctcagttggcagctcagcattctcagtctggaagcaccaccacctcctcttgggacatgggctcgacgacacaatccccatcactggtgcagtatgatttgaagaacccaagtgattcagcagtgcacagcccctttacaaagcgccaggcttttaccccatcttcaaccatgatggaggtgttccttcaggagaagtcacctgcagtggctacctccacagctgcacctccacctccgtcttctcctctgccaagcaaatccacatcggctccacagatgtcgcctggatcttcagacaaccagtcctctagccctcagccggctcagcagaaactgaaacagcagaagaaaaaagcctccttgacttctaagattcctgctctggctgtggagatgcctggctcagcagatatctcagggctaaacctgcagtttggggcattgcagtttgggtcagagcctgtcctttctgattatgagtccacccccaccacgagcgcctcttcaagccaggctccaagtagcctgtataccagcacggccagtgaatcatcctctacaatttcatctaaccagagtcaggagtctggttatcagagcggcccaattcagtcgacaacctatacctcccaaaataatgctcagggccctctttatgaacagagatccacacagactcggcggtaccccagctccatctcttcatcaccccaaaaggacctgactcaggcaaagaatggcttcagttctgtgcaggccacgcagttacagaccacacaatctgttgaaggtgctacaggctctgcagtgaaatctgattcaccttccacttctagcatcccccctctcaatgaaacggtatctgcagcttccttactgacgacaaccaatcagcattcatcctccttgggtggcttgagccacagtgaggagattccaaatactaccaccacacaacacagcagcacgttatctacgcagcagaataccctttcatcatcaacatcttctgggcgcacttcgacatccactcttttgcacacaagtgtggagagtgaggcgaatctccattcttcctccagcactttttccaccacatccagcacagtctctgcacctcccccagtggtcagtgtctcctccagtctcaatagtggcagtagcctgggcctcagcctaggcagcaactccactgtcacagcctcgactcgaagctcagttgctacgacttcaggaaaagctcctcccaacctccctcctggggtcccgccgttgttgcctaatccgtatattatggctccagggctgttacatgcctacccgccacaagtatatggttatgatgacttgcagatgcttcagacaagatttccattggattactacagcatcccatttcccacacccactactccgctgactgggagggatggtagcctggccagcaacccttattctggtgacctcacaaagttcggccgtggggatgcctcctccccagccccggccacaaccttggcccaaccccaacagaaccagacgcagactcaccataccacgcagcagacattcctgaacccggcgctgcctcctggctacagttacaccagcctgccatactatacaggggtcccgggcctccccagcaccttccagtatgggcctgctgtgttccctgtggctcctacctcttccaagcagcatggtgtgaatgtcagtgtgaatgcatcggccacccctttccaacagccgagtggatatgggtctcatggatacaacactggtgtttcagtcacctccagtaacacgggcgtgccagatatctcgggttctgtgtactccaaaacccagcagtcctttgagaaacaaggttttcattccggtactcctgctgcttccttcaacttgccttcagccctaggaagtgggggccccatcaatccggccacagctgctgcctacccacctgccccctttatgcacattctgaccccccatcagcagccgcattctcagatccttcaccatcacctgcagcaggatggccagacgggcagcgggcaacgtagccagaccagctccatcccgcagaagccccagaccaacaagtctgcctacaacagctacagctggggggccaactgaggccctgaccctcttctcccggtcccatcttctgagagggcttctcagcctggaaactatggaaacagcatcaaagagaaaggaatgtggggggtttccgctgccccccacccccagcggcccaccccatgcctcagcttcatgtctgtcccattcctataccatccccaccctgttgtatgtattataggatttgtattttctccttttttttcccccttccattccttctcccctcttgcattcaagattatgaaactttgctatgggccctgcacttcctttgcttcctcctgttcaccctggtggtgtacggatgaggcggggaggtgggacccccaaacatatatcagcccaacagccctaagtctccttctttattattaggaaaacaacaacaacaacaaacaaaaaaatggcgtcatgaatatgaacagcattgtcagatgaattagttgaagtggttttttttttgttttttttttttttttgtactgtgtcctcaaatttaatggattaatgtgtcttgtatatataaaaagaaaacctctaccttcaaaaaaaaaaaaaaaaaa

SEQ ID NO: 3841 - DNA, 4882 bp, Homo Sapiens
  NM_014853
ggaagatggctgcggagccgagcaccgggcagtggctgcggcggcggcggcggcggcgggccgggagcgcggcgggcgggggctccgccttgcgcgtggggcgctgagccgagaggcgcggaggcggcgagggcgcgggggctctgaggaccgctcggcgccgcctcctgccacaccatgggcagcgcagaggacgcagtcaaagagaaactgctgtggaacgtgaagaaggaggtgaagcaaatcatggaggaggctgtcaccaggaagtttgtgcatgaagacagcagccacatcattgctttatgtggtgcagtggaggcttgcctcttgcatcagctgagacgccgtgccgctggcttcctgcgcagtgacaagatggcagccctgttcaccaaggtggggaagacgtgcccagtggcgggggagatttgccacaaggtacaggagctgcagcaacaagcagagggcaggaaaccctcaggggtcagccaggaggccctgcggagacagggctcagccagcgggaaggccccggccctcagccctcaggccttgaaacacgtatgggtacgcacggcgctcatcgagaaagttctggacaaggtcgtgcaatacctggcggaaaactgcagcaagtactacgagaaggaggcactgctggcagaccctgtgttcggcccgatcctggcctctcttctagtgggaccctgtgccttggaatacactaagctcaagacagccgatcactactggactgacccctctgctgatgagctggtccagcggcaccgcatccggggtccacctactcgccaggactcccctgcaaagcgcccagccctggggatccggaaacggcactcaagcggcagcgcgtcggaggacaggctggctgcctgtgcccgcgagtgtgtggagtccctgcaccagaactcacggacgcggctgctctatggcaagaaccacgtgctggtgcagccgaaggaggatatggaggcggtccctggctacctctccctgcaccagtctgcagagagcctgactctgaagtggacccccaaccagctcatgaatgggactctgggggactccgagctggaaaagagcgtttactgggactatgccctcgtggtgcccttcagccaggtcgtgtgcatccactgccaccagcaaaagagcggtggcacgcttgtgctggtgagccaggatggcatccagaggccgccgctgcatttcccacagggaggacacctgctgtcctttctgtcctgtctggagaatgggctgctgcctcggggacagctagagcccccgctgtggacccagcaagggaaggggaaagtgttccccaagctacggaaacgaagcagcattcgctccgtggatatggaggagatgggcacggggcgggccaccgactatgtgttccggatcatctaccccggccacaggcacgagcacatcactattaactaccaccacctagcggccagccgcgcggcctcggtggacgatgatgaggaagaggaggataaactgcacgcgatgctctcaatgatctgctcgcggaacctcacagctcccaatccgatgaaagacgctggtgacatgatcgagatgcagggctttgggcccagcctgccagcctggcacctggagcccctgtgcagtcagggctcctcctgcctctcctgctcctccagcagctccccacatgcaacccccagccactgtagctgcatccccgaccggttgccgctcaggctactgtgtgagagtatgaagaggcagatcgtgtcccgggccttctacggctggctggcacactgccgccacctgtccacggtgcggacccacctgtcggcgctggtgcaccatagcgttatcccacctgaccggcccccgggggcctccgcgggcctcaccaaggacgtgtggagcaagtatcagaaggacaaaaagaactacaaagagctggagctgctgcggcaagtttactacggaggcatagagcacgagatccgcaaggacgtctggccctttctgcttggccactacaagttcggcatgagcaagaaggagatggagcaggtggacgcagtggtggcagcaaggtaccagcaggtgttggcagagtggaaggcctgcgaggtggtggtgaggcagcgggagcgggaggcccacccagccacacgcaccaagttctcctcaggcagcagcatcgacagccacgtgcagcgcctcatccaccgagactccaccatcagcaacgatgtgtttatctcagtggatgatctggaacccccggagccccaggaccctgaagattccagaccaaaacctgagcaggaagcaggacccgggactccgggcaccgccgtggtggagcagcagcattccgtggagttcgactctccagactcaggactgccctcctctcgcaattactccgtggcctcgggcatccagtcaagcctagatgaggggcagagcgtgggcttcgaagaggaggacggcggtggggaggaaggctccagtgggcccggccctgcagctcacactttgagggagccccaggatcccagccaggagaagcctcaggccggagaactggaggccggagaggagcttgcggctgtgtgtgcggctgcctacactatagaattactggacactgtggccttaaacctgcaccgcatagacaaggatgtgcagaggtgtgaccgcaactactggtacttcacgccccccaacctcgagaggctcagagacgtcatgtgcagctacgtgtgggagcacctggacgtgggctatgtgcagggcatgtgcgatctgctggcgcctctcctggtcaccctcgacaatgatcagctggcctacagctgcttcagccacctcatgaagaggatgagccagaacttccccaacgggggtgccatggacacccactttgccaacatgcgctccctcatccagatcctggactcagagctgtttgagctgatgcatcagaatggagactacacccacttctacttctgttatcgctggttcctgctggattttaagagagaactgctgtatgaggatgtgtttgctgtgtgggaggtgatctgggcagccaggcacatctcatcggagcactttgtcctgttcatcgccctcgccctggtggaggcctaccgagagatcatccgtgacaacaacatggacttcactgacatcatcaagtttttcaatgaacgtgctgagcatcacgatgcccaggagatcctgcggattgcccgggacctcgtccacaaggtgcagatgctcatagagaacaagtgagctggggccaggaggcagcagccgtgcagagcctgggctccggcagggagaggtgcaggggagtcaccgcccagacctccccagccaccaaccgaccccacctctgttcctaacaaagcggttgtgagcctggatccgactcccggcagtgctgaccctgcagggcaagtcaggggccaggatgccctcggatcagggccgggatgggaggggtcagcctcagggagcagctgccttgggggacacacctactctgctcccctctcacacatctgggagtagccccactgccacctgcagccgcagcctggactgctgcccacgagtgaacctggggccccacaggattaacaggggctatagcggcctgggccctactcagctggggtggcagagggcgagaggctctgtgctgtgtcccttctgagggtccctttgcagtcccagtatattgtgcgtgcaccagccccagctggagcaaccaaaactgcttctggtttaggcacacgtcacgggtgcgggagacccgggcacgggagacccgggccgccttcaggccgctcccccgagattctggggcagtcggaagatgtgggccctgggtgggagcagcccacttcagcagcactgccactgcctttggccacctgaggtgacccccaggcctccccggccttgtacagtgtacctctgtgtatctgtacagcctcgctcctgccaccccacccttgcgttctgcattaggtacttccctgaaaaccacgtgtaagaagtgatgcttttgccagtggatgatctggaatgcgaccggagcacttgctctgaggaatcccagggtgactctgtcggggaagaatccggtcacagcctcccctcagagacaggcctcagttcgagggcagcccattatctgtcgcagacatctgccatgtccctgagactgcgggaggcaggggatgcatgggtgtccccatctgtccctggtgagaagcaaggctagctctgccttccacatgcttctcaggatgccaagaggcctaggaacccagaaacccccttggaggagctgtgtatgcgggggtgccaggaagggcatagctcctgcccccaggcctaggcatgctgcttgctcggccatccccacttcctcctctaccccaacacatgcaggctaggccttgccctggaacatggaggccctgcccggggctggggcctagtccagcagccaccaaagtctggcagactttctgcatttgagaaacatgacaaagggccccgcagcccttctgcacccagcacagcctgcccagcccagccctgcccccgggcactgcacagcctgtctgggggccagaccaccccattgtccatccttgttgtccgtgagtccttggcctccaccaagcacgtgtggccattgtgtgcctgccttagtgactccgtggttttgtgaggagcagagtgtgtatgatttttgcctcagaaactatactcttctgtgtaacagaccaataaacaacatttgtcaacaaaaaaaaaaaaaaaa

SEQ ID NO: 3842 - DNA, 4021 bp, Homo Sapiens
  NM_014858
ccgctcccgggcggaggcagccgggcggggtaggttgcgcgctcgccgcgggctcgggccgcggtcgcggctttgcggcaggctgcgcgtcaggcggggagcggggcgcgcgggccggggagggggccgggcgcgctgcgggctccgcggccggaccatgcggggcaggggccggttgcagggccgggggctgcagccggcgccgatggcggccgactaggacctgcccggccggctgccccgcgccccgcctcgccccgcagcccggccggccgggagggatgcgctgtgccgcccagctcctctccgtcctgcccatgccctgaagcagaaagtttgggggccgggggttgtctcccttctccctcctgcaatgactgcccaaggactcttgctgcccagcctcgactgtgacctgtcttcgctccccaggtcgaaatgaactattccaagctataaccaaggctcccccttctcgcccctccctcacccgcctttaagaattttttttttaattcaagaaattgtggtctgccatctcccctccttgttaataatttagaccccaggcctcatatgaatataagagggggtgcggtcttccccaagacggcgcgctggaaggacagattccccttgccgacccacatacaccatgaagaggtgcagatcggacgagctgcagcaacaacagggcgaggaggatggagctgggctggaagatgccgcttcccacctgccgggcgcggacctccggcctggggagaccacgggtgctaactctgctggcgggccaacttcagacgccggcgctgccgcggcgcccaacccaggtccccgaagcaagcctcctgatttaaagaaaatccagcagctgtcagagggctccatgtttggccacggtctgaagcacctgttccacagccgccgtcggtctcgggaaagggagcaccagacgtctcaggattcccagcagcatcagcagcagcagggtatgtccgaccatgactccccagatgagaaggagcgctctccggagatgcatcgcgtctcctacgccatgtccctgcacgacctgcccgcccggcccaccgccttcaaccgcgtgctgcagcagatccgctcccggccctccatcaagcggggcgccagcctgcacagcagcagtgggggcggcagcagcgggagcagcagccggcgcaccaagagtagctccctggagccccagcgtggcagccctcacctgctgcgcaaggccccccaggacagcagcctggccgccatcctgcaccagcaccagtgccgtccccgctcttcctccaccaccgacactgctctgctgctggccgacggcagcaacgtgtacctcctggctgaggaggccgaaggcatcggggacaaggtcgataagggagacctggtggccctgagcctccccgccggccatggtgacaccgacggccccatcagcctggacgtgcccgatggggcaccggacccccagcggaccaaggccgccattgaccacctgcaccagaagatcctgaagatcaccgagcagatcaagattgagcaggaggctcgcgacgacaatgtggcagagtatctgaaactggccaacaacgcggacaagcagcaggtgtcacgcatcaagcaagtgttcgagaagaagaaccagaagtcagcccagaccatcgcccagctgcacaagaagctggagcactaccgccggcgcctgaaggagattgagcagaacgggccctcgcggcagcccaaggacgtgctgcgggacatgcagcaggggctgaaggacgtgggcgccaacgtgcgcgcaggcatcagcggctttgggggcggcgtggtggagggcgtcaagggcagcctctctggcctctcacaggccacccacaccgccgtggtgtccaagccccgggagtttgccagcctcatccgcaacaagtttggcagtgctgacaacatcgcccacctgaaggaccccctggaagatgggccccctgaggaggcagcccgggcactgagcggcagtgccacactcgtctccagccccaagtatggcagcgatgatgagtgctccagcgccagcgccagctcagccggggcaggcagcaactctggggctgggcctggtggggcgctggggagccctaagtccaatgcactgtatggtgctcctggaaacctggatgctctgctggaagagctacgggagatcaaggagggacagtctcacctggaggactccatggaagacctgaagactcagctgcagagggactacacctacatgacccagtgcctgcaggaggagcgctacaggtacgagcggctggaggagcagctcaacgacctgactgagcttcatcagaacgagatgacgaacctgaagcaggagctggccagcatggaggagaaggtggcctaccagtcctatgagagggcacgggacatccaggaggccgtggagtcctgcctgacccgggtcaccaagctggagctgcagcagcaacagcagcaggtggtacagctggagggcgtggagaatgccaacgcgcgggcgctgctgggcaagttcatcaacgtgatcctggcgctcatggccgtgctgctggtgttcgtgtccaccatcgccaacttcatcacgcccctcatgaagacacgcctgcgcatcaccagcaccaccctcctggtcctcgtcctgttcctcctctggaagcactgggactccctcacctacctcctggagcacgtgttgctgcccagctgagtggccagccacaccaaccctgtgctctctggcccccagctggccacacttctccaggagggacccttggacttctttgtgtgtccagtttggcctcctgcccaaactgtccattccagcagctcctgcccccttctctgtacttgcttctgtctgacaccttctccctgttggcctgaagggagcttagaatgcagccctacctggagatagtgcgggcacctgtggccaagtggagcagaggtggacatggggttggattgttttgattatttatagttacacaaggacttctcccagctgaccctcaggatgccccaagtcaggaagaccattaagaataggaggagagggctctgcctcaactttcctaggaaagagcccacctcggagatagctacggttttctctggtggagatggtgaggatgaaggctggagagtgagggaggaggctctgctggccgcagagaacacagggatgggagggtccctagccttcgggcacctccagggccagagagcaggctcagagcagctagtgtggagctcagcatccccaccccacccctcctccctgtagagctgatttgaggcctccttctggggctgggctctgcaggccaggtgggtgtggcctgtgttttcccttctgttctttctgcctgtactggatctgttattttcagggaaacaggccccagggcccccctgagcctcaccctaagcccttaggcctctgagagtgctgttgggttctatttatttatttatttgttcctttgttccctacccgtgcccccagtgtcttccctgctgagtaccaggagaggtcctgccccatcctctctctgaagccagggcccttccattccatttagcctttggatcatcctggctgggagaagtgggaccgagccacccagccccactatccccaagcagccctacagccgggatgggaggcacgtggcctctcttttatccgtctatttattttgtaagtgtattcgtgtggaggaggttgttgctttatttttttaaggctctggagtgttgtgtatggtttcttttcacatcccagcctcccatgggcacttctaagaagagaggggatttcttggaaaaggagagaggaatcccctagagcagggaaagcagtgcctgccagctgttgtgcaccttcctgagaaataaatatcctctaaattttcaaaccaaaaaaaaaaaaaaaaaa

SEQ ID NO: 3843 - DNA, 3403 bp, Homo Sapiens
  NM_014861
gggtccggcccaggaggcttgggcgcgcgcagccatcccgggcctcgccggggacctagggacgcaggcaacgcctgcgcccgctcaccatggtcgagggacgcgtctccgagttcctgaagaaactcggcttctcgggcgggggccgccagtaccaggcgctggagaaggacgaagaggaagccttgattgatgaacagagtgagctgaaagccatcgagaaagagaagaaggtgacagccctgccccccaaggaagcgtgcaaatgccagaaagaggatttggccagagcgttttgtgtggacttacacactgggctgtcggagttctcggtgacgcagcgccggctggcccatggctggaatgagtttgttgctgacaacagcgaacctgtgtggaagaaatacctggatcagtttaagaaccccctgatcctgctgctgctgggctctgccctggtgagtgtcctcaccaaggagtatgaggacgccgtcagcatcgccacggcagtgcttgtcgtggtcactgtcgccttcatccaggagtacaggtcggagaaatctctggaagagctgaccaagatggttcctccagaatgtaactgcctaagagaaggaaaactccagcacctgcttgctcgagaactggttcctggtgatgtcgtatctctctcgatcggagaccggatccctgcagacatccgactcactgaggtcacggacctcttggtggatgaatccagtttcaccggggaagccgagccatgtagtaaaacagacagccccttgacaggcggtggggacctcaccaccctcagcaacatcgtcttcatggggaccctggtgcagtatgggaggggccagggggtcgtgattggaacaggggaaagctctcagttcggagaagtgtttaagatgatgcaggctgaagagacacctaaaactcctttgcagaaaagcatggacaggctaggaaagcaactgacactcttctcctttggcataatcggtctcatcatgctcattggctggtcgcaagggaaacaactcctgagtatgttcacgatcggggtcagcctggctgtggcggccattccagagggtctgcccatcgtcgtcatggtgacgctggtcctgggagtgctgcggatggccaagaagcgggtcatcgtgaagaagttacccatcgtggagactttaggttgctgcagcgttctctgttctgacaagacggggactctgactgccaatgaaatgacagtgacccagcttgtaacgtcagatgggcttcgtgccgaggtcagcggagttgggtatgacggtcaagggactgtgtgtcttctaccatccaaggaagtcattaaggaattttccaatgtctcagtgggaaagttagtggaggcgggctgtgttgccaacaatgcggtcatcagaaagaacgccgtgatggggcagcccaccgagggtgcattgatggccctggcgatgaagatggacttaagtgatattaaaaattcatatataagaaaaaaagagattccattcagttcagagcagaagtggatggcggtgaaatgcagtctgaagactgaggatcaggaagacatttacttcatgaaaggggccttggaagaggtgatccgctactgcaccatgtacaacaacgggggcatccccctgccgctgacgccccagcagaggtcattctgcctgcaggaagagaagaggatggggtcgctcggtttgcgggtgctggccctggcttctgggcccgagctggggcggctgacgtttctcggtcttgtgggcatcattgaccccccgagagttggcgtgaaggaagcagtccaggttctctccgagtctggtgtgtctgtgaagatgataacgggggatgccctggagacggccttggccataggaagaaacatcggcctgtgcaacgggaagctgcaagccatgtccggggaggaggtggacagcgtggagaagggcgagctggccgaccgcgtggggaaggtgtccgtgttcttcaggaccagcccaaagcacaagctcaaaatcatcaaggctctgcaggagtcaggggcgatcgtggccatgactggggatggggtgaacgacgcagtggccctgaagtctgcagacattgggatcgccatggggcagacagggacggacgtcagcaaagaggccgccaacatgatcctggtggatgatgacttctcagccatcatgaatgcagtggaggaaggcaagggtattttttacaacatcaaaaactttgtccgattccagctgagcacgagcatctccgccctgagtctcatcactctgtccaccgtgttcaacctgcccagccccctcaacgccatgcagatcctatggatcaacatcatcatggatgggccaccggcgcagagcttgggggtagagcccgttgacaaagacgccttcaggcagccaccacggagtgtgcgggacaccatcctcagcagagccctcatcctgaagatcctcatgtccgcggccatcatcatcagcgggaccctctttatcttctggaaggagatgcctgaagacagagcaagcactccccgcaccacgacgatgacgttcacttgttttgtgtttttcgatctcttcaacgccttgacctgccgctctcagaccaagctgatatttgagatcggctttctcaggaaccacatgttcctctactccgtcctggggtccatcctggggcagctggcggtcatttacatccccccgctgcagagggtcttccagacggagaacctgggagcgcttgatttgctgtttttaactggattggcctcatccgtcttcattttgtcagagctcctcaaactatgtgaaaaatactgttgcagccccaagagagtccagatgcaccctgaagatgtgtagtggaccgcactccgcggcaccttccctaatcatctcgatctggttgtgactgtggcccctgccgtgtctcctcgtcaggggagacttttaggaggccgcagccttccatcaccggatcagtttttcctcttaggaaagctgcaggaacctcgtgggctccagggacccaggcccacatccatccagcgttcccgctggctgtgggacagacagggaggggcctgtacagaaacaccacactgtttattaaatcacaatgatttttattaaccatgtctaactacgtatctgtgccacagcttgcagtgaggcaggccactcgtggcagatacaaggggctcctgagaggcagtgggtaggatggtcacactctgcccattgccctcctggaggccccatttcctcatcataaaatgagggacttttaaataaagtgctatgccgggggataattaaaaaaaaaaaaaaaaaaa

SEQ ID NO: 3844 - DNA, 3864 bp, Homo Sapiens
  NM_014868
atacagtccatccgggttctttgagatgctgtttggcgactcgtcgccattcccggagcaggtcggcctcggcccaggggcgagtatccgttgctgtgtcggagacactagtccccgacaccgagacagccagccctctcccctgcctcgcggcgggagagcgtgtccggccggccggccggcggggctcgcgcaacctccctcgcctccccttcccccgcagcctccgccccgccaggcccggcccggactcccgagccccggcctcctcgtcctcggtcgccgctgccgccgggcttaacagccccgtccgccgcttctcttcctagtttgagaagccaaggaaggaaacagggaaaaatgtcgccatgaaggccgagaaccgctgccgccgccgacccccgccggccctgaacgccatgagcctgggtccccgccgcgcccgctccgctccgactgccgtcgccgccgaggcccccgttgatgccgctgagctcccccaacgccgccgccaccgcctccgacatggacaagaacagcggctccaacagctcctccgcctcttcgggcagcagcaaagggcaacagccgccccgctccgcctcggcggggccagccggcgagtctaaacccaagagcgatggaaagaactccagtggatccaagcgttataatcgcaaacgtgaactttcctaccccaaaaatgaaagttttaacaaccagtcccgtcgctccagttcacagaaaagcaagacttttaacaagatgcctcctcaaaggggcggcggcagcagcaaactctttagctcttcttttaatggtggaagacgagatgaggtagcagaggctcaacgggcagagtttagccctgcccagttctctggtcctaagaagatcaacctgaaccacttgttgaatttcacttttgaaccccgtggccagacgggtcactttgaaggcagtggacatggtagctggggaaagaggaacaagtggggacataagccttttaacaaggaactctttttacaggccaactgccaatttgtggtgtctgaagaccaagactacacagctcattttgctgatcctgatacattagttaactgggactttgtggaacaagtgcgcatttgtagccatgaagtgccatcttgcccaatatgcctctatccacctactgcagccaagataacccgttgtggacacatcttctgctgggcatgcatcctgcactatctttcactgagtgagaagacgtggagtaaatgtcccatctgttacagttctgtgcataagaaggatctcaagagtgttgttgccacagagtcacatcagtatgttgttggtgataccattacgatgcagctgatgaagagggagaaaggggtgttggtggctttgcccaaatccaaatggatgaatgtagaccatcccattcatctaggagatgaacagcacagccagtactccaagttgctgctggcctctaaggagcaggtgctgcaccgggtagttctggaggagaaagtagcactagagcagcagctggcagaggagaagcacactcccgagtcctgctttattgaggcagctatccaggagctcaagactcgggaagaggctctgtcgggattggccggaagcagaagggaggtcactggtgttgtggctgctctggaacaactggtgctgatggctcccttggcgaaggagtctgtttttcaacccaggaagggtgtgctggagtatctgtctgccttcgatgaagaaaccacggaagtttgttctctggacactccttctagacctcttgctctccctctggtagaagaggaggaagcagtgtctgaaccagagcctgaggggttgccagaggcctgtgatgacttggagttagcagatgacaatcttaaagaggggaccatttgcactgagtccagccagcaggaacccatcaccaagtcaggcttcacacgcctcagcagctctccttgttactacttttaccaagcggaagatggacagcatatgttcctgcaccctgtgaatgtgcgctgcctcgtgcgggagtacggcagcctggagaggagccccgagaagatctcagcaactgtggtggagattgctggctactccatgtctgaggatgttcgacagcgtcacagatatctctctcacttgccactcacctgtgagttcagcatctgtgaactggctttgcaacctcctgtggtctctaaggaaaccctagagatgttctcagatgacattgagaagaggaaacgtcagcgccaaaagaaggctcgggaggaacgccgccgagagcgcaggattgagatagaggagaacaagaaacagggcaagtacccagaagtccacattcccctcgagaatctacagcagtttcctgccttcaattcttatacctgctcctctgattctgctttgggtcccaccagcaccgagggccatggggccctctccatttctcctctcagcagaagtccaggttcccatgcagactttctgctgacccctctgtcacccactgccagtcagggcagtccctcattctgcgttgggagtctggaagaagactctcccttcccttcctttgcccagatgctgagggttggaaaagcaaaagcagatgtgtggcccaaaactgctccaaagaaagatgagaacagcttagttcctcctgcccctgtggacagcgacggggagagtgataattcagaccgtgttcctgtgcccagttttcaaaattccttcagccaagctattgaagcagccttcatgaaactggacacaccagctacttcagatcccctctctgaagagaaaggaggaaagaaaagaaaaaaacagaaacagaagctcctgttcagcacctcagtcgtccacaccaagtgacactactggcccaggctaccttctccatctggtttttgtttttgtttttttttcccccatgcttttgtttggctgctgtaatttttaagtatttgagtttgaacagattagctctggggggagggggtttccacaatgtgagggggaaccaagaaaattttaaatacagtgtattttccagcttcctgtctttacaccaaaataaagtattgacacaagagatctcttcctgccaaggtttttagttcattgccagtttagtctttttgacccatgtgtaattaatttttctcaacccaaagtaagattgagtcccctttgagatgcattagagcagtccaacccagaatggcacacactgctctgctgtagcatcatgtcagggcttcctggactcagtacacctctcagtttgtcttttaaaaaacagctgaatctttactacctatttagttctccttgttaaagaaacaggggtgggaataaaatggatttaggacacccagtttgaattgcagtttttttttttctgacacatggccaggctgtggtgccagcttaatggagtaggctgtccttggcacttgcatgtgtgaaaggagggttttgcctcttcttgagcatggcttgagttggtaaggaaagctgtaactcacgaagccctgagacctgctacccctaagatcgagcttgttttcagtgactggcttgagtcataggaggaggagtctggtacagctgcaggagagcagggccatctgaagcggtagcattgccaccatctccctctcatctagagcagttttcttatgccttggtttgagctgaatttgatgtgaattcttttgctgcttaataaagtgacctctaggtgcattagaatgcgaaggcaaatagttgcaataaatcacctgcacaagcattgtgaaaaaaaaaaaaaaaaaa

SEQ ID NO: 3845 - DNA, 5089 bp, Homo Sapiens
  NM_014869
gcggccgccatgtggtgcctgcactgcaactcggagaggacccagtcccttctggagctagagcttgacagcggcgtcgagggcgaggcccccagcagtgagactggcacatccctggacagcccctcagcctacccccagggccccttggtgcccggttccagcctgagcccggatcactacgagcacacgtcagtgggagcctatgggctgtactcggggccgccggggcaacagcagcgcacgcggaggcccaagctgcagcactcgacctccatcctgcgcaagcaggctgaggaggaggccatcaagcgctcacgctcactctccgagagctatgagctctcctcggacctgcaggacaagcaggtggagatgctagaacgaaagtatggggggcgcctggtaacccgccatgcggcccgcaccatccagacggcgtttcgccagtaccagatgaacaagaacttcgagcgcttgcgcagctccatgtcagagaaccgcatgtcacgccggattgtgctgtccaacatgaggatgcagttctcctttgaggggcctgagaaagtgcacagctcctacttcgaggggaagcaggtctcagtgactaacgacggctcccagctgggagccctggtgtcccctgagtgtggtgacctcagcgagcccaccaccctcaagtctccggccccctccagtgactttgcggacgccatcaccgagctggaggacgccttctctaggcaagtgaaatcactggccgagtccatcgacgatgccctcaactgccgcagcctgcacactgaggaggcaccggccctggatgcggcgcgggcccgggacaccgaaccccagacagccctgcacggcatggaccaccgcaaactggacgagatgacggcctcgtacagtgatgtcaccctgtacatcgatgaggaggagctgtcgccccctctgcccctctcgcaggcaggggaccggccgtccagcaccgagtcggacctgcggctacgggctgggggcgcagccccagactactgggccctggcccacaaagaggacaaggctgacacggacacgagctgccggagcacgccgtcgctggagcggcaggagcagcggctgcgggtggagcatctgccgctgctcaccatcgagccacccagcgacagctctgtggaccttagtgaccgctcggagcgggggtcactcaagaggcagagtgcttacgagcgcagccttggcgggcagcagggcagtcccaagcatggtccccacagcggcgcccccaagagcctcccccgggaggagcctgagttgcggccccggccccccaggcccctggacagccacttggccatcaatggctcagccaaccggcagagcaagtctgagtcggactactcagacggtgacaatgacagcatcaacagcacgtccaactccaacgataccatcaactgcagctccgagtcatcgtcccgtgacagcctgcgggagcagacgctcagcaagcagacctaccacaaggaggcccgcaacagctgggactcgcctgcctttagcaacgatgtcatccgcaagaggcactaccgcatcggcctgaacctcttcaacaagaagcctgagaagggagtccagtacctcatcgagcgtggctttgtgcccgacacgcccgtcggggtggcccacttcctgctgcagcgcaagggcctcagccggcagatgatcggcgagttcctgggcaaccggcagaagcagttcaaccgtgacgtgctcgactgcgtcgtggacgagatggacttctctaccatggagctggatgaggccctcaggaaattccaggcgcacatccgtgtccaaggggaggctcagaaagtggagcggctcatagaggcgttcagccagcgctactgcatctgcaaccctggggtggtgcggcaattccggaacccagacaccattttcatcctggccttcgccatcatcctgctgaacaccgacatgtacagccccaatgtcaagcccgagcggaaaatgaagctagaggacttcatcaagaacctccgaggtgtggacgatggtgaggacattccccgtgagatgctgatggggatctatgaacggatccgtaagcgagagctaaagaccaatgaggaccatgtgtcccaggtgcagaaggtggagaagctcattgtggggaaaaagccgatcggatccctgcatcccgggctcggctgtgtgctctctctgccccaccgtcggttggtctgctactgccggctctttgaggttccagacccaaacaagccccagaaactcggactacaccagcgagaaatcttcctgttcaacgacctcctggtggtcaccaagatcttccagaagaagaagaactcggtgacgtacagcttccgacagtccttctccttgtacggcatgcaggtcctgctcttcgagaaccagtactaccccaatggcatccggctcacctcgtctgtccccggagcagatatcaaagtgttaataaacttcaacgcccccaaccctcaagaccggaagaaattcaccgatgacctgcgggagtccattgcggaagtccaagagatggagaagcacaggatagagtcggagctcgagaagcagaaaggcgtcgtgcggcccagcatgtcccagtgctctagcctcaaaaaggagtcgggcaacggaacactgagccgggcctgcctggacgacagctatgccagcggtgagggcctcaagcgcagcgccctcagcagctccctgcgggacctctcggaagccgggaagcgagggcgtcgcagcagtgcgggatcgctagagagcaatgtggaatttcagcctttcgagccactgcagccgtcagtgctgtgctcctaagccatgggacccgaggactgccccccggcgcctgcccaggcggaggccctttcagaaagggcgaagctcacgcctgactctgcgggccgcggggccgcgttcccagtggacagcgtggtgagccgtggccggacggcaggaggagaggggagccccctctggctgtgtgtcaccttggctggctggctggccagggttttgccgatttccctcctcacatccctcccaccctcggtcatatcattgagatcaccgtaccagcaaatctgcaaaccaagcactttgttaatctccagagagagcaaatacagcaatctagagtttagcctttttaaaaatgtgactttaacccgcccacctgtgtcctcccattggcgtggcatttctttggtgtctgctcagaaagaaacagcatgggaccgtgtgattgggtccaggctgggctgtcagggaagcgccctggtgtctccgactcatcaattctcgggtcttttttaaaagccaggctccccaaagcactctgtctcgcaattttgaggaggctgttccgacctggaagcgttaaactgctgcatgtcatctggcgtcagctgtgaggctgcgctctgcgtgttgtgcgtttgcaaaatgtattggcgtgactgtaaacacatcgttgaagtaaagcgattacatattgagtatgtcagcttttctcaccctcttctgtgctgggaggagagtctaactgtaacctttaggttgttccagaaaagattcaggccgtttggcacagaattgctctttctgaagggtagcagtaatgaataggaacagacagaaaaccccaggaggggctttcaggaaactctccctctccatcgccatcctgcaagctccacagcctcgggctgccagcctgtggcactgtcctcggtgtgtcctggagctgtgctgggcagcagggcctcgcgtaaggaactgctggaacccactgagcccttcccggggtttcccgccgcactcagtgtgttccttcaggctagtgaggtttcattctgttttatttgcaagcttatcaaaagtttgtggaagatacattgttgggttccagaggctggagtcatgctgcccacatcttgtttgggaaagcaaaagctcccagtgagctggtgtccccgtgtgtctttcatgggactgtcccctttagagatcccacctgtcagagccacagcttcggggtcctgtcatcacatcccctgggaggggaggcaggaggaggccgagggccccaggatgtctgcctggtcccttctcactgtgaggacgcccttggcacacctttctcaagtcacacaaattactgcagttacatacagaattgctgacaggagcaggagacgctgagggaaacagctggcaatgtgacaaaagtcttttctgggacaacaatcaaatcatgtatttgtatttttttaagtttaccaatgaattgtacaacaatgtaaaaataaagttcatcctaatatgctgtgcacatcttgcttaaaaatgtcttcagcacccagtgcagtgatctttccctcacacactgcatgcagcaggagcctcttgtttttcttaatgagctgaaaagacagcagatgttcacagctgatgctgggtgttgactcagcgccacgggaagctctgtgcccgcaggtaagcacgcacagtcttacagttctccttgtaaaatatcatcacccttcctgcctgagaaacgagtacatttgtattttatgtaacaacaatagtcaaggcagcattgcaacactgagcagggtgaggtgggggtgctgagcacaggacaagagggaggaggcctgccctccattcagatgcatctgcatcgcccttctgtgtgcagtcacatcgagactgcacacagcatgcatctcctcttggaaaatatcttttgcctccgagttgttttaagcaattagaatcaggtcctgaatccccagactgttcagagacttcaagggacacctccctcacaagaagcctggcacccccactgtgtacctttgagaggaaaggagtgcgtttgttttcatctgcattctgtttgtcagtggcaacagactctatcaatgtaaaaccatggttgtgatcatgtggggaaatcaaataaatcctttgaaactctaaaaaaaaaaaaaaaaaa

SEQ ID NO: 3846 - DNA, 5289 bp, Homo Sapiens
  NM_014871
atgccccgagcccttcttgattggaagaagcgcctcggaccccggtccttggcgccgtagtggttaggttgagccctaggcgtgggggagaactggggaaactggaatttcccgcggagctgacagcgcttgcgctccccctactcgttctaattccacgcgctccaaaatatccgccatggagaaatcttggccaggatgtccattctaggcccatcggtgctgtcttgctgaaggttgggtcaggcatctaaagggactgtggtaagggagggtgtgacacaggtgtaagctgccatcgtcatcatgaactttgagggtctggaccctggactggcagaatatgccccagccatgcattctgccctggaccctgtcttggatgcccacctgaacccaagtctgctacagaatgtggagctggacccagagggagtggccttggaggctcttcccgtccaggaatcagtgcacataatggaaggtgtctactctgaattgcacagcgtggtggctgaagtgggtgtacctgtttccgtctcccactttgacttgcacgaggagatgctgtgggtggggagccacgggggccatgccacttcattttttggcccagccttggagcgctactcatcctttcaagtcaatggcagtgatgatattcggcagatccagagcctggagaatggtatcctttttctcaccaagaacaacctcaagtatatggcccgtgggggcctcattatatttgattacctgctggatgagaatgaggatatgcacagtctcctactgactgacagcagcactctactcgttggtgggctgcagaatcacatactagagattgatcttaacactgtccaggagactcagaagtatgcagtagagacgcctggagtcaccatcatgagacagacaaatcgcttcttcttctgcggccacacgtctggcaaggtttccctgagagacctccgtacttttaaggtggaacatgagtttgatgccttctcaggaagtctgtcagactttgatgtgcatggcaacctgctagctgcctgtggcttctccagccgcctcactggcctggcctgcgaccgtttcctcaaggtgtatgatttgcgcatgatgcgtgccatcacaccacttcaagtacatgtggatcctgccttcttgcgcttcattcctacatatacttctcgtcttgctatcatctctcagtcagggcagtgccaattctgtgaacccacaggcctggccaacccagccgatatctttcatgtgaatcctgtggggcctctgctaatgacatttgatgtgtcagccagcaagcaggctctggcctttggggattctgagggctgtgtgcacctctggactgattccccggagccttccttcaacccctactcccgtgagactgagtttgctttgccgtgtctcgtggactcactgcctcctctggactggagccaggacctgctgcctctttccctcatccctgtcccactcaccactgacacacttctctctgattggcctgctgccaactctgctccagctcccaggcgagcaccacccgtggatgcagagattctgcgcaccatgaagaaggtgggcttcattggctatgcgcccaatccccgcaccaggctgcgcaatcagataccctacagactcaaggagtcagacagtgaatttgacagcttcagccaggtcactgagtcaccagtaggacgagaagaggaaccacatctccacatggtttctaagaaataccgcaaggtgaccatcaaatattccaagctagggctggaggactttgacttcaaacactacaataagaccttgtttgctggattagagccccacattcccaacgcctactgtaactgcatgatccaggtgctctatttcctggagcctgtacgctgtctaattcaaaaccacctttgccagaaggagttctgtctggcatgtgagctgggcttcctgtttcacatgttggacctctctcgtggtgacccttgccagggcaataattttcttcgggcattccgtactattcctgaggcctcagccctcggtctaatcctggctgactcagatgaggcctcaggcaagggcaatctggccaggctcattcagaggtggaatcgcttcattctcactcaactgcatcaagatatgcaggagctggaaataccacaggcttatcgaggtgctggaggcagcagcttttgctcatcgggggactctgttattgggcagctcttcagctgtgagatggagaactgcagcctctgccgctgtggcagtgagaccgtgcgagcctcatccactctgcttttcacactctcctaccctgatgataaaactgggaagaactatgactttgctcaggtgctgaagcgaagcatctgcctggaccagaatacacaggcctggtgtgacacctgtgaaaagtaccagcccacgattcagacccgcaacatccgccatctgccagatattcttgtcatcaattgtgaggtgaacagctcaaaagaggctgatttctggagaatgcaggctgaggttgccttcaagatggcagtaaagaaacacggtggggaaatctccaagaacaaggaatttgctttggctgattggaaggaactagggagtccagagggtgtgctggtgtgtccctccattgaggagttgaagaacgtctggcttcctttctccattcgcatgaagatgaccaaaaacaaagggctggatgtttgcaattggactgatggggatgagatgcagtggggcccagccagggcagaggaggagcatggtgtctatgtgtatgacctgatggctactgtggtacacatcctggactcacgcacagggggcagcctggtggctcacatcaaagttggagagacctaccaccagcgcaaggagggcgttactcaccagcagtggtatctgttcaatgactttcttattgaacctattgataagcatgaagctgtgcagtttgacatgaattggaaagtacctgcaatcctttattatgtcaaacggaatctcaattccagatacaacctgaacatcaagaaccctattgaggcaagtgtcttgctggctgaagcctcgctggcacggaagcagcggaaaacacatactacctttattccactgatgctgaatgagatgccacagattggggacctggtgggtctggatgctgagtttgtcacccttaatgaggaggaagcagagttacgcagtgatggtaccaagtctaccattaaaccaagccagatgtcagtagccaggattacctgtgttcggggccagggacccaatgagggtatccccttcattgatgactacatctctacccaggagcaggtggtggattacttgactcaatactcgggtataaagcctggtgacctcgatgccaaaatttcctccaagcacctaacaactctcaagtctacctacttaaagcttcgttttctcattgacattggagtcaagtttgtgggtcatggcctgcagaaggacttccgggtcatcaacctgatggtgcccaaggaccaagtccttgacactgtctacctgttccatatgccccgaaaacgaatgatttccctgcgattccttgcttggtactttctggacctgaagattcaaggggaaacccatgacagtattgaggatgcccgcacagcccttcagctgtaccgaaagtatctggagctaagcaaaaatggcactgagcctgagtctttccacaaggtgctcaagggtctttatgagaagggcagaaagatggactggaaggtgcctgagcctgagggccaaacaagtcccaagaatgcagctgtcttctcctcagtgctggcgctctgactacccttcccaaagaaccacggccctctccctttactgttctatagccccagaactgggagatggcttcctaagttggctataccttgtccacttccagtactggacgtgctcagggtctagggtcacagatggtgctattaattgaactggaacacagcagaattgttgcaaaggttctaggagccagattcattccttcttcattctttgcaaaacagtggtacagacatggagtctagaattgacccagatggaaagtaattggtattcttaatatcctgggtgactaatatccaggcagagaagctcctggaaccataactgtaagttcctagctggctagggattgaagtcctggacagtgacagaggataccacagtagttcaagacttagcacaagtcaccaactgcttcagggatacctggaggggccagcaagtagagtgttggtggcccaagcaaaccagtgttgccaataccattgccaaaagggcctttggatcctggacaaagcttggctgccggcttcatttattcctgctgatggctgagaagcatctgtcttccatcccacttgcctgtcccaagttttgttccattttttaaaaatttgttgtaaactgcatgttttataaaataaaaataaaatatcgtttgttatttatctcattagagaactgctagtgtgggttctctggcttcagtcttcctctccttcctttgaaggtaaaggtccggaatccaaagttatggatatgaaagggtataattaggccgggcgcggtggctcacttctgtaatcctagcactttgggaggcagaggtgggtggaacacgaggtcaggagttaaagaccagcctgaccaagatggtgaaaccccgtctctactaaaaatacaaaaattagctgggagtggtggatggcgactgtaaccctagctgaggcagaaaattgcttcaacccgggaggcggaggttgcagtgagccgagatcacgccactgtatgccagcctgggcgatagggcgagactccgtctcaaaaaaaggggaaaaaggtataatttatgccttttctgggcaatgctgggtctttgctatagctgcccagtaccctaagtcagactgaagatgtacagtatggtttccgttaattgtgtaagccgacaaactacaggtcccaggatagcttgagacttgtagttgctcacaaagatgggtccggtgctgcggtgcttcctgggagatgtagtttcctgtgtattgaaacctggactgctcgctggccggcagcgcaccgttttgaaggtcctagcccacctgggctggctcacgcgcacgactagccgctcccatacagcacgcccggactctgtcgtcgctt

SEQ ID NO: 3847 - DNA, 4654 bp, Homo Sapiens
  NM_014872
agagtgctgcggcgaactggctggaggagctaggggactagaggcggggtgggaggggggcgggtggaagggggaggaagtcccgtaacggagacgctggtcaggacgttcccacctcctctgacactgccgagtccgatcggagaggggtcaccgcctccttcagcgaggaggaggggggcggagcccgactcaggatcatggattttcctggtcactttgaacaaatcttccagcagctgaactaccagagacttcatggccagctctgtgattgtgtcattgtagtggggaatagacactttaaagcccaccgctccgtgctggcagcatgcagcacgcatttccgagccctgttctcagtggcagaaggagatcagaccatgaacatgatccagctggatagcgaggtggtgacagcagaggcctttgctgcactgattgacatgatgtatacctccaccctcatgctgggggagagcaatgtaatggatgtcttattggcagcctctcacctgcatttgaactctgttgttaaggcatgtaaacattacttaacgacaaggacgctgcccatgtctccccccagtgagcgcgttcaggagcagagcgcccgcatgcagcgctcctttatgctacagcagctgggactaagcatcgtgagctcagccctcaattccagccagaatggcgaggagcagccagcccccatgagctcttccatgcgcagtaacctggatcagcgcacgcccttccccatgagacgccttcataagcgcaagcagtctgcagaggagcgggccaggcagcgcctccgaccctccatagatgagtctgccatttcagatgttacaccggagaatgggccttcaggggttcattctcgggaggagttcttttcaccagattctctgaaaattgtggataatcctaaagctgatggaatgactgataaccaggaagatagtgcgatcatgtttgatcagtcttttggcactcaagaagatgcccaggtgcccagccagtctgataacagtgctggcaacatggcacagttgtccatggcctctcgtgcaactcaggttgagactagttttgatcaggaagctgcacctgagaaaagtagttttcagtgtgaaaaccctgaggttggccttggtgagaaggagcacatgagagtggtggttaaatctgagcccctgagctcacctgagcctcaggatgaagtgagcgatgtgacctcacaagcagaaggcagcgagtctgtggaagtggaaggagttgtggtcagtgccgagaagatagacctcagccctgaaagcagtgatcggagtttttcagatccccagtctagcacagacagggtaggtgatatccatattttggaagtcacaaataacctagagcataagtccacttttagtatttcgaattttcttaacaagagcagaggaaataactttactgcaaatcagaacaatgatgataatattccaaacaccactagtgactgcaggctggagagtgaggccccctatttgttgagtccagaggctgggcctgcaggtgggccctcctctgcccctggctcccatgtagagaacccatttagtgaacctgcagactcccacttcgtcaggcctatgcaggaggtgatgggcctgccgtgtgtgcagacttcaggctaccaaggaggagaacagtttgggatggacttttccaggtctggtttgggcctccactcctccttctccagggtaatgataggttccccaaggggaggagccagtaactttccttactaccgccgcatagctcccaaaatgccagttgtaacttccgtcaggagctcacagatcccagaaaactctaccagttctcagctaatgatgaatggagctacgtcctcatttgaaaatggccatccttcccagcctggccctccacagttgaccagggcatctgcagatgttctgtcaaagtgcaagaaggccttatcagagcacaatgttttggttgtagagggagctcgcaagtatgcctgcaaaatctgctgcaaaacttttctgactttgacagattgcaagaagcacatccgtgttcacacaggtgaaaagccttacgcctgcctgaagtgtggcaagaggtttagtcagtccagccacctgtataagcactcaaagactacctgcctgcgctggcagagcagcaatcttcccagcactttgctctagctgtttgtccttacaagacaacgctgaggccagttgtcagactgaatttcttttggtaagcagttaatgcctttgggttcgaggcttccagctgcccagtggctcttaaacagtttagcaactaataaccggagaactaacatgtagtatttgtgctgctgcatttctgagtgaagtgcacgtcttgggaaagggatgcaatccctgaaaccaggtgcttccttggggttgagtaatgcagtcagaaagtagtttgtaattgatattaaaagtggcacatttaaaaatttaaaaattgaagtgcaaaaaaaattttttagcaatttttgtaaaactgtgtagcatttaaatttcctataccttctgatgggagtattatatccctgtatagtgatgcaaaatgcacttatgtgtaaccagtggtgatttggtgcctgtcttaaaggaaggcctttgaggacacacctgtctgccacaaatgctttaaagtgtatcatgagctagtcctaggcctcaaagtactgtattttttatttttacctgatttgcagtcataaacactgcactttggtgctgacactgggtccagagtgagcattctcttggactattagatgtatatacttttgaatacatcactgttggatagatgttttaacagttttttctggtttaaaaaccaaattgtaaatggagtgtgtacttgtagagagtgacaaggtattgtttccctatgtgctgtttgagcagtattttaaccaacttgtattacagatgttacagttccatgttaggaagtcagaaaagacttgtgtttgtctttgttctgctgatgtggagtcatgttttgtggggtcttccatggcacatttacctgttgctccgtccagatgttgagggccagtctaggctgacacatcctacccgaggacaagcctgttctccatttcttcactctcccctccccatatagcaactctcccaggtttagattaccgttttcgacgacagattaaccaaaaatgccccacacaggttttattactgttatatactatacttttaacagtacagaccctaaattttattatttgttgctcccccaatctgataccaaatgtttaaagttgtttgaaatccaaacatggtagtgttcatgggtaaatattttctaggctatgtaagagttagcagcccatagcatagaagtaatcaagtagcatctgagactgttggaggcactagggcctctctgggccctacagcctcacttccccagcctcaccttgctgtcctctgacactgccatcagggctgttagtggcacctgtatgaggccaagtgtgcgtccaggggaacagcacaggttaatgcgtctccctagaactcatgaagtcagtttaattcatgcatgaacatgagttcattttatgttttatatagctttcttagacataccaaaccatcattcataaatcagataaattattcagtttttgtgtttagaaagctaagtatgtgtagctggaaacaaaaatgagcgtgttttctctcctgttaatctagagtgtgcagttacacatgtgtggataatttcatgttccaggggcgcttggcatctcccatggactgattcccaggaagaaaagcccaaagggaaacccacgattcctttcgagtagatgtgggaaagagcccattggaggatatgaggtcctgtgaaattcagttgtgtgtgtggctccttgttagcagtcatgttgacatggtgttaggaggctccccatccaccctttacatgatgtagggaccagtgtcttgtgagattaaccttgggacacagtgggttagcctggagaaaatgagaggccctgcctggacccagggagaggagccagtgacacaggcagagcggtgcagccctccttcccttccatttggaggaggtggtgccaggagcctgcccgcttacctctgctgaagcataagtggactttgcttttggggcttatctctgatacatgctggagccctgcctctccactgctagatggaacctggaatctctcatctacctcttagtctgtcagtttctacgtgtgagaagcaagcttgtgggccagtgtccttgtacatgctgtagcacttaaaaaataattccagggttccctggaaaaccagtcccagggttcctatgatctgtagtttctacctggattataactggttttgggtacctgaattttgattggttagccttaattatagtctggcgtgatcatgtagaatcttttctggtgaacagatcataaagttctatcaaggagttctatcaaggcatccatgtcagtggtgctatgctggttacaacttgagatttttgaaataaaaaatttgtcatattcatgcctctaaaaaaa

SEQ ID NO: 3848 - DNA, 7802 bp, Homo Sapiens
  NM_014873
ctccccgccagtccgggcgaacgcggccgggcccttggggaccgagtctcggcgccgccggggaacgggcgcgggccgcgccacagccggagcggggcagggccccgccaccgccttcttccgccggccccgccgccggccatgcattcttccggctcctctgactcccaaagccccggctggggcccggccagcccgagaaagacaggacggagtccagtgtgagaatggctataactttggaagaagctccgtggctgggctggctcttggtgaaagcactgatgaggtttgccttcatggtcgtcaacaacctggttgctattccatcctacatctgctatgtaattatacttcagccccttcgagtgctggacagtaagcggttctggtatatcgaaggaatcatgtataaatggcttttaggaatggtagcttcctggggatggtatgctggatatacagtgatggaatggggagaagatattaaagcagtttcaaaagatgaagcagtgatgttggtgaatcatcaggcaacaggagatgtgtgcacactgatgatgtgcctccaggacaaaggactggttgttgctcagatgatgtggttgatggatcatatttttaagtacacaaactttggaattgtttctctagttcatggagacttctttataagacagggaagatcttatcgtgaccaacagctgctgcttctcaagaagcacttagaaaataattacaggagcagagatcgaaaatggattgttttgtttccagaagggggcttcctcaggaagaggcgagaaacaagtcaggcatttgccaagaaaaataacttgccatttcttacaaatgttactctgccaaggtctggggcaacaaaaattattttgaatgcacttgtagcacaacagaaaaatggaagtccagcaggaggagatgctaaagaattagacagcaaatcaaaaggcctccagtggataatagatacaacgatagcttatcccaaagctgaacctatagatattcaaacctggatccttggatacaggaaaccaacagtcacacatgtacattacaggatctttccaattaaagatgtacccctggagactgatgaccttaccacttggctctatcagcggtttgttgaaaaagaagacctcttatcacatttttatgaaacaggagcttttccaccttccaagggccataaggaagctgtttccagggagatgaccctcagcaacttgtggatatttctcatacagtcttttgcatttttgtcaggctatatgtggtacaacatcattcagtatttttaccattgcctgttttaggaattgacgtggacttgtcaaggtcaccgtaggagttcagactttctttcataagtgtgcattattttacatgtgcaaatcagaatatatttaaaaaaaagcaaaagaaattcaatggatggattaatatttatccccctttgggatattttaaaatctactaaaatgaggattagtaatataatgacctgctaatatattttaagaacatgttttaaaaagatacactctatcacatatttaagcaaacatcacatttggagaagaggaaatcataaaatcatcctagaagactatctgagagaaattctgttgccaccagttatacttgacaatttagttgaagctcagaaagttatattcatccctcttagctgtagtctatattagggcagttctctagaacgcccacatttccaccaactcagtaaacttgaggggagctggttggcacctcgtgaagaactctttccctgtcgtttgcagtaacaaactccagtctgttgcagtaacaaactccagtctgttgcagtaacaaactctagaatattgacattctctgtgggggaaaagcagtgtccactggaccccttctggtactggatgtgttctttacaaaggctagctcagtccaacactgtgtttacatacactcgtgcttttccttatctgacttctcattttgtatcagaggcatatcataaattgataattttgcaaaatgcacttttttgagatgcagatatagcaaaggattagtaatatagcctgaaaacaaatgggagcatagcagtgtgtgaggttctcgagaactgtcttgtctctgtgtgtttatttgcctgccagtgctctccagcgccatcctgccctggacaccaccctgacgtgatgcctctattgcagctcagaggctttattttttccattttgacattggcactaaatgcatttggggatggttaaaacaaattactatagaacatttaaatgatcagtttaaggggaaataggctagtttatagaaaaataagagctagtggcttataatggtgacaggttctcatgtggcacccctaggacctgtgcagacagtagtctgttgaatcattacatcaaggagctgcccctgtcagggtgagtgtaattaggaacgataccagcacataaggctccccccaatctcttccagttgctttttcttttttcttttttttttagacaggtcttactctgtcacccaggctgtagtgcagtggcataatctcagctcactgcagtctctgcctcccgggttcgagcgattctcctgcctcagcctcccgagtagctgggactacaggcacccaccatcatgcttggctaatttttgtatttttagtagagatggggtttcaccatgttggccaggctggcctcgaactcctgacctcaggtgatctgcccacctcggcttcctaaagtgctgggattgcaggcgtgagccaccacgcccggcctccagttgcttttgaagagggtaaagtcaagtttctatttctagaaaacattttttagaaatttgttgcgatgtttgtacaatttacctcataagagaaccacacccttctccaaaagtgctggtactgcatcagtgagatgagtagggtttttgtttgggattgtaagactattaagatcctagtaagtcagtggtagtttactgtgatgtgagcattgtagattcccccgttgtcactaatcacacaacaattttgagaagtaggctataaaacaaaaaaaggttgctgttttctatttttaaataaaccaaaaaaaaacagaaaagatgtgaattttccccagttatgtgggaaaggtaaagcaacaccaaataaaagcccacagcagcttcatctttacgataactcagtgcatatgtgaaagagaatgatgcattaactgaaatacctcattgaatattatactactactggtaaaatgcagaagacagtgttaatgtgtttggtttggggactggttgttataaaatgcaatttttttttaaatctaagcatttcattatgtgttctacagtgtcggtgaataaatgaaaccaatctcaatttagaggtatggatgatgacagaaagcccaatagaagcttaatgatgcttctgtttgaggcccagcaagcaccactaaattactggatgaaatgaaattgttcacttgagggattagtcaaccatctgggggagaagttgctcactgtcaaatacagcatgcacggtcctagctgatagaccttttcctcattgctacagcaagccacagggtagagtgaccagttctcctatccaaaaataaatgcgaacatgcatacataaatgtggctgagggccacttttgccatcactgtgctccaaaggaacatgatattgttaaatatactgtacacattaaactattctataagatgctttacttttcaagtacggtgtcattttcacagtctccagggtgacaaatgccaatagatatgtgagttaatttttttaaatatctccgtgagttgtaaatagatgtgtatttgatctgccctatccttctttgattctttaacatgttctctctcttctgtttgcaaaatatgtttgaaagcattggtagtgctttccttatcagtaactggagttctcctgcttgcactagagaaggtaaagagagaatcagtattcttatatggcaatctggggaagcagcaatatgccactgtacaaaactgaagaaaagttcctaatttgtactttgtgaagggagatgaaaggacgtttaaagtatatatattttgtcaagaggaaagaagataaaactatgccagttttatatcaatagcttgtagaagctcagctcttcttggtcttggctagactgcctagattcccacagcagacaaggttgagaatccattgctggaatcttggtattgatgagttacagtgatggaacatgtgcttggccacaggcaggtccagtcactgcaaaagtgaccaagccagcaggtcacccttaacttcagaaacaattattggtggtgaactgtacttaaattgcagagaaacctgtaagtaatggaaggtaaagaaaaattacagaatggaaaataatattttgggcaagcaaacaaattcactgagaattccaaaagtatattaaaaaagaagatagctatgagttcagatctatcttattggtctttaatattacaaccaatccttaactttccactataaaggaaggattactagattgattactttctggatagataatctggtaataaatgataggtaaatcaaaaattacttttatttaggagtttgaattcttactctcatcagacattttttttctagggacgcttactaattaaatgatttaagttgtttcttaggggttttttgcctatatatttatgactgtgttaatgagtagtgaaatgatgcggaaagacagctatcaggaagaggaaatacagaagcctgaataatctatgggttagaaaagcatccctgaataatcaaaaattggcagtattggcattgttctcaagcctttttatgaaaatgaaatctgaaatcaccaaatgtaaacctgggaacattattctagtgttgctgtcttggattcatgttaagaagcgtcttcattctttgctcatgttgcccacttcttgtggatttgtctgagtgttttttgacaatcacttccttaaagactcttctgaactagttggacctggttaatcatagagagtagcctttaatcatggatagtcttcttggattatttttatatttgaaaagaaaatgttttatttgcactactgagtaggaagagttaattgttttctttgttctttttttgaagtcattacacaggacttcactccagagttaccattatgagtgtgttcagctctggtccacagaggatggataaaaatggtttgttatgtttttttgctctgcagtgctatgagccttatatctgttaatatgaaggacaaagtcaaaagcagcagtggatagcaggaagggtagagactaatatgtttgggaccaaaaccatctaagttagagatttccagatcacagaggggctgggcattctctggagcagtcattggttggtgctttattgtaatcattttgcgccaatccccaacaattaggaactggaccctgggaataagctgagggtgctgaactgttggggaagggtgactgtagccacatggaagataaaatatgggtttttctgcaaaatttccatctgagggtttttacatttaatatttttttaagacagtttaaagagcaaacgttttttaagtgtattctagttgcaaagtatgcacacatatcttgaatggctttatttttattgtgtaaaactgttgaacacatgactgtgatgcacaaattctttacgtgtaaggagtctatgcattttacagtaacttattttatgatcgggtgatgagacagttatactttcaactgccattatttttattaagtgctttcattttctttacagttattataaaattgtatttattttatacagatgggttttcattttcctgatgctgtaatgtttacttcagcttgttgacctttctttgtgttatctgcatgttgtaacgtgtgataagaatgaatgtaaaggctgtggcaactgtaattaatttttgtaaagggctggtcacacgtggatctggtttatgaatgcatttgggatgattttggtaaccagatcaccttttcagaaatttagatgtgaacaccaaaagaagcattttctcaacaaaaattaatagctggttctattttttttaaacctagaaaaaataaagttgatttttttcaattaaagtgcttttaattcttagcagtggggatggggcatgtgtgttttaccagagctatttgggcattaatatctgcaggcaagtacttaaagcacactgtggcagttggatgctgaaggcaaactgaaaaaccaaatgaaaaaacatcagacttccttctttggtttaaaaatatttccccctttctccccattctcccaatccagtggtgtgctggtaaatgtttagcagttcactcttctgggagaaaattatgtattcaactatacatgtttgttataaattttgctgatagcaagaacatataacacaattaacaaataataagatacaaatactttattgtaaatcccatatagccagttgattctcacagtatacttagttgctcaggaaagaactaaaatgcttttttaaaaggatacttaattgctttttgctcaactcctacagtcaacctatgattgattgtctttcaactgtgatttgaaaaatggcagactgtccaaatctaactcatttcccaataaatttattatcattcaatctgatacgtgatctactgttaaaactgtttcttaccatggtacatattagactcattaagccgaaaccacttttagctttaacattaattgtaaatttatatgattcaattttcataaccaatgcttaacaactgcaggcaaaattctaaaatgtgaccactgggtcttgggaatcagtaggggctgtatccagcacaccactgccccatcctttttttcttaactattagtgttgaataaacttctcatagttaatctacttgctgaactcaggaaattcctatcactgaccctggccagggctttaaagggtaggaaaagcattaatgtcagtcctacacagcgaacttttgatttagaagaatgtgacagaaagaaaacatttactgaaatacatgggaagcttgcatatttctaaagttgtctttatacttttcatttctcaaagctaagtaaactgtggtataggcatctctaagatgttagcatttaaaacatcaattgttttattgatgtttaaacaattgtttaaatcccactgaaaaatttaaatattaaaatatcttgcacagtctaccaaatgagttaaatcgttacagtcgtgtctacctcttatttttctatctgtatttaggctgctgttttggtgagattctaatttctttttcccctggaactactttctgtggaagacaaggaacagactggggacagaggcctgaaaacaaattggaagcactcagagatctattgctgaccagccctattcctcatgagttggcggggggaaagccattgtttttaatttccacttaatatgaaaatgcttgtttttaaaatgttttttcctgctgaacaaatgtatttttaaaaggaaaaaaattctcttttggctctaagaagtcagctgtatgagcaggcgtgaccatatcataacatgctgatatgatagaaatcaataaatttttacctctcaggaaaaaaaaaaaaaaaaaaaaa

SEQ ID NO: 3849 - DNA, 4685 bp, Homo Sapiens
  NM_014874
atgatgcagtgggagtccgagcctctgcgtcgtccgcttgggacgcgccggcggaggagtggcgcgcggaggagtggcgcgctgagacgccgctcgaagcgccgagtcgcggggcagcagaggcgtaaggagtaggcggggcgagccggctgggctcagggtccaccagctcacccgggtcgaggggcaatctgaggcgactggtgacgcgcttatccacttccctcctcccgcctccccctggggtggcgctcgctggtgacgtagtgagtgtgatggccgccgcgaggccgggaaggtgaagtcaggactggtggagtcaacacagtcaatcaatagccaacctcaacctgagacaggacagaagagaactcagaatctttttgtcttttggacttcagccatgtccatgatgcctaccctgtgaagatctctcaccatccaaaaaacgcaatgtccctgctcttctctcgatgcaactctatcgtcacagtcaagaaaaataagagacacatggctgaggtgaatgcatccccacttaagcactttgtcactgccaagaagaagatcaatggcatttttgagcagctgggggcctacatccaggagagcgccaccttccttgaagacacgtacaggaatgcagaactggaccccgttaccacagaagaacaggttctggacgtcaaaggttacctatccaaagtgagaggcatcagtgaggtgctggctcggaggcacatgaaagtggctttttttggccggacgagcaatgggaagagcaccgtgatcaatgccatgctctgggacaaagttctgccctctgggattggccacaccaccaattgcttcctgcgggtagagggcacagatggccatgaggcctttctccttaccgagggctcagaggaaaagaggagtgccaagactgtgaaccagctggcccatgccctccaccaggacaagcagctccatgccggcagcctagtgagtgtgatgtggcccaactctaagtgcccacttctgaaggatgacctcgttttgatggacagccctggtattgatgtcaccacagagctggacagctggattgacaagttttgtctggatgctgatgtgtttgtgctggtggccaactcagagtccaccctgatgcagacggaaaagcacttcttccacaaggtgagtgagcgtctctcccggccaaacatcttcatcctgaacaaccgctgggatgcatctgcctcagagcccgagtacatggaggaggtgcggcggcagcacatggagcgttgtaccagcttcctggtggatgagctgggcgtggtggatcgatcccaggccggggaccgcatcttctttgtgtctgctaaggaggtgctcaacgccaggattcagaaagcccagggcatgcctgaaggagggggcgctctcgcagaaggctttcaagtgaggatgtttgagtttcagaattttgagaggagatttgaggagtgcatctcccagtctgcagtgaagaccaagtttgagcagcacacggtccgggccaagcagattgcagaggcggttcgactcatcatggactccctgcacatggcggctcgggagcagcaggtttactgcgaggaaatgcgtgaagagcggcaagaccgactgaaatttattgacaaacagctggagctcttggctcaagactataagctgcgaattaagcagattacggaggaagtggagaggcaggtgtcgactgcaatggccgaggagatcaggcgcctctctgtactggtggacgattaccagatggacttccacccttctccagtagtcctcaaggtttataagaatgagctgcaccgccacatagaggaaggactgggtcgaaacatgtctgaccgctgctccacggccatcaccaactccctgcagaccatgcagcaggacatgatagatggcttgaaacccctccttcctgtgtctgtgcggagtcagatagacatgctggtcccacgccagtgcttctccctcaactatgacctaaactgtgacaagctgtgtgctgacttccaggaagacattgagttccatttctctctcggatggaccatgctggtgaataggttcctgggccccaagaacagccgtcgggccttgatgggctacaatgaccaggtccagcgtcccatccctctgacgccagccaaccccagcatgcccccactgccacagggctcgctcacccaggaggagttcatggtttccatggttaccggcctggcctccttgacatccaggacctccatgggcattcttgttgttggaggagtggtgtggaaggcagtgggctggcggctcattgccctctcctttgggctctatggcctcctctacgtctatgagcgtctgacctggaccaccaaggccaaggagagggccttcaagcgccagtttgtggagcatgccagcgagaagctgcagcttgtcatcagctacactggctccaactgcagccaccaagtccagcaggaactgtctgggacctttgctcatctgtgtcagcaagttgacgtcacccgggagaacctggagcaggaaattgccgccatgaacaagaaaattgaggttcttgactcacttcagagcaaagcaaagctgctcaggaataaagccggttggttggacagtgagctcaacatgttcacacaccagtacctgcagcccagcagatagtgggcacctgaggcggagtctgcgtggagaggggcggtgctgccagccctaagtgccatgtgggctcccccaggggcacgtgtggctcctgccccctggccactgccaagagaatgaagcacccagtctcgtaccattttgagccctccagcactacttattttcccccacctttgcctgctgttgctggaagagctggctcatacccccaaaggacactttcagcgacagctatggacagcatggtaccaaggagttaagttgaggctttttccagctttctctggttcatttgattgcttgataaggcctcaggatctcagcattgcacaatgcctcatggaagcctttgagggtatcacacagacacccccaccttcctccagcctgtgcgcacctgccctccttgcagcccagcacacctgcaggtgtaagggacgattggagtttcttcccagagagtctgtcccagaaggactgtggcttgtgtgtgtccatctcgcctgttggctcagtgcttcatcccatttgcagagcctcagacacgtcttggtggtgaggctcagttacccctgggcttaggctgaggcgggccctgtgctgggggtggtagaaaggatgctgctgaggcagctggaggagtgggagtagctcagaggggagggctgttggatgtatggggagctggcagagcaggtggcagtcactgggacaaggagggacttgcctctcttctcattattgtgtcctttgctttagtgtcagtcctggacttgtgcaggcctgttttgtgtagatctgttttggaagatggcatggtctaggtggttgaaggatgtagtagaaggatggatggtggaaggtggggacgttggtggctggctgaggtgcatgggccccacacaggacagctggagaatgggccgtccacttggcctcgttctgcgaggggctcatgggtctgagagcccccacccactaggcttgattgcatccctgttgtgccctttaagagacatgtttccaccccacccccaaccttgtcccaagtgccctggactaaatttcctgtgccagtgactgcagttggccaagggacaatgtggaaaacccagtgtccatctttccaccctccctgatctccagaaccttcgactgacccccttgtctttatgctgatgttgagttttgggattgttactggttgaagtgggggcagatgcctgtcaccaaggtgttgactgtgtgagaaaagcagtttgggtgacaaatcctgtgtggcacaagttggatcgcttcctagaaataagcaacacctctcccaaaaagcagcccacaaggcaggggcccagcagcccagccatcactcatctttgaggaaatgagttggtagcctctgtgcactgtttggtggccacatcacaggtgatgtcctgttcacatacctgcttgtatttaaagccctcagtctgtcctgttgtgtggggcgaagtgatggactctgccaggtggacatgctgtgggtggatgttcccggcgtgtgccgggcctgaatggacaggggccacttcacagcatgtcagggaaaatcactgtcacacaattccaatggattttgtgctctttttgaaaaaaaaaaattctttagcgtaaacatgaattttttttcaatgtagcccctggggaatgaatgaaattttgagcttcttcaatacgtaaaattaaatttataccactgagggagagaccctttctgaaagaagtatggccaaaagcactttaatgctgctgacattgttgtttttatgttcatttgctggagcgcaagacgtgctgacacagtgagttttctctgatgtatttaaggtgatgtatttgcttgagttactcctgtatcattgctcataatattggaaactaaaataaaacctagttggaaatcctttgtgaaaaaaaaa

SEQ ID NO: 3850 - DNA, 7293 bp, Homo Sapiens
  NM_014875
ctggggagccggcgctggaggtggtgagtggcgtggggactgtgtcgagggggtccccaaggtgccggaccctgcggaggggcgaagtttcggcactggggagggcgtgcggacgctttccctacaggcgaccactgctctgcgggcgggtggtcttagctccagtcccccattcagttcctcagcattccaggtcggcggcgaaggggtccccgaacgaagggcgcaaggcagcgtctctgctgggaccgggaagccggacttcagggcctctcggcccgtgggcttctccccgagtctccccgagtcggttggcattaagagtttagcagatactttcagaaatggatacataagaaatggctggaaatcaaatgaatgtccaaagaagagcttagggtcttagtaacattcttttttaaaataactgtctgccaaaatgtcattacacagtactcataatagaaataacagcggtgatattcttgatattccttcttcccaaaatagttcatcactgaatgccctcacccacagtagccgacttaagctgcatttgaagtcggatatgtcagaatgtgaaaatgatgatccattattgagatctgcaggtaaagtcagagacataaatagaacttatgttatttctgccagtagaaaaacagcagacatgccccttacccctaatcctgtaggtagattggcacttcagaggagaactacaaggaacaaagaatcatctttgcttgttagtgagttggaagacacaactgaaaaaacagcagaaacacgtcttacattacaacgtcgtgctaaaacagattctgcagaaaagtggaaaacagctgaaatagattctgtcaaaatgacactgaatgtgggaggtgaaacagaaaataatggtgtttctaaggaaagtagaacaaatgtaaggattgtaaataatgctaaaaactcttttgttgcctcttctgtacctttagatgaagatccacaggtcattgaaatgatggctgataagaaatacaaagaaacattttctgcccccagtagagcaaatgaaaatgttgcacttaagtactcaagtaatagaccacccattgcttccctgagtcagactgaagttgttagatcaggacacttgacaacgaaacctactcagagcaagttggatatcaaagtgttgggaacaggaaacttgtatcatagaagtattgggaaggaaattgcaaaaacttcaaataaatttgggagcttagaaaaaagaacacctacaaaatgtacaacagaacacaaactgacaacaaagtgcagcctgcctcagcttaagagcccagctccatcaatactgaagaatagaatgtctaaccttcaagttaaacaaagaccaaaaagttcctttcttgcaaataaacaggaaagatccgcagaaaatacaattcttcccgaagaagaaactgtagttcagaacacctctgcaggaaaagaccccttaaaagtagagaatagtcaagtgacagtggcagtacgcgtaagacctttcaccaagagagagaagattgaaaaagcatcccaggtagtcttcatgagtgggaaagaaataactgtggaacaccctgacacgaaacaagtttataattttatttatgatgtttcattctggtcttttgatgaatgtcatcctcactacgctagccagacaactgtctatgagaagctagcagcaccactcctagaaagagccttcgaaggcttcaatacctgtctttttgcttatggtcagactggctctggaaaatcatatacgatgatgggatttagtgaagaaccaggaataattccaagattttgtgaagatcttttttctcaagtagccagaaaacaaacccaagaggtcagctatcacattgaaatgagcttctttgaagtatataatgaaaaaattcacgaccttctggtttgtaaagatgaaaatgggcagagaaagcaaccactgagagtgagggaacatcctgtttatggaccatatgttgaagcactgtcaatgaacattgtcagttcttacgctgatatccagagttggctagaattgggaaataaacaaagagctactgctgctactggtatgaatgataaaagttcccgatctcattcagttttcaccctggtgatgacccagaccaagacagaatttgtggaaggggaagaacacgatcacagaataacaagtcgaattaacctaatagatctggcaggcagtgagcgctgctctacggctcacactaatggagatcgactaaaggaaggtgtgagtattaataagtccttgctaactttgggaaaagttatatctgcactttcggaacaagcaaaccaaaggagtgtttttattccttatcgtgaatctgttcttacatggctgttaaaagaaagtctgggtggaaattcaaaaactgcaatgattgctacgattagtcccgctgccagcaacatagaagaaacattaagcacacttagatatgctaaccaagcccgtttaatagtcaacattgctaaagtaaatgaagatatgaacgctaagttaattagagaattgaaggcagaaattgcaaagctaaaagctgctcagagaaacagtcggaatattgaccctgaacgatacaggctctgtcggcaagaaataacatccttaagaatgaaactgcatcaacaggagagagacatggcagaaatgcaaagagtgtggaaagaaaagtttgaacaagctgaaaaaagaaaacttcaagaaacaaaagagttacagaaagcaggaattatgtttcaaatggacaatcatttaccaaaccttgttaatctgaatgaagatccacaactatctgagatgctgctatatatgataaaagaaggaacaactacagttggaaagtataaaccaaactcaagccatgatattcagttatctggggtgctgattgctgatgatcattgtactatcaaaaattttggtgggacagtgagtattatcccagttggggaagcaaagacatatgtaaatggaaaacatattttggaaatcacagtattacgtcatggtgatcgagtgattcttggtggagatcattattttagatttaatcatccagtagaagtccagaaaggaaaaaggccatctggaagagatactcctataagtgagggtccaaaagactttgaatttgcaaaaaatgagttgctcatggcacagagatcacaacttgaagcagaaataaaagaggctcagttgaaggcaaaggaagaaatgatgcaaggaatccagattgcaaaagaaatggctcagcaagagctttcttctcaaaaagctgcatatgaaagcaaaataaaagcactggaagcagaactgagagaagagtctcaaaggaaaaaaatgcaggaaataaataaccagaaggctaatcacaaaattgaggaattagaaaaggcaaagcagcatcttgaacaggaaatatatgtcaacaaaaagcgattagaaatggaaacattggctacaaaacaggctttagaagaccatagcatccgccatgcaagaattctggaagctttagaaactgaaaagcaaaaaattgctaaagaagtacaaattctacagcagaatcggaataatagggataaaacttttacagtgcagacaacttggagctctatgaaactctcaatgatgattcaggaagccaatgctatcagcagcaaattgaaaacatactatgtttttggcagacatgatatatcagataaaagtagttctgacacttctattcgggttcgtaacctgaaactaggaatctcaacattctggagtctggaaaagtttgaatctaaacttgcagcaatgaaagaactttatgagagtaatggtagtaacaggggtgaagatgccttttgtgatcctgaagatgaatgggaacccgacattacagatgcaccagtttcttcactttctagaaggaggagtaggagtttgatgaagaacagaagaatttctggttgtttacatgacatacaagtccatccaattaagaatttgcattcttcacattcatcaggtttaatggacaaatcaagcactatttactcaaattcagcagagtcctttcttcctggaatttgcaaagaattgattggttcttcgttagatttttttggacagagttatgatgaagaaagaactatagcagacagcctaattaatagttttcttaaaatttataatgggctatttgccatttccaaggctcatgaagaacaagatgaagaaagtcaagataacttgttttcttctgatcgagcaatccagtcacttactattcagactgcatgtgcttttgagcagctagtagtgctaatgaaacactggctgagtgatttactgccttgtaccaacatagcaagacttgaggatgagttgagacaagaagttaaaaaactgggaggctacttacagttatttttgcagggatgctgtttggatatttcatcaatgataaaagaggctcaaaagaatgcaatccaaattgtacaacaagctgtaaagtatgtggggcagttagcagttctgaaagggagcaagctacattttctagaaaacggtaacaataaagctgccagtgtccaggaggaattcatggatgctgtttgtgatggtgtaggcttaggaatgaagattttattagattctggactggaaaaagcaaaagaacttcagcatgaactctttaggcagtgtacaaaaaatgaggttaccaaagaaatgaaaactaatgccatgggattgattagatctcttgaaaacatctttgctgaatcgaaaattaaaagtttcagaaggcaagtacaagaagaaaactttgaataccaagatttcaagaggatggttaatcgtgctccagaattcttaaagttaaaacattgcttagagaaagctattgaaattattatttctgcactgaaaggatgccatagtgatataaatcttctccagacttgtgttgaaagtattcgcaacttggccagtgatttttacagtgacttcagtgtgccttctacttctgttggcagctatgagagtagagtaactcacattgtccaccaggaactagaatctctagctaagtctctcctcttttgttttgaatctgaagaaagccctgatttgttgaaaccctgggaaacttataatcaaaataccaaagaagaacaccaacaatctaaatcaagcgggattgacggcagtaagaataaaggtgtaccaaagcgtgtctatgagctccatggctcatccccagcagtgagctcagaggaatgcacacccagtaggattcagtgggtgtgaatactgatgtgtaggcacttttatgaccacccatgaaagaaaaagaacacttgctcggtaattttctttatgcaggagagtttaagagaaatcagcacagatatttcaaaaaagtccatgtctttttatctttaaaatatctatttatcaaaggccagacacagtggctcacgcctgtaatcccagcactttgggaggcgggcagatcacaaggtcaggagtttgagaccggcctggccaacatggcgaaaccccgtctctactaaaaatacaaaaatttgctgggcatggtggcgcgtgcctgtaatcccagctactaggggggctgaggcaggaggatcgcttgaacctgagaggcagaggttgcagtgagccaagatcatgccactttactccagtctgagcaacagaacgagacttagtcaaaataaataaataaataaataaataaataaataaataaataaataaaatatatttttatctttaaagtgtttaacattggtatactgtctgtagttggttcattagtcgtttataaagggttattttctcatgagtggaaacctgaacaatcagttacctttgtgcctatgccttctctctcctcagacagctgggatgtttatggtgaaatggcctgtacaagtttaactaagacaacttaacttgcattgttaatcaaaaattcttttctcaaagggttaactggttgccattttgaatagtatgttcaagggtgtagcttcctgtttctttccaaattataagtagctacctaaatatagtataattatatattaataatatggcttgctggcacagtagtttaccctgttatctgtgtttcataatgggggctgtatgaatattatttaaaactaataaaatgttgccagaattatactaaactgttggatgagattaggagatcagaggctggaccttctcttgataatgcttgttttgttaaaggtataatgaaataatttgtatatgatttgatgaagattaaagacccttattttccacagctttaaaaaaaaacctttatttatgatcaagtaataaagataatattctacttgtgggatcttacattacggaaatagtttgacgtttttgacctcaagagtatgtataatttgaagagatactttgtaactatgcttgggtgatattgagcagttcctaaagaataattcatttaaaaaaaaagaagaaaaaaaaagaagaattcatttaaataacctgatcctttcatttgcccttttcgaatttacagatactacttgtacatttggcataactagttgaaattggccattcgtaccatgaataaatctgatagtttccttgttaggaagagattgtaagtaaatacagtcattgcagtcagaacagtattagtgaaccttgtgtggtgttttcaagctctttaaaatggtacaatgtagcacatttgctttcatttctttttttatttttggcatttgaccttgtattctttctgaagctctatatgtgtttttattagtcaataatctggcaagtagcactttgcctgtgcagtttgctggagtgtagatgtacatatgaggatttcccgggaggtgcacttctttgaagaacttcctaaagtacctgtatagtagttttcatcttaatattcagtatttaatcttcagtttgtgctttgtaaactcatgacttaattggtcagaaactttttagtgtctttataaaattttgtatacatatttatactaaacacattgtgatactgtatttgaatgaatggtgaaaaaatatttgctattggaattatgtgcactgacaagaaatgttataaagagaatgcctttaataaatcttttcagcattagaattgaaaaaaaaaaaaaaaa

SEQ ID NO: 3851 - DNA, 2232 bp, Homo Sapiens
  NM_014878
ggcccgggggcggagcaaggcaaggaagcggaagcggagaggcggtcgggatccgctgcgcgagctgtctcggtcccacgtgtgcgagttgctacgatggaagttaaagggaaaaagcaattcacaggaaagagtacaaagacagcacaagaaaaaaacagatttcataaaaatagtgattctggttcttcaaagacatttccaacaaggaaagttgctaaagaaggtggacctaaagtcacatctaggaactttgagaaaagtatcacaaaacttgggaaaaagggtgtaaagcagttcaagaataagcagcaaggggacaaatcaccaaagaacaaattccagccggcaaataaattcaacaagaagagaaaattccagccagatggtagaagcgatgaatcagcagccaagaagcccaaatgggatgacttcaaaaagaagaagaaagaactgaagcaaagcagacaactcagtgataaaaccaactatgacattgttgttcgggcaaagcagatgtgggagattttaagaagaaaagactgtgacaaagaaaaaagagtaaagttaatgagtgatttgcagaagttgattcaagggaaaattaaaactattgcatttgcacacgattcaactcgtgtgatccagtgttacattcagtatggtaatgaagaacagagaaaacaggcttttgaagaattgcgagatgatttggttgagttaagtaaagccaaatattcgagaaatattgttaagaaatttctcatgtatggaagtaaaccacagattgcagagataatcagaagttttaaaggccacgtgaggaagatgctgcggcatgcggaagcatcagccatcgtggagtacgcatacaatgacaaagccattttggagcagaggaacatgctgacggaagagctctatgggaacacatttcagctttacaagtcagcagatcaccgaactctggacaaagtgttagaggtacagccagaaaaattagaacttattatggatgaaatgaaacagattctaactccaatggcccaaaaggaagctgtgattaagcactcattggtgcataaagtattcttggacttttttacctatgcaccccccaaactcagatcagaaatgattgaagccatccgcgaagcggtggtctacctggcacacacacacgatggcgccagagtggccatgcactgcctgtggcatggcacgcccaaggacaggaaagtgattgtgaaaacaatgaagacttatgttgaaaaggtggctaatggccaatactcccatttggttttactggcggcatttgattgtattgatgatactaagcttgtgaagcagataatcatatcagaaattatcagttcattgcctagcatagtaaatgacaaatatggaaggaaggtcctattgtacttactaagccccagagatcctgcacatacagtacgagaaatcattgaagttctgcaaaaaggagatggaaatgcacacagtaagaaagatacagaggtccgcagacgggagctcctagaatccatttctccagctttgttaagctacctgcaagaacacgcccaagaagtggtgctagataagtctgcgtgtgtgttggtgtctgacattctgggatctgccactggagacgttcagcctaccatgaatgccatcgccagcttggcagcaacaggactgcatcctggtggcaaggacggagagcttcacattgcagaacatcctgcaggacatctagttctgaagtggttaatagagcaagataaaaagatgaaagaaaatgggagagaaggttgttttgcaaaaacacttgtagagcatgttggtatgaagaacctgaagtcctgggctagtgtaaatcgaggtgccattattctttctagcctcctccagagttgtgacctggaagttgcaaacaaagtcaaagctgcactgaaaagcttgattcctacattggaaaaaaccaaaagcaccagcaaaggaatagaaattctacttgaaaaactgagcacataggtggaaagagttaagagcaagatggaatgattttttctgttctctgttctgtttcccaatgcagaaaagaaggggtagggtccaccatactggtaattggggtactctgtatatgtgtttcttctttgtatacgaatctatttatataaattgtttttttaaatggtcttttttaaaaaaaaaaaaaaa

SEQ ID NO: 3852 - DNA, 2504 bp, Homo Sapiens
  NM_014879
gggacccactatcttgtggtttctgtcaagttcctgattttcatccgtagttgaagatgagcaagaactctgtaacagtgttaccttggagcctacaatgagaggtatttcaaaatgagtgaagcatgactctcacagatgaaggcctagacgcaggatctttaatgaaaaaacacttgggccacttcaagacgacaaacgctcactgggcaaaacaccttcactgaaaagagacctcatattatgcaaaaaaaatcttaaaaggcctctgccttcagaagttacaagatgatcaattcaacctccacacagcctccagatgaatcctgctctcagaacctcctgatcactcagcagatcattcctgtgctgtactgtatggtcttcattgcaggaatcctactcaatggagtgtcaggatggatattcttttacgtgcccagctctaagagtttcatcatctatctcaagaacattgttattgctgactttgtgatgagcctgacttttcctttcaagatccttggtgactcaggccttggtccctggcagctgaacgtgtttgtgtgcagggtctctgccgtgctcttctacgtcaacatgtacgtcagcattgtgttctttgggctcatcagctttgacagatattataaaattgtaaagcctctttggacttctttcatccagtcagtgagttacagcaaacttctgtcagtgatagtatggatgctcatgctcctccttgctgttccaaatattattctcaccaaccagagtgttagggaggttacacaaataaaatgtatagaactgaaaagtgaactgggacggaagtggcacaaagcatcaaactacatcttcgtggccatcttctggattgtgtttcttttgttaatcgttttctatactgctatcacaaagaaaatctttaagtcccaccttaagtcaagtcggaattccacttcggtcaaaaagaaatctagccgcaacatattcagcatcgtgtttgtgttttttgtctgttttgtaccttaccatattgccagaatcccctacacaaagagtcagaccgaagctcattacagctgccagtcaaaagaaatcttgcggtatatgaaagaattcactctgctactatctgctgcaaatgtatgcttggaccctattatttatttctttctatgccagccgtttagggaaatcttatgtaagaaattgcacattccattaaaagctcagaatgacctagacatttccagaatcaaaagaggaaatacaacacttgaaagcacagatactttgtgagttcctaccctcttccaaagaaagaccacgtgtgcatgttgtcatcttcaattacataacagaaatcaataagatatgtgccctcatcataaatatcatctctagcactgccatccaatttagttcaataaaattcaaatataagtttccatgcttttttgtaacatcaaagaaaacatacccatcagtaatttctctaatactgacctttctattctctattaataaaaaattaatacatacaattattcaattctattatattaaaataagttaaagtttataaccactagtctggtcagttaatgtagaaatttaaatagtaaataaaacacaacataatcaaagacaactcactcaggcatcttctttctctaaataccagaatctagtatgtaattgttttcaacactgtccttaaagactaacttgaaagcaggcacagtttgatgaagggctagagagctgtttgcaataaaaagtcaggtttttttcctgatttgaagaagcaggaaaagctgacacccagacaatcacttaagaaaccccttattgatgtatttcatggcactgcaaaggaagaggaatattaattgtatacttagcaagaaaattttttttttctgatagcactttgaggatattagatacatgctaaatatgttttctacaaagacttacgtcatttaatgagcctggggttctggtgttagaatatttttaagtaggctttactgagagaaactaaatattggcatacgttatcagcaacttcccctgttcaatagtatgggaaaaataagatgactgggaaaaagacacacccacaccgtagaacatatattaatctactggcgaatgggaaaggagaccattttcttagaaagcaaataaacttgatttttttaaatctaaaatttacattaatgagtgcaaaataacacataaaatgaaaattcacacatcacatttttctggaaaacagacggattttacttctggagacatggcatacggttactgacttatgagctaccaaaactaaattctttctctgctattaactggctagaagacattcatctatttttcaaatgttctttcaaaacatttttataagtaatgtttgtatctatttcatgctttactgtctatatactaataaagaaatgttttaatactgaaaaaaaaaaaaaaaa

SEQ ID NO: 3853 - DNA, 2957 bp, Homo Sapiens
  NM_014882
ccgagccttcagagtgaggcattattttctcctctctcttgtcagatactgactcccacgcaggaaaaaggaagcaccttttgtcagatgctgtggccacttcctcttcagaaggctccagccaacctttcggtttgcagaatgacggggcccgccgcggtgccggactgcctgtgcacggggccaccgactgcagcctgggttttattcttggcctggccctgaccgggagctggcccctcggctgcttctctggctcgggggggactttctctggctcagatccggacccctgaactggacctggttgtcgtccccccgcttctcagccccctctggggttcctctctcctctccgcccactctttgctcactgccccatgtccctcggtcagtcggcctgtctgttcctctctatagctcggtcaaggagtgtgatgactggcgagcagatggctgccttccatccatcgtccacccccaacccgctggagaggcccatcaagatgggctggctgaagaagcagaggtccatcgtgaagaactggcagcagaggtactttgtgctgagggcgcagcagctctactactacaaggatgaagaggacacgaagccccagggctgcatgtatctaccaggatgtacaatcaaggagatcgccacaaacccagaagaagctgggaagtttgtctttgaaatcattccagcctcatgggaccagaatcgcatgggacaggactcctatgtcctcatggccagctctcaggcggagatggaggagtgggttaaattcctcaggagagttgctggcacaccctgtggagtgtttggccagcgcttggatgagactgtggcctatgaacagaaattcggcccccatctggtgcccatcctggtggagaaatgtgcagagttcatcctggagcacggccggaatgaagagggcatcttccgtctgcctgggcaggacaacctggtgaagcagctgagagacgcttttgatgctggggagcggccctcctttgacagagacacagatgtgcacactgtggcttccctgttaaagctctacctccgagacctcccagagcccgtggttccctggagccagtacgaagggttcctgctctgtgggcagctcacgaatgcggatgaggcaaaggctcagcaggagttgatgaagcagctctccatccttcctcgtgacaactatagtctcctgagctacatctgcaggttcctacatgaaatacagctgaactgtgctgttaacaagatgagtgtggacaacctggctactgtgattggtgtgaatctcatcaggtcgaaggtcgaagaccctgccgtgatcatgagagggactcctcagatccaaagagtgatgactatgatgatcagagaccatgaagtcctcttccccaagtccaaggatatacccctgtcaccccctgcccagaaaaatgaccccaagaaagctccagtggcccgaagctctgtaggctgggatgccactgaagacctccgaatttctaggacagacagcttcagtagcatgacaagcgactctgatacaaccagccccaccggacagcagccgagcgatgcgtttccggaggacagcagcaaagtacccagggaaaagccaggagactggaaaatgcaatctcgtaaaaggactcaaacactccctaaccggaaatgtttcttgacatcagcttttcagggtgccaacagcagcaaaatggagatctttaaaaatgaattctggtcgccttcctcagaggctaaggcaggggaagggcacaggagaacgatgtctcaagacttgcgccaactttctgactcccaacggacttccacctacgataacgtcccttccctgccagggtcccctggggaggaagccagtgcactctcttcccaagcctgtgactccaagggagatactcttgccagtccaaactctgaaactgggcctggaaaaaagaactctggagaagaggaaattgattctttgcagaggatggtccaagagctacgaaaggaaatagaaacacagaagcaaatgtatgaggaacagattaaaaaccttgagaaggaaaattatgacgtttgggctaaagtggtgaggctcaatgaagaactggagaaggaaaagaagaagtctgcagccctagagatcagcctccgcaacatggagcgctcccgggaggatgttgagaagaggaacaaggccttggaagaagaagtcaaggaatttgtcaaatccatgaaggaacccaagaccgaggcttaagggtcccaggagtactgcagggacagccccagagaggcccaactctggcccctttctcagtgctatctgatgacggggaaacaaaattattctctgagagggaaaggacatttgagggaaacatcaaatttccccataaataaatgaatggagtttgcaggaaggtgagggtgagcagagatgtgtgtggacatctctgaccatccatcgctgtattcaaatggattgttttattccattctggtctcaggcatgaccacgtccagtgaagacatttgaggcagcacatctcaggacccaggcaatagactggccccaactcaggctggactaaggtgtgattaattctttgttttttgtgtggaacagctcaccttgtcagacagcctcagggcatctctgagacacaggggcagaaaatgacattcatcttttgagtcctcatccatggagtgctgtgtttggggggctgcatctgctgaagcgagaaccccattctgccaccccaccaggatgcccattctccaggacttctccaacttactattagactaaaccagaacaagcaacaaactgtatttatgcaagcaaaattgatgagaaaattatattcaaataaagcaaaaattaaaaaaaaaaaaaaaaaaaaaaaaaaaaaaa

SEQ ID NO: 3854 - DNA, 3667 bp, Homo Sapiens
  NM_014884
ggcggcttgcgcctgcgcggcgcggcgctgcggagaccgttggttcatttgcatgtccccgcctcgcgcggcggcggcggcgggtgaggagcctgaggcggcggcgggggtggctccgcgcgcggtggtctcgggggcaaaataacatggcagccagacgaattacacaggagacttttgatgctgtattacaagaaaaagccaaacgatatcacatggatgccagtggtgaggctgtaagcgaaactcttcagtttaaagctcaagatctcttaagggcagtcccaagatccagagcagagatgtatgatgacgtccacagcgatggcagatactccctcagtggatctgtagctcactctagagatgccggaagagaaggcctgagaagtgacgtatttccagggccttccttcagatcaagcaacccttccatcagtgatgacagctactttcgcaaagaatgtggccgggatctggaattttctcactctgattctcgggaccaggtcattggccaccggaaattggggcatttccgttctcaggactggaaatttgcgctccgtggttcttgggaacaagactttggccatccagtttctcaagagtcctcttggtcacaggagtatagttttggtccctctgcagttttgggggactttggatcttccaggctgattgagaaagagtgtttggagaaggagagtcgggattatgacgtggaccatcctggggaggctgactctgtgcttaggggcggcagtcaagtccaggccagaggtcgagctctaaacatcgttgaccaggaaggttccctcctaggaaagggggagactcagggcctgctcacagctaaggggggtgttgggaaacttgtcacattgagaaatgtgagcacaaaaaaaatacccaccgtgaatcgtattactcccaaaactcagggcactaaccaaatccagaaaaacactccaagtcctgatgtgaccctggggacaaacccagggacagaagatatccagttccccattcagaagatccctctggggctggatctgaagaatcttcggctccccagaagaaagatgagctttgacatcatagataagtctgatgttttttcaagatttgggatagaaataatcaaatgggcaggattccacaccataaaagatgatattaaattttcccaacttttccagactctctttgaacttgaaacagaaacctgtgctaaaatgcttgcctcattcaaatgttccttaaaaccagagcacagagatttttgcttttttactatcaaatttttaaagcactctgctttgaaaacacccagagttgataatgagtttttaaacatgcttttagacaaaggtgctgtgaagaccaaaaattgcttttttgaaatcataaagccttttgacaagtacataatgagacttcaagaccggcttctgaagagtgtcacacctttgcttatggcctgcaatgcctacgagctaagtgtcaagatgaagaccctcagtaaccccctggacttggctcttgccctagaaaccaccaactctctctgccggaagtctttggcccttttgggacagacattttccttggcctcttctttccggcaggagaaaatcttagaagctgtcggcctgcaagatatagctccctcacctgctgcgtttccaaacttcgaagactccactttgtttgggcgagagtacatagaccacctgaaggcctggctagtcagcagcggatgtcccctccaggttaagaaagccgaaccagagccgatgcgagaggaggagaaaatgattcctcctacgaaacctgaaattcaggccaaggctccaagtagtctgagtgatgctgtcccccagcgagcagatcacagggtagtgggcaccatcgaccagcttgtgaaacgtgtcatcgaaggcagcctgtctcccaaagagagaactcttctcaaagaggaccctgcttactggtttttgtctgatgaaaatagtctggagtataaatattacaagctgaagttggcagaaatgcagcggatgagcgagaacttgcgaggagccgaccagaagccgacctcagcagactgtgcagtgagggccatgctgtactcccgggctgtccgcaacctcaagaagaaactccttccgtggcagcggcgggggctcctccgtgctcaagggctccggggctggaaggcgaggagagcgaccaccgggacccagaccctcctatcctcaggcaccaggctgaaacaccacggccggcaggctccaggcctctcacaggcaaaaccatccctgccagacagaaatgatgctgccaaggactgcccgccagacccagttggaccttctcctcaggaccccagcttagaagcctcaggcccatcccccaagccagcaggagtggacatctctgaagcacctcagacctcttctccctgcccatctgctgacattgacatgaagacaatggagactgcagagaaactggctagatttgttgctcaggtgggaccagagatcgaacaattcagcatagaaaacagcaccgataaccctgacctgtggtttctacatgaccaaaatagttctgctttcaaattctatcgaaagaaagtgtttgaactatgtccatcaatttgtttcacgtcatctccgcacaaccttcacactggtggtggtgacaccacgggttctcaggagagccccgtggacctcatggaaggggaagcagagtttgaagacgagccccctccgcgggaggctgagctggagagcccagaggtgatgcctgaggaggaggacgaggacgatgaggatgggggagaggaggcccccgctcctggaggggcgggcaagtctgagggcagcacccctgccgacggccttcccggcgaggctgccgaggacgacctggctggagcacctgccttgtcacaggcctcctcaggtacctgcttccctcggaagaggatcagcagcaagtcattgaaggttggcatgattccagctcccaagagagtgtgtctcatccaggagccaaaagtccatgaaccagttcgaattgcctatgacaggcctcggggtcgtcccatgtccaaaaagaagaaacccaaggacttggacttcgcccagcagaagctgaccgataagaacctgggcttccagatgctgcagaagatgggctggaaggagggccatggcctgggctccctcggaaagggcatcagggagccggtcagcgtgggaaccccctcggaaggggaagggttgggtgctgacgggcaggagcacaaagaagacacattcgatgtgttccgacagaggatgatgcagatgtacagacacaagcgggccaacaaatagttccagggtcacccccgagaggacaacaggcatctggaagtgctctctcgccactctgggtgctttactgtctctggcttgtttccatcactggaaatcacttagagaattgtagtgtttttggtccttgataaagcctagaagacatttgtgatgttacaaaatggaagttttcttttgtttctgttttttaagatctaagaagttgtgaatgttgttaatcatttagccgttgcaataaatgtagaggaaatgcagtgtgaaaaaaaaaa

SEQ ID NO: 3855 - DNA, 1104 bp, Homo Sapiens
  NM_014886
gggcttgtgggtctttgagacccgaaaattgagagcgttttcgcactccagcggctgctcctggcggctctgcggccgtcaccatgccacagaatgaatatattgaattacaccgtaaacgctatggataccgtttggattaccatgagaaaaagagaaagaaggaaagtcgagaggctcatgaacgttcaaagaaggcaaagaaaatgattggtctgaaggctaagctttaccataaacagcgtcatgctgagaaaatacaaatgaaaaagactatcaagatgcatgaaaagagaaacaccaaacaaaagaatgatgaaaagacaccacagggagcagtacctgcctatctgctggacagagagggacaatctcgagctaaagtactttccaatatgattaaacagaaaagaaaagagaaggcgggaaaatgggaagtccctctgcctaaagtacgtgcccagggagaaacagaagtattaaaagttattcgaacaggaaagagaaagaagaaggcatggaagagaatggttactaaagtgtgctttgttggagatggctttacaagaaaaccacctaaatatgaaagattcatcaggccaatgggcttgcgtttcaagaaagcccatgtaacacatcctgaactgaaagccaccttttgcctaccaatacttggtgtaaagaagaatccctcatccccactgtatacaactttgggtgttattaccaaaggtactgtcattgaagtaaatgtgagcgaattgggccttgtgacgcaaggaggcaaagttatttggggaaaatatgcccaggttaccaacaatcctgaaaatgatggatgtataaatgcagtcttactggtttgacagcaatttcatatataattattgaggactacacaccaattgaagaaactgccattactgtgatgtttctgaatactaccaaacagccatacatgtctgcaatgaagagatttattaaattgtaaacattaaagtggtccagttttataaatggtctttattttgaaatacgctttgaccccatgttcataaaactgaatgattgaaaaaaagcaaatatacaaatatcctacttcat

SEQ ID NO: 3856 - DNA, 2860 bp, Homo Sapiens
  NM_014887
gccatcttgcgtacggaggtgaggtttgttaccgcgattctgagaggtgggcttttagtccctccagacctcggctttagtgctgtctccgcttttctttcaccttcacagaggttcgtgtcttcctaaaagaaggttttattgggaggtaaaggtcaatgcgtaggggtagagtaagatgtcttatggtgaaattgaaggtaaattcttgggacctagagaagaagtaacgagtgagccacgctgtaaaaaattgaagtcaaccacagagtcgtatgtttttcacaatcatagtaatgctgattttcacagaatccaagagaaaactggaaatgattgggtccctgtgaccatcattgatgtcagaggacatagttatttgcaggagaacaaaatcaaaactacagatttgcatagacctttgcatgatgagatgcctggtaatagaccagatgttattgaatccattgattcacaggttttacaggaagcacgtcctccattagtatccgcagacgatgagatatatagcacaagtaaagcatttataggacccatttacaaaccccctgagaaaaagaaacgtaatgaagggaggaatgaggcacatgttctaaatggtataaatgacagaggaggacaaaaagagaaacagaaatttaactctgaaaaatcagagattgacaatgaattattccagttttacaaagaaattgaagagcttgaaaaggaaaaagatggttttgagaacagttgtaaagaatctgaaccttctcaggaacaatttgttccattttatgagggtcataataatggtctcttaaaacctgatgaagaaaagaaagatcttagtaataaagctatgccatcacattgtgattatcagcagaacttggggaatgagccagacaaatatccctgtaatggacaagtaatacctacattttgtgacacttcatttacttctttcaggcctgaatggcagtcagtatatccttttatagtgccctatggtccccctcttcccagtttgaactatcatttaaacattcagagattcagtggtccaccaaatccaccatcaaatattttccaagcccaagatgactctcagatacaaaatggatattatgtaaataattgtcatgttaactggaattgcatgacttttgatcagaacaatgaatatactgactgtagtgagaataggagtagtgttcatccctctggaaatggctgcagtatgcaagatcgatatgtgagtaatggtttctgtgaagtcagagaaagatgctggaaagatcattgtatggacaagcataatggaacagacaggtttgtgaaccagcagtttcaagaggaaaagttaaataaattgcagaagttacttattcttttaagaggtctgcctggttctgggaaaacaacattgtctcgaattctgcttggtcagaatcgtgatggcattgtgttcagcactgatgactattttcaccatcaagatgggtacaggtataatgttaatcaacttggtgatgcccatgactggaaccagaacagagcaaaacaagctatcgatcagggaagatctccagttataatagataacactaatatacaagcttgggaaatgaagccatatgtggaagtggccataggaaaaggatacagagtagagtttcatgaacctgaaacttggtggaaatttgatcctgaagaattagaaaagaggaataaacatggtgtgtctcgaaagaagattgctcagatgttggatcgttatgaatatcaaatgtccatttctattgtaatgaattcagtggaaccatcacacaaaagcacacaaagacctcctcctccacaggggagacagaggtggggaggctctcttggctcacataatcgtgtctgtgtcacaaataatcattaaattagctattttcagctaacacatttgttgttgcacttgaaaaagagttagtgagcctgtcttggagtttaagtagtttcaaataaaaaaaggctacagtgcctcacaaaggatgttcccagcaagttgtttaaattcccagcaagttgttaaagtgtaaataaaaatatatgaaattgtattttaaatgtttttatattctcttgttgtaatactcttggctgttatggaagcacctgagtaatagagtggtgggtaggagctaggatgtttttctacaatcgaattttaaactaatttatctattttatagacactattgaacagttttttaatagttcatatctaaatctaacttttcataaaactttacggtttttccttcactaccttaaatatgcaagaaatactgacttggtatagggtaccttagttttctctattcattagacaggtaaaattatatttcagctgattgatctgtgtgacaaaattatttcttagctataatcagcacatcacttagttcaaacaaaattccccagcaaatgttagatagtaggtatatcagtcacctggggagttttcttcataatatgcatattcatcttgtaatgcatacatagttatcatcctccttctcaacccatctccctaaccccacatgcttgccagttcttgaagggataaagtgattctaataatgttttacttctctctgttcaatttaatgtgatataattctagtataaaaatattttggacagttgcttaacatggtcataagaggatttgtactatagaatatcttctagtactaatttttctgtagagcaaattatatttctctcactggatagtttttagatgtgtttcttcatataaaattaaaaactgagatggaattcaaaaaaaaaaaaaaaaaaaaaa

SEQ ID NO: 3857 - DNA, 3465 bp, Homo Sapiens
  NM_014889
agagggggttcctcgccagccaggtgctcgtcatgcgcaatgtggcgctgcggcgggcggcagggcctgtgtgtgctgaggcggctgagcggcggacatgcacaccacagagcgtggcgatggaacagtaaccgggcttgtgagagggctctgcagtataaactaggagacaagatccatggattcaccgtaaaccaggtgacatctgttcccgagctgttcctgactgcagtgaagctcacccatgatgacacaggagccaggtatttacacctggccagagaagacacgaataatctgttcagcgtgcagttccgtactactcccatggacagtactggtgttcctcacattcttgagcataccgtcctttgtgggtctcagaaatatccgtgcagagaccctttcttcaaaatgttgaaccggtccctctccacgttcatgaacgccttcacagctagtgattatactctgtatccattttccacacaaaatcccaaggactttcagaatctcctctcggtgtatttggatgccacctttttcccatgtttacgcgagctggatttctggcaggaaggatggcggctggaacatgagaatccgagcgacccccagacgcccttggtctttaaaggagtcgtctttaatgagatgaagggagcgtttacagacaatgagaggatattctcccagcaccttcagaacagacttcttcctgaccacacgtactcagtggtctccgggggtgacccactgtgcatcccggagcttacatgggagcagcttaagcagtttcatgccactcactatcacccaagcaatgctaggttcttcacgtacggtaattttccattagaacagcatctgaaacaaattcacgaggaagcactgagcaaattccagaaaattgaaccaagcaccgtggtgccagctcagacaccctgggacaagcctagggaattccagataacatgtggcccggattcatttgctacagatccctctaaacaaacaaccatcagcgttagcttcctcttaccggacatcaccgacacatttgaagccttcacattaagtcttctgtcttcactcttgacttctgggcccaattctcccttttacaaagccttgattgaatctggccttggcacagacttttctcctgatgttggatataatggctacacgagggaggcctactttagtgtcggcctccaagggattgcggagaaagacattgagaccgtcagaagcctcatagacagaacgattgatgaagtagttgagaaaggatttgaagatgatcgaattgaggctttacttcataaaattgaaatacagatgaaacatcagtctaccagctttgggctgatgctgacatcatacatagcttcttgctggaaccatgatggggaccctgtggagctcttgaagttgggaaatcagttagctaaattcagacagtgcctgcaggaaaatccaaaatttttgcaagaaaaagtaaaacagtattttaagaataaccagcataagctgactttatcgatgaggccagatgacaagtatcacgagaagcaggcacaggtggaagccacgaagctcaagcagaaggtcgaggctctgtcccccggagacaggcagcagatctacgagaaaggtctagaattacggagtcaacaaagcaaacctcaagatgcctcttgtctgccagcgttgaaagtttccgatattgaacccaccatacctgtcacagagttggacgtggtcctgacagctggagatatccctgttcagtactgcgcccagcccaccaatggcatggtgtatttccgggccttctccagcctgaacacactccccgaggagctgaggccctatgtgcccctcttctgcagcgtcctcaccaagctgggctgcggccttcttgactaccgggagcaggctcagcagatagaattgaagaccggagggatgagtgcttctccccacgtgctccccgacgactcacacatggacacctacgagcagggtgtgcttttctcctctctctgcctggatcgaaacctgccagacatgatgcagctatggagtgaaatatttaacaacccgtgctttgaagaagaggagcacttcaaggtgctggtgaagatgaccgcccaggagctcgccaatggaattcctgactctgggcacctgtacgcatccatcagggcaggccggaccctcacgcccgcaggggacctgcaggagaccttcagcgggatggatcaggtgcggctgatgaagaggattgcagaaatgacagatatcaaacccatcctgaggaagctcccgcgtatcaagaaacacttgttaaatggtgataatatgaggtgttcagtgaatgcgactcctcagcagatgcctcagacagaaaaagcggtcgaagacttccttagaagcatcggtcggagtaaaaaggaacggaggcctgtgcgcccacacacggtcgagaaacctgtgcccagcagctctggtggagatgcccacgttccccatggctcccaggtcattaggaagctggtcatggaacccaccttcaagccctggcagatgaagactcacttcctgatgcccttcccggtgaattacgtgggtgaatgcatccgaactgtcccctacacggacccagatcatgccagtcttaaaatccttgcacgtttgatgactgccaaattcttgcatacagaaattcgagaaaaaggcggtgcttatggtggaggcgcaaaactcagccacaatgggattttcaccctttactcttacagggacccaaatacaatagagacgctccagtcttttgggaaggctgtcgactgggctaagtctggaaaattcacacagcaagacatcgacgaagccaaactttctgtcttctcaaccgtagatgctcctgtcgctccttcagacaaaggaatggaccacttcttgtacggcctctcggatgagatgaagcaggcccacagagagcagctctttgctgtcagccacgacaagctcctggccgtgagcgatagatacctcggcactgggaagagcacacacggcctggccatcctcggacccgagaacccgaaaattgccaaggacccatcctggatcatccaatgagcagccgtggcgctcgactgcacaggagcccgagacaatacacctccgagctgaatatgaaaagtcagaaatgctactgctttttccaagaatattatgtcattgagtgtcgccaaagcccttgactggcgagtcaaaaactcagatctatcttaagagtgaccaggaagaggttcattgaaataatcatgcatgaagcgccaaagatgcaccatgtagaattttcactttgtactggcaggctcgttttacctcattctagaatatttaagaatctaaaaataaagggcaactctgacttaaaaaaaaaaa

SEQ ID NO: 3858 - DNA, 5018 bp, Homo Sapiens
  NM_014892
gcggatccccgaactgcgcggcccgactcgagtccgccatattggatgccgcagccgctgctgccagcgcttcctcctctgtcttcgccgagcggggctggttcctgcggcccgagcggcggggaggtgaaacaggagcccgtcggaggaaggggcagaagggagtggagagtgtaggggaaggggctagagggagggggaccgaaacggagcggggcagagaagagaaggcgccgcggcccagcccctcccccgcccgccgccgacccgccccggcagcgcctctgttccctagaacggcgctccccccgccctagcggccatgccggtgccgctctgccgctgagggagcccttccccgccagcgcgtgcccttccactccgccccgaggtcgcagcggcccgctctcccgccagcgccccctcctcgcggccacgcagcagcccgcgtctcgctctccccacccagtgcagtggccgccgcctcttccgccgccgggctcggggcctccgcagcgacaacatggaggccgtgaagaccttcaatagcgagttgtattccctgaatgactataaaccacccatttcgaaagcgaaaatgacccaaattactaaggcagccatcaaagctattaagttctataaacatgtggtacagagtgttgagaagtttattcagaaatgtaaaccagaatacaaagtacctggactttatgttattgactccattgtgcgacaatcccgacatcagtttggtcaagaaaaggatgtgtttgcacccagatttagtaataacatcattagcactttccagaatttatatcgttgccctggggatgacaagagtaaaatagtgagagtactaaacttatggcagaagaataatgtatttaagagtgagattattcagccccttttggatatggcagccgggattccgcctccagttgtcacacctgttttggccagcactaccactgctatgagcaatactccaggaactcctgtgacacctgttactccggccaatgtggtccaaggcttacctgatccgtgggtatctcagataacaaatacagatacacttgcggctgtagctcagatcttgcaaagtcctcaaggccagcagcttcaacaattaatacaaaccttacagatacaacaacagaagccccagccttccattctgcaggccctagatgctggtcttgttgttcagttgcaagctcttacggcacaacttacagctgcagctgcagctgccaacactcttactcccttagaacagggagtctcctttaacaagaagttgatggataggtttgattttggggaagactctgagcatagtgaagaacccaaaaaggaaattccagcttcacaactttctcacgtttcagaatctgtgaacaattccatttttcatcagatagcagaacaactacaacagcaaaacctagaacatctcagacagcagctcttggagcagcaacagcctcaaaaggccactcctcaggatagtcaggaaggaacctttgggtcagagcattcagcgtcaccatcacaagggagtagtcagcagcattttcttgaacctgaagtcaatttggatgattccatagatattcagcaacaggatatggatatagatgaagggcaagatggagtggaagaggaggtctttgaacaagaagctaagaaagtggcggttcgctcaagatcaagaacacattcacgatctcgttcaagatcaccaagaaaacgaaggtctaggtcacggtctggctctagaaagcgtaaacacagaaagcgatcacgctcccgctcaagagaaagaaagaggaaatcatcacggtcgtattcaagtgaaaggagagccagagaaagggagaaagaacgacagaaaaagggattacctccaattagatctaaaacactaagtgtatgtagtactactctctgggttgggcaagtggacaagaaggcaacacagcaagacttaaccaacctgtttgaagagtttggacagattgaatccattaatatgattcctccccggggctgtgcttatgtctgcatggttcatcgacaagatgcatttcgagctcttcagaaactcagttctggatcatataaaattgggtccaaggtcattaagatcgcttgggctttaaacaaaggtgtaaaaacagaatacaaacaattctgggatgtggatcttggagttacatatataccatgggaaaaagttaaagtggatgacttggaaggttttgcagaaggaggcatgattgatcaggagactgtaaatactgagtgggaaactgtgaaaagctcagaacctgttaaagagacggtccagacaactcagagcccaactccagttgaaaaggagacagtggtcacaacccaggcagaggttttccctcctcctgttgctatgttgcagattccagtggcgccagccgtgcctacagttagtttagtcccaccagcatttcctgtgtcgatgccggttcctcctcctggattcagtccaatccctccacctccttttttaagagcaagttttaacccttcacaaccaccacctggtttcatgccgcctccagttcccccacctgttgtgccaccccctacgattccaccagtagtaccaacatctttagtgcagccgtcattatccatgacaccggaaactgtgaaagatgttggatttggtagccttgttataccaggcggttctgttgccagcaatcttgctacttccgctctgccagctggaaatgtttttaatgctccaactaaacaggcagagcctgaagaaaaagtacctcatcttatagaccaccagatttcttctggtgaaaacaccagatcagtgattccaaatgatatttcaagtaatgctgcaattttaggaggacagccgccaaatgtgacaagcaattctggaattctgggagtccaaagaccaaatgtatcaagtaattctgaaattcttggggtccggccatctaatgtttccagtagttctgggattattgcagcccaaccaccaaatattctaaataactctggaatattgggaatacagccacccagtgtgtcaaatagttctggacttttgggagtgctacccccaaatatacctaacaattctggacttgtaggagtacagccaccaaatgttccaaatactcctggacttctgggaacacagccaccagctggacctcaaaacttaccccctttaagtatccctaatcaaaggatgcccacaatgccaatgttagacattcgtccgggactaataccacaggcacctgggccaagattccctttaatacagcctggaattccaccccaacggggaatcccacccccatcggtacttgattcagctcttcatccaccaccccgtggaccttttcctccaggagatatttttagtcaaccagaaagaccttttttagctcctggaagacaaagcgtagacaatgttactaacccagaaaaaaggataccacttgggaatgataacattcaacaggaaggagatagagattaccggtttcctcctatagaaaccagggaaagcattagtagacctccccctgtggatgttagagatgtggttgggcggcctatagatccaagagaaggtcctggacggcctccactagatggtagggatcattttggaagacctcctgtagatataagagagaatcttgtgaggccaggtatagatcatcttggtcgaagagaccactttggctttaatccagagaagccctgggggcatagaggagattttgatgagagagagcatcgggttctaccggtctatggtggtccaaaaggcttacatgaagaaagaggtagatttcggtctggaaactatcgatttgatcctagaagtggtccttggaaccgaggatttggacaagaagttcacagagattttgatgaccgcagaagaccctgggagaggcaaagggatagggatgacagagattttgatttctgcagagaaatgaatggaaatcgtcttggacgagacagaattcaaaacacttgggttccccctcctcatgctcgggtttttgattattttgaaggggccacttctcaacgaaaaggtgataatgtgcctcaggttaatggtgaaaatacagagagacatgctcagccaccacctataccagtacagaatgatcctgaactttatgaaaaactgacatcttcaaatgaaataaacaaggagaagagtgacacagttgctgatatagaaagtgaaccagtggtagaaagcacagaaactgaggggacataatcatcactcagtaggtaaaagataccttttgtaaagttgtcatctctctgtaatagataatggctgactggaccatagttgttcacttttgtctgccagaattaagttaatctgatgttcatgttcacctttctcttaaaataattgtacaactgacttgtatagacattgttcttaatatgaacatggtaggtaaactttttttttatttttttctgataaaatacaaatgttggccccagattcttttaacgtcaaggaaatgaataacagcttgtcagagacttcctatggaagaaagaattttttagatactatcattaggttggatatggtaatagatatatttcagaatagcaagtggtggtatatcttatccatatctttaggctgctgcagaattttaaggttatagataaagctgtgatattttatgcaaagactggctctaggtatttgaggagcacaatacagagattttaaaaagtgattttgtaaaatctacactacggtctctgtttctccaaagtaagtgtttgtgatttgttcctcatactgcagtgagtaaaaaagaaacaagaaaacaacaacataaatattaaagtacgtttcaatgttgggtgaattttgtttttagatgccaataaaacttatttgtttgataaaaaaaaaaaaaaaa

SEQ ID NO: 3859 - DNA, 5566 bp, Homo Sapiens
  NM_014899
cgcgcgggcggctcctttgtgtccagccgccgccaccggagctcccggggcctccgcggggagcgcgtcccccgcatccgcccgacccccggggctggcacgtgctgcgcccggtccgctgagggggcggaggccccgatctccccgaccccccttctctgcttagaggaggaggagcagcggcagcggcagcaggaggcgacagctgccagccgaggaggcgcggcggagaggggactgcggtcagctgcgtccacttggggctgtgcggcggtcccgcgcccggcgatgttcccgggcactccctgagtagcggcagcttatcccccgcccgctagcccgccctggtccccggctcgctcgctggctggcgcggccccggccccgctctgcgtcggccccgccgcggtggaggcgcgcgagggggacgcggccggggatgagcggattgcgggtgaactcgccgcccgggggccccgcgaagccgtgagccgctgcttttctccgagtcgccgccctgcccttggatttgagatcatgtccatccacatcgtggcgctggggaacgagggggacacattccaccaggacaaccggccgtcggggcttatccgcacttacctggggagaagccctctggtctccggggacgagagcagcttgttgctgaacgcggccagcacggtcgcgcgtccggtgttcaccgagtatcaggccagtgcgtttgggaatgtcaagctggtggtccacgactgtcccgtctgggacatatttgacagtgattggtacacttctcgaaatctaattgggggcgctgacatcattgtgatcaaatacaacgttaatgacaagttttcattccatgaagtaaaggataattatattccagtgataaaaagagcattaaattcagttccagtaattattgctgctgttggtaccagacaaaatgaagagttaccttgtacatgcccactatgtacctcagacagagggagctgtgttagtacaactgaagggatccaacttgcaaaagaactaggagcgacctatcttgaactccacagccttgatgacttctacataggaaagtattttggaggagtgttggagtattttatgattcaagccttaaatcagaagacaagtgaaaaaatgaagaaaagaaaaatgagcaactcctttcatggaattagaccacctcaacttgaacaaccagaaaaaatgcctgtcttaaaggctgaagcgtcacattataactctgacttaaataacttgctgttctgctgccagtgtgtggacgtggtattttacaaccccaatttaaagaaagttgtagaggcccacaagatcgttctctgcgctgtaagccatgttttcatgctgcttttcaatgtgaagagtcccactgacattcaggattccagtatcatccgaactacccaggatctttttgctataaacagagatactgcatttccaggtgctagccatgaatcttcaggcaacccaccattacgagtcattgttaaagacgccctcttctgttcttgtttatcagacatccttcgcttcatttattcaggtgcttttcagtgggaagaattggaagaagatatcaggaagaagttgaaagattctggggatgtttcaaatgtaatcgagaaagttaaatgcattttaaaaacaccaggaaagattaattgcctaaggaattgcaaaacctatcaagccagaaaacctttgtggttttataacacttccctcaagtttttccttaataagccgatgcttgccgatgttgtcttcgaaattcaaggtacgacagtgccagcccacagggccatcctggtggcccgttgtgaagtgatggcagccatgtttaatggtaattacatggaagcaaagagtgtcctgattcccgtttatggtgtttccaaagagactttcttgtcatttttagaatacctgtacacagactcctgctgcccagctggcatattccaggccatgtgtctcctgatctgtgccgagatgtaccaagtgtccagactgcagcacatctgtgagctgttcatcattacccagctgcagagcatgccaagcagggaactggcatccatgaaccttgatatagttgacctgcttaaaaaggccaagtttcaccactctgattgcctttcaacctggctacttcatttcattgctactaactacctcatcttcagtcaaaagcctgaatttcaggatctttcagtggaagaacgcagttttgttgaaaagcacagatggccgtcgaatatgtacttgaagcagcttgcggaatacaggaagtatattcactcccggaaatgtcgttgcttagtaatgtaacctggagcttttatacactacatttcttttttattattatgaagaatgggatacctccaggttccagtaaaattcttctgaccgaaaccaatgtgggtgttagaaaaattaccatatagcttaatatgtttattagttctctttggaaaaaaactaccactgtggtcttaaaagggaacaaaatataccataggctaaaactaaggctttcactctagaatgcaaagctgttttgcagctgttttcccttaaagatgtcctgttgctttagtgatatttagacccctctcagttaagaaatgcttagattaaaaaaaaaaaattacgtaggattaatacagaaatttaatcatgtctgattaattgctctattaaaataaggggcatttaaagacccagcataaccatttgtataatgagaaatctaggggaaaaccaatcagtccaacatgagattttaggaatagaaatttgccggccatttggaaagtgaaatgccacttagttctcaattgatgacagtgtttgaatcatcataaaaaaaatacctgcttttcatctggacaacccaattgagccactttatctccttttggcaatctgagtaggcggggaacctaggcagggctggctttcttagcgtgtaacttgtgtagcagcacagggcccacacttagaaggaccccacacttggttcaaggctctgctatagcggaaattcttaataatgtttgaagaagggccccatgatttcattttgtgctgagccctcaaaattatgtctgtttcgtggtgggaaatatcctatgttttcttgctcaaacacctttctctctgaaagcagaaaaaggcactgatataaagggaagagaaggaggctcaccggagggaagagaacatagtgaagattcccgcctttggggaggtctggaccacccagggcctccactgccaccttggctggcaagggagaaatgtgttgtgttgtcttagctttaaaacagtcacagttcttgctctatcatagatgaacaaatactttcttgatcattctgtaagaccaggaggttggtaagagtgactaaccagcctaactttaatacacatgtataaagatgttcacagagaaagatgctctgtagagaatttgctaccgaagttggctcaagaatttgtttttagtgttatttaccaagattaggacgtcagtggcttaaattctttgaattcttttcaaggactgcaagattatttgataaagagtagcatgaatcttgtgctctaatattacacagtaagttcaaagaaaggatgtaagtcaaagacttgttacatagagggaaaatggactgggatagaggacagactgatagtttctttctttcatatcacatgtatagagaaataattatatcagaaactcacaaacctagacatggaaaaacagattactgtctattgtcagcatcattttcatctgtaagtcactactggaatatatttttcttttaatttccagtgactttagaatacacacagtttttccgacttttcaaaaatttgattaaatggttttatagtataatattgggaccccataccgttagcccttgtatgtataccaacactgccaaagtaaaacattaggtcaggcatggtggctcaggcctgtaatcccagcattttgggaggctgaggcaagtggataacttgaggtcatgagttcgaaaccagcctggccaaaacagtgaaaccccgtctctactaaaaatacaaaattagccagatgtggtggcgcacacctgtaatcccagctactcaggaagctgaggcaggaaaatcgcttgaacctgggaggtggaagttgcagtgagccgagatcgcaccactgcactccagcctgggtgacaagagcgaaactccatctcaaaaaaaaaaaaaaaaccaaagtgaaacactaaaaattccctatagatatattccaggaaatattttaattgggctgattttaattaggctgtatcattgatgattactggaatcgattttatgtcttttgtattttaatcacttgagttaatcaaccactggcaaatcccatttgacaaagattagcattgtaaaaaacagatactgtggtagatttctagaaattcattcacatttaagacttctaaaatggaataatagccttttgtttttcatgagcatattcgcacccctatatgaattacagcatttaaagttcaaaatcagtaacttttaatctaggaaattgaaaaatattaagttgcaaagcaaaaaaaggtattttcttgaaaatactatttaatgtttaactagactataggtagttccttaaggttgtttgacctgaagtggagttgggtttggaagctggtgcccagttggtgtggagtgtgtagttttgttatgaaagttctctaccacctacctgtgtgagtgacaccaacatccagatgtcacagctctccagagctagtcagaagagaaatcaaattagtgtttaaacccatttgcatattgacttgtcagtacctttaactcaatttaatataacaagaaatcgtaaaatacttataacctatcttagagaaatgagtgctggttttgagagttgttttttaactgaaagattatttctagatgggtagtgctttgtgctggtttctgcttccatatatttcccagtcattttaattagagaagatactctatggtagaactaaggcctttcctttcttggccaaagtctttaccctatttaaccctttgtatatttctgactgctcactgttcatattataggggaccagatttgtaatatagaattctccataacatgaatgaaattaattctgtccaagccagcatggtggcttcatattaagtagtaacagaagtctgaacaattggataaatttgacttccaagacagctaaacttttcaactgcaattttaaaaactacactacactgttatagttaatctgacaaaaatgtcctcaaagagtactttattttatttaaagcatctgtttaattcaacctttaataattttgcaaagaagggtatgtgtgtattttaatatagcctgacctgaatttatatgtttttagctttagtatttaactttttgtaacaaataaaccttttttaaaacaagtttaa

SEQ ID NO: 3860 - DNA, 4923 bp, Homo Sapiens
  NM_014900
cggcggcggcgcccgcgggctgggagccggggcccgcaggtggaagcgcacccgggaggcgggccggccggggctggagcggctcgggcgggctcttgacgctcagccagcttcgctccggcctcgggaaggcgcgcgtcccgccctgacccgccggcctctcccaccccagcagtgacgcgccgcctgggagctggagcccgcgcagcgccccgcagggcgatggacggccgaaccccgcgcccgcaggacgccccagccaggagaaaaccaaaagccaaggcaccacttcctccagctgagaccaaatatactgatgtctcttcagctgctgattctgtagaatccactgctttcatcatggaacagaaagaaaacatgatagataaagacgttgaactctcagtggtcctacctggggatattatcaaatctactactgttcatggcagtaaacctatgatggacttgttgatattcctttgtgcacagtatcacttaaatccatcaagttacacaatcgatctgttgtcagctgaacagaaccacattaaatttaagccaaacacaccaataggaatgttggaggtagagaaggtaattttaaagccaaaaatgttggataagaaaaaacctacacctataataccagagaaaactgtgagagtagtgattaattttaagaaaacacagaagaccatagtgagagtgagtccacatgcatcgcttcaagagcttgcccctattatatgtagcaaatgtgagtttgatccgttgcatacactattgttgaaagattatcaatcgcaggagcctcttgacttgacaaaatctcttaatgacctgggactaagagaattatatgcgatggatgtcaacagagagtcctgccaaatatcacaaaacctagatattatgaaggagaaagaaaataaagggtttttcagtttttttcaacgcagtaagaaaaagcgagaccaaactgcaagtgcccctgcaacccctctagtaaataagcaccgcccaacttttacaaggtccaataccatttccaaaccatatatttccaacaccctgccgtcggatgcacccaagaagaggcgggctccactgcccccgatgccagcatctcagagtgtcccccaagaccttgcacacatccaggagaggcctgcttcttgtatagtgaaatccatgagcgtggatgagacagataagagtccctgtgaagcaggaagagtgagggcaggttcactgcagctcagcagcatgtctgcagggaattcatctttgagaaggacaaagcgaaaagcaccttccccaccctccaaaatacccccgcatcaaagtgatgaaaatagtcgtgtgactgccttacagccagtagatggagttcctccagacagtgcttcagaagcaaactctcctgaggagctatccagcccagaaacctttcaccctgggctttccagtcaggagcagtgcactgcgcccaaactgatggaggaaacctctgtctttgagtgccctgggacacctgaggcagccataacatcattgacatctggaataagctctgattatagccttgaagagatagatgaaaaggaagaactgagtgaagtgcctaaagttgaagctgaaaatatttctccgaagtcacaagatattccttttgtatctactgatataataaatacactgaaaaatgatcctgactcagcccttggcaatggtagtggagagttctcacaaaactccatggaagaaaaacaagaaactaaaagcacagatggacaagaaccacacagtgtagtatatgatacaagcaatggaaagaaggtagttgacagtataagaaacttgaagtcgttgggcccaaaccaagagaatgttcaaaatgaaataattgtctatccagagaacacagaagacaatatgaaaaatggagtgaagaaaacagaaatcaatgtagaaggtgttgccaaaaataacaacattgatatggaagttgagagaccatcaaactctgaggcacatgaaactgatactgctataagttacaaggaaaaccatctagcagcttcatcagtaccagatcaaaaactgaatcaacccagtgcagaaaagacaaaagatgcagcaattcagacaaccccttcttgtaacagttttgatgggaaacaccaagatcataatttatctgactccaaagttgaagaatgtgtgcaaacttcaaataacaacatatcaactcaacactcatgcttaagttcacaagattctgtaaatacctcaagggaattcaggagtcaaggcaccctaattatacattcagaagatccgcttaccgtaaaagatccaatttgtgcacatggtaatgatgatcttttgcctcctgtagataggattgacaaaaattccactgcttcttacctaaagaattacccactttatagacaggactacaatcccaagccaaaaccttcaaatgaaattacacgagagtatatacccaaaattggcatgactacttataaaatagtgcctcccaaatccttggaaatatcgaaagactggcaatcagaaaccatagagtataaagatgatcaggacatgcatgctttagggaaaaagcacactcatgagaatgtgaaagaaactgccatccaaacagaagattctgctatttctgaaagcccagaagagccactgccaaaccttaaaccgaagcctaacctgagaacagagcatcaagtgcccagttctgtgagctcacctgatgatgccatggttagtcctctgaaacctgctcccaaaatgacaagagacactggcacagctccttttgcaccaaatttggaagaaataaacaatattttggaatcaaaatttaaatctcgggcttcaaatgcccaggccaaacccagctctttttttttgcagatgcagaagagagtatcgggtcactatgtgacatctgcagctgccaagagtgtccatgctgcccctaatcctgctccaaaagaactgacaaataaagaggcagaaagggatatgctgccttctccggagcagactctttctcccttaagtaaaatgcctcactctgttccacaaccccttgttgaaaaaactgatgatgatgtcatcggtcaggctcctgctgaagcctcccctcctcccatagctccaaaacctgtgacaattcctgctagtcaggtatccacacaaaatctgaagactttgaaaacttttggtgccccacgaccatactcaagttctggtccttcaccgtttgctcttgctgtagtgaaaaggtcacagtctttcagtaaagagcgcaccgagtcacctagtgccagtgcattggtccaacctccagccaacacagaggaagggaagactcattctgtaaataaatttgtggacatcccacagcttggtgtgtctgataaggaaaataactctgcacataatgaacagaattcccaaataccaactccaactgatggcccatcattcactgttatgagacaaagttctttaacattccaaagctctgacccagaacagatgcgacagagtttgctgactgcaatccgttcgggagaggctgctgccaaattgaaaagggttaccattccatcaaatacaatatctgtgaatggaaggtcaagactcagccattccatgtcccctgatgcccaggacggccattaaatgttaccctgccacaccactgcacttcacttccacttcagaccaacttcatactaatggaacattttggcaaatgtatattcagatgtacactaatatattatctattaaaatattagaatttgtgttgtggcttttaatgccagaagaaaagttaccagaatttataatttatagtaattttttgatcttttttttgccttaagagttgaatatgctgctttagaactttaaaacaaggtgtaaatgattttcattttttacaaatgaaaaataattcctttgtattgatttcacttaccagcacattctctacaatggtgacttagacaaaagtataagattcatagactttatatttgtatgacatacaactaggacaaacatagatatgacatttgctgcctcagtgtagcaattggaaatatttataagttatatgaaagcctgttttgggctgaaagaatgatttagaaaactagtgataccaaataagtatattcagttcaataattattttcaatgatgaatcacttagtgtgaaagacttgccttgtgtattctttatgtaattacaaatcactgtcaattttatgggaagctcatagtattttaatattttattaacatggaactcttgtttttttaatctttagaacttaaattctacaagaattttaaatattttctgtatataattatgacattgtcacacagaaattacacattttatgtgccagaagccttaaacatctttctgtgaaaatgctgatatattgtgacagttatttcacatttgatatgtagagaggaataggggttagtttatgtttatattgaaaaactttaaagactatttggaagttccagaaattctggttttaattcaagtaaaatgataaaatagtcattatatagttcagatgctaatattctaagtaataatatatatttacattgaagctaaaactgttaagcaaaacaatgcccatttgtcggcttacagctcttccggagtctagagcctgttggtgttctgtccctactttaagaatttaattgctcacttattctgaaagctttgttcaaacaagatgatattaaatttgttttcactaaaactactgggatatctgcctcttggggatttttttttcaatttaataaaagcaagttgtatatttggggtgctttttaaaa

SEQ ID NO: 3861 - DNA, 4348 bp, Homo Sapiens
  NM_014905
agtgcggagccttaggcggagcgaagagaaccggtcgcggcaatcctagcgcgcagcagcagcagcagcagcagcagcagcagcagcagcagcagcagcacccgcatccgctgcgggagtccgagccggaaccacacccaagtagctgccctttcctcttctgtcatctcaccgccccaccacagaccgcgttccccgaggaaaccggccgcccacgcccggagcatcctcccctgttgagcgggcgctgacggacccggcggcatgatgcggctgcgaggctcggggatgctgcgggacctgctcctgcggtcgcccgccggcgtgagcgcgactctgcggcgggcacagcccttggtcaccctgtgccggcgtccccgaggcgggggacggccggccgcgggcccggctgccgccgcgcgactccacccgtggtggggcgggggcggctggccggcggagcccctcgcgcggggcctgtccagctctccttcggagatcttgcaggagctgggcaaggggagcacgcatccgcagcccggggtgtcgccacccgctgccccggcggcgcccggccccaaggacggccccggggagacggacgcgtttggcaacagcgagggcaaagagctggtggcctcaggtgaaaataaaataaaacagggtctgttacctagcttggaagatttgctgttctatacaattgctgaaggacaagagaaaatacctgttcataaatttattacagcactcaaatctacaggattgcgaacgtctgatcccaggttgaaagagtgtatggatatgttaagattaactcttcaaacaacatcagatggtgtcatgctagacaaagatctttttaaaaaatgtgttcagagcaacattgttttgttgacacaagcatttagaagaaagtttgtgattcctgactttatgtcttttacctcacacattgatgagttatatgaaagtgctaaaaagcagtctggaggaaaggttgcagattatattcctcaactggccaaattcagtcccgatttgtggggtgtgtctgtttgtacagtagatggacagaggcattctactggagataccaaagttcccttctgtcttcagtcctgtgtaaaacctttgaaatatgccattgctgttaatgatcttggaactgaatatgtgcatcgatatgttggaaaagagccgagtggactaagattcaacaaactatttttgaatgaagatgataaaccacataatcctatggtaaatgctggagcaattgttgtgacttcactaataaagcaaggagtaaataatgctgaaaaatttgactatgtcatgcagtttttgaataagatggctggtaatgaatatgttggattcagtaatgcaacgtttcagtctgaaagagaaagtggagatcgaaattttgcaataggatattacttaaaagaaaagaagtgttttccagaaggcacagacatggttggtatattagacttctacttccagctgtgctccattgaagtgacttgtgaatcagccagtgtgatggctgcgacactggctaatggtggtttctgcccaattactggtgaaagagtactgagccctgaagcagttcgaaatacattgagtttgatgcattcctgtggcatgtatgacttctcagggcagtttgctttccatgttggtcttcctgcaaaatctggagttgctgggggcattcttttagttgtccccaatgttatgggtatgatgtgctggtctcctcctctggataagatgggcaacagtgttaagggaattcacttttgtcacgatcttgtttctctgtgtaatttccataactatgataatttgagacactttgcaaaaaaacttgatcctcgaagagaaggtggtgatcaaagggtaaagtcagtgataaatcttttgtttgctgcatatactggagatgtgtctgcacttcgaagatttgctttgtcagctatggacatggaacagcgggactatgattctagaacagcactccatgtagctgctgcagagggtcatgttgaagttgttaaatttttgctggaagcctgcaaagtaaaccctttccccaaggacaggtggaataacactcccatggatgaagcactgcactttggacaccatgatgtatttaaaattctccaagaataccaagtccagtacacacctcaaggagattctgacaacgggaaggaaaatcaaaccgtccataagaatcttgatggattgttgtaatggtctcaaatcccaagatttaaatcacttacctatttaattgtggaaaatgattatgaagaacatgtgtatttctatctggtagtgatgtatattttacatttgtcatttcagtgttactggagttttcttcattgtgcacacaggacaaatctgatctctttgggaaaaaatagaaataaaacaatctccctccataatgtgagcaatattacctcgtgcattgtataatttgatgtaaaagaaatagttaccaatgctagcttgtgtggtcttccatgatttatttgtgttttgtgaattttcaatttatggtgatgatctgctgatatgcatttataaagtaagctctgttgtacagtctgtccaaatgggtcaaggttgcctttagaagcaaatagtgtgattttcaagacttcaaatacaaatttagtttaagtgtttgaacaactatatgcacttacggttgtgtgtttaaaatgtctctctcaccccctagcttcatgatgtgactcttaaaaaactataatagttaacaactgttagtaagatagaccaattctgattagactttatcagggaatctgtttaagatatgtttggtgaccaaaacgtatgtgtgaatgtagttataatgcttttgaaaaattttcctttttctatatccccttagtccagcctctcttctcagacatttagctatctgcctctttcctttagctgggaaagtgagagctggcatactatgcagtttttatgttttccatagtaagtcagaaaatgcctcctatttctggcatcagaactttgccatttgtctacagaagacgaaccagagacaaaattactaagtataaattagtcaagtttatcagtctaaaaaacgaagggatgtgcaactgcagctctttaagaagttttttttttttagcttctagggtaaagataaattcagaaatgctctaagctaccaaagttattctgaaagtatgggaactgctacaactaacaaacatttgtttccaagcctgtcattaagagtctgcatcaagagatttgtcctccttgggggaccactggatcattccagatttcttgtgatttttctattgtgtaattcttggtgggctctgtagtttaataataagaaaaaggccatttcattttaaattgtgacctataattctttgtcttgggttggtaattcaggattcatttggaaagtgggtaaaaggggcttcaaaaaacggatagaacaggattttctaggagttacacatacattttatcctgtcatacctcgagataaagtggcatgttagtgaggagttctgatattaagcacacacacacatgcacacaaatggacttctctgaagctgtgtttagtgaaatgagctcaagtacatgaatgttagttgttatcacatacagcaaattcctttttttttctttttctatgagcacactctgctgcttctaaactttacatgcctgatggcaccttactccagcagcctccaggtgctttcattttcacttccagtctaagccagtggctcctgccactgccctcccattacctagatggcacctcctttggtgaaaccacggccaatgttccttagctgcaccaggcccgaagctgttcccatgcttgagcttccatggggaggatgctgagtgagcagtttcctaccccgtggatctagcaagccatggagacaggtagcatttgtaagatgctgcacaggagcagcattatccccaaagatattacagggtagacacgttttaactgaaatcaatcaagataactttattcaaagagcagcccgctttgtgtgactaaaatgaaacaagacagttgaattgtgtgacttgaagattaccaatgattttgaggcttttctataataaaaagaggttctaaccattatttgggaacaaagagagttttcatcttttttcagatcaaaaccattctgtaaaatctttgttgtttaattaaatgtgccgttatttacccctgatgttatttatgactatgtgccgattcctgctaaaaaaaaaa

SEQ ID NO: 3862 - DNA, 2267 bp, Homo Sapiens
  NM_014908
gcggccgccgccatcttcgcgcgcccgctcgccctaaccccgcccccagacgccatgcccacgtgaccgctcgcccccggacccggagcgtgggcggggatttcgtcacgtgacgttgccgcggggcggtgccaagatggcgaggcccaaagaggtgaggagccggcagcgggggcggctgtaactgtgaggaaggctgcagagtggcgacgtctacgccgtaggttggaggctgtggggggtggccgggcgccagctcccaggccgcagaagtgacctgcggtggagttccctcctcgctgctggagaacggagggagaaggttgctggccgggtgaaagtgcctccctctgcttgacggggctgaggggcccgaagtctagggcgtccgtagtcgccccggcctccgtgaagccccaggtctagagatatgacccgagagtgcccatctccggccccggggcctggggctccgctgagtggatcggtgctggcagaggcggcagtagtgtttgcagtggtgctgagcatccacgcaaccgtatgggaccgatactcgtggtgcgccgtggccctcgcagtgcaggccttctacgtccaatacaagtgggaccggctgctacagcagggaagcgccgtcttccagttccgaatgtccgcaaacagtggcctattgcccgcctccatggtcatgcctttgcttggactagtcatgaaggagcggtgccagactgctgggaacccgttctttgagcgttttggcattgtggtggcagccactggcatggcagtggccctcttctcatcagtgttggcgctcggcatcactcgcccagtgccaaccaacacttgtgtcatcttgggcttggctggaggtgttatcatttatatcatgaagcactcgttgagcgtgggggaggtgatcgaagtcctggaagtccttctgatcttcgtttatctcaacatgatcctgctgtacctgctgccccgctgcttcacccctggtgaggcactgctggtattgggtggcattagctttgtcctcaaccagctcatcaagcgctctctgacactggtggaaagtcagggggacccagtggacttcttcctgctggtggtggtagtagggatggtactcatgggcattttcttcagcactctgtttgtcttcatggactcaggcacctgggcctcctccatcttcttccacctcatgacctgtgtgctgagccttggtgtggtcctaccctggctgcaccggctcatccgcaggaatcccctgctctggcttcttcagtttctcttccagacagacacccgcatctacctcctagcctattggtctctgctggccaccttggcctgcctggtggtgctgtaccagaatgccaagcggtcatcttccgagtccaagaagcaccaggcccccaccatcgcccgaaagtatttccacctcattgtggtagccacctacatcccaggtatcatctttgaccggccactgctctatgtagccgccactgtatgcctggcggtcttcatcttcctggagtatgtgcgctacttccgcatcaagcctttgggtcacactctacggagcttcctgtccctttttctggatgaacgagacagtggaccactcattctgacacacatctacctgctcctgggcatgtctcttcccatctggctgatccccagaccctgcacacagaagggtagcctgggaggagccagggccctcgtcccctatgccggtgtcctggctgtgggtgtgggtgatactgtggcctccatcttcggtagcaccatgggggagatccgctggcctggaaccaaaaagacttttgaggggaccatgacatctatatttgcgcagatcatttctgtagctctgatcttaatctttgacagtggagtggacctaaactacagttatgcttggattttggggtccatcagcactgtgtccctcctggaagcatacactacacagatagacaatctccttctgcctctctacctcctgatattgctgatggcctagctgttacagtgcagcagcagtgacggaggaaacagacatggggagggtgaacagtccccacagcagacagctacttgggcatgaagagccaaggtgtgaaaagcagatttgatttttcagttgattcagatttaaaataaaaagcaaagctctcctaaaaaaaaaaaaaaaaaaaaaaaaaaaaaaaaaaaaaaaaaaaaaaaaaaaaaaaaaaaaaaaa

SEQ ID NO: 3863 - DNA, 6030 bp, Homo Sapiens
  NM_014909
gcccctgcgcgccgcccgagccggtcccgctgagccgcgggccccgtgccctgcgatggctcggctggtgcagcgcggcgccaggtgccagccgtcctcccgctgagacgcgcccgagtggggacccgctgggcctcggggctcgcagccttcgcctccccgccgcgcccgctccctttctggggactccgccgctgtttctggggacgaggggacaggggacccagacaaagcccactttgtgcagggagttggccgcaggcggggaatgtgcgcgtcggcgcgcgccccctccccgctcccggccagctgcgagtcttggctcccggacttgtctcgtcgcgtcggagaaatcgccccccagcgccgctctcccgcccgggggtcttggttccgagctcgcgcggccgggagtcgcctcggtcttccttggggcgcgcgcagatgtgagcgtgcgagagttgtgtaggggattttgttccctccgaaactgagacccagggcgcccagtgggcacccgtgccttgactctgtcctttctgcagccgctggtccgagctgtctggcctcagtttccctccgacttttctccgctctgccagccctcactgctgcccgtcattgttctcgcagttagatgggggtgctttgtgacggctgccaagttggggtgtgttctctttattccgtttttcaaacagaacaaggcctccaaggctgaccccagacaacccaccccctcggaccctaattcaccttattgcactgattttttttatcaagtcgtattttattgtacaggagccacgccctgatttcttaaaggcgccttgcactctggccatgtgttatctctgcagccggtgtgtgggaggcctcttgtgagccagttgttttcccgcctccaccacccccctcgaagatttagggatgccaggggggaagaaggtggctgggggtggcagcagcggtgccactccaacgtccgctgcggccaccgccccctctggggtcaggcgtttggagaccagcgaaggaacctcagcccagagagatgaggagccagaagaggaaggggaagaggacctgcgagacggaggcgtccccttctttgtcaaccggggtgggctacctgtggatgaggccacctgggaaaggatgtggaaacacgtggccaagatccaccccgatggagagaaggtggcgcaacggatccgtggggccacagacctgcccaagatccccataccgagtgtgcctacgttccagccgtctacacctgtccctgagcgcctggaagctgtgcagcgctacatcagagagctgcagtacaatcacacagggacacagttctttgaaattaagaagagcagacctctgacagggctgatggacctggccaaggaaatgaccaaagaggccctgccaatcaaatgcctggaagccgtgatcctgggaatttacctcaccaacagcatgcccaccctggagcgcttccccatcagcttcaagacctacttctcagggaactacttccgccacatcgtgctgggggtgaacttcgcgggccgctacggtgcgctgggcatgagtcggcgcgaggacctgatgtacaagccgcccgccttccgcacgctcagcgagctcgtgctggacttcgaggccgcctacggccgctgctggcacgtgctcaagaaggtgaagctgggccagagcgtgtcacacgacccgcacagcgtggagcagatcgagtggaagcactcggtgctggacgtggagcgcctgggccgcgatgacttccgcaaggagctggagcgccacgcccgcgacatgcggctcaagattggcaaagggacgggccctccctctcccaccaaggaccggaagaaggatgtttcttccccgcagcgggcccagtccagcccccaccgcaggaacagccgcagtgaaagacggccctcgggtgacaagaagacttccgagcccaaagccatgccagaccttaacgggtaccagatccgggtctgaggcggatgccagcaccccaggccccacccactcttgggggccaggatccacctgctggaaccagccttatgcatggggaaggcggggctggtgacaaggcagggcaagaggctgcaggaagagtgtgttccagctcagccccccaagctgctctcgctcccactgagccaagccccctaactttgggcctagaggccgttagtattttatttggagtttttaactctacaactgaagtttaaggtatttggggaaaacttagtccaaatggatctgctgatggtgggaaggccagtgcttaacaaatccatgtgtcatggggccaggtgagggaaactgctggttctgctggtgcctctgcccctggcttctctctgggagttgggtgcatcttatcagtgggaaatctcccagccttaccaggcctgtgatggggggtgggggtggggtggagatgtttctccagttctgcctgccctggcagaatcttgacccagggaaagggaagcagggtaggagtccttctgagaaaggtctgtgtagcccattaaccaggagcttggcacaggccacatctgccccaagagcatgagctcgtggctcaggagagccttcaggcccttgaggcccccatgggcagtgctgtgtgggcagaggaggggtgatatgagagcgagcccagggaaggacctctgggcaaaaagttcccaggccctaactgcgtctacttgctcagtcccagctctgcctgttgctctagcccacaggctccctgcggagggtctgggcttggcggaggacccagaatggcactgaggccagcatggctgtgggagttgagcaaaccctgggtgccagtccaggagctgtggctggacatggggtgatggggcgggatgcttgggcctgggtctctccgccagcagtgccaggagcccttgctggggaaatcaagaccagactaggatgcttctgccccaggcctgccttccattctttaacagcccatcttggcttggggttgcaatgatggctgggccagtcacttgtggcagggcatcagggccctggcagggaagaacctaggcacctggggttgtccccagcctgcccgtcagcatgagatacccagtgggaaagtgagaggatgcggagaggttggcagagccaggggtaggttctggaggctcaagcaacaaggaggtgcaggtaaagggtgcagtgcagccactgagggacagctgggaactgggggatgcaagtgagaaagggatgtgggggagagttcaggatcaggctgcttgaggagtaatgggttacctacagcagagacgagatggctgtttgtcaggaggcggtagaaaggtagaaaggattcagattgtggaagggtaaacggatgagatgaccattaaggttttgttttactgagaggctgtaagtctgccagggacagctgtcagtaaggctgcagaagggctggggggctacacaaggaagagcagaactagggttgtaagctcaaatgacgagcaaacggtgagaaggaggcctgaagggctgtgtggggactatggctacctgaagagggcacaccctgttaaaggggccacagctgctcagctgttcttacagtgccggccctgtgttgccagattgtctgctttgtcagaggccagaattctgactttttatgtgaaataggatttttaaatgctggtgatcacttaaaaaaaacttaaaaacccaatactggcaaaagaggatgccagtttgcaatccctgaagtagagagagctcgtgctggggagaagtccaccaagatgctttgaggcgggctgtagcaaagtcctgtttctcagagctgggctgggctggggtaggatccttgcagctgaggaggaggaaaagccactgagtctcctcccagagcgggacaaaccagaggccctttgcagttgctgggtcaccagcgggggtggcgcatggagtacagacagtgtagctcttggcctgccagggagacggatggtgcctttgaagcaaagaggaagggaaggcagaaccagggatgcctttgctgatgagagtgcctgtcagggaaggcgccacaggctggcagctcttcaaaccagcagcgcttgacccagagccagatccagcatggcctggccagaggcaccctgggaggccagctggtcagtcccttgcctccccaagttccccctggggtcaatgagccctgggaggatgcctaacctaactccagccagactaataggggcatggtgacccttgactcaccatcccatcccagctttcagggagtgggggtagtgtggtctccatgttcctactatgcctaagaagagatggctcaccttgggaggtgccaggctgaaactaggtcctttccgggtctggatgctgccgctcaggagcaggggcgtggcctcagctgcctctgggagcttcccgggaatgacagggtttgaggggagtagatatgagagggagccgctcctggttctggagtcttaggaggttccaacttgcaggatcctttcccagagccctccatggagaaaacagcaaaatgaagcccttacctgcttgctgtctgcaagggagggagccgagccccagctgataatcccccagcactcacccttcctgagctgagacttcggggctgtggagaccagcacaggacatagtggtgctttttaaatttatttttaactgtttctcatatgtagcaacccctcctcccctcctgggcatgtttacacaggctctgctctgggggctggcctggctgtgaggtttctggggaggcagagaggcagggactttggggccttagtcaccatccatggtatcacctcatctcacttcctgtgagggacagggcctggctgatgtgatcccagctccccccagttcaggactgtctttcagctcctttgcccctggaggtgggggctgctggctgaggaggggtcaaggtgagttcaagaaagctacctgtggaaaatggaccaggttgggggggtgattgcaaagtctccccaaagcctggctcctcatgctcagtgccaggggcagaacactggggagccaggtatagagagccttcctgtcataactgccagtcctcttcctccaaggcctctgcatattctcatgttcccctcacccatcatgccagccacccctatccctcttctagcagggccaagatggggacagcagcagccctctggccttgggatgtgatgataaagcaagcctagggccagggtttggggagcagagagagccaagaagttgaccacgtgtgatttccagcccttcccactgggacttgacttcccaggtcaaggagtccgtctcattctggctggtcgagtgaccagaggcctgtgtgaatgtgtgcacctgcttttcctgcctggaatgttttctggctcagctgcagcaacatctgtgagcccagtgtctgccctgtgtccctgggctcgctccaagtgcaggaacatacatgcagggcccaacatgatgatggtgtgaagggcaggaaacagtcctctgaaggagtggggaggtgggcagtctgcccccgccaggtaccatcgcctcctgccagcttccttagaccaggcagggctgccatggtgctagctgcaagtccatcagtattgaccgtctcgctccatcttggtcctccggagtcccaagtttccttttcatcaaatctgacaagagagaagaaacatgggtgtgcttggcccacagggcctggtggtgatggacctccccgctccctcaagctctggatggctgcagtgttgtactagactttgttcaggctgttctcatctcagtattgccccttcctttcactttcacacttcatctcattcctgttgtcactttccccgaaacgaataaagtctccccagctcctgctgtgtaggctgggcagaaaccacaacacgt

SEQ ID NO: 3864 - DNA, 21283 bp, Homo Sapiens
  NM_014911
cggtccctcgccgcgccgccccgaggggcacttccggcggcggttcacttcctggttgggtggatggagccgggcgggagcgcgcgcgggggaggggcggcgggtcagtctccgcccggcgctcccgggatcagctggcgggcgggcgggagccgagcgcggccccggctctcgctgcagcgccgcctcttctctgcgtcgcaggccggcccggcggccgtgacaatgtcgcggggctggtagcagggcgccggccgccgagccgtctcaagtttaaacttacacgaatcgctttctggaggaggaggggacccgctgcgcgattgacacgcatattcctataggcatcctccctcagcccccacccccacggccggattcgggtggctcctctccgaggtgaaatctgagaagaaatccttggatctcttttcttaaaaaaaaaaaaaaaaaaaaaaaatctagaaaccatcggtattttgctttgctgctccctattcgcaagatgaagaagtttttcgactcccggcgagagcagggcggctctggcctgggctccggctccagcggaggagggggcagcacctcgggcctgggcagtggctacatcggaagagtcttcggcatcgggcgacagcaggtcacagtggacgaggtgttggcggaaggtggatttgctattgtatttctggtgaggacaagcaatgggatgaaatgtgccttgaaacgcatgtttgtcaacaatgagcatgatctccaggtgtgcaagagagaaatccagataatgagggatctttcagggcacaagaatattgtgggttacattgattctagtatcaacaacgtgagtagcggtgatgtatgggaagtgctcattctgatggacttttgtagaggtggccaggtggtaaacctgatgaaccagcgcctgcaaacaggctttacagagaatgaagtgctccagatattttgtgatacctgtgaagctgttgcccgcctgcatcagtgcaaaactcctattatccaccgggacctgaaggttgaaaacatcctcttgcatgaccgaggccactatgtcctgtgtgactttggaagcgccaccaacaaattccagaatccacaaactgagggagtcaatgcagtagaagatgagattaagaaatacacaacgctgtcctatcgagcaccagaaatggtcaacctgtacagtggcaaaatcatcactacgaaggcagacatttgggctcttggatgtttgttgtataaattatgctacttcactttgccatttggggaaagtcaggtggcaatttgtgatggaaacttcacaattcctgataattctcgatattctcaagacatgcactgcctaattaggtatatgttggaaccagaccctgacaaaaggccggatatttaccaggtgtcctacttctcatttaagctactcaagaaagagtgcccaattccaaatgtacagaactctcccattcctgcaaagcttcctgaaccagtgaaagccagtgaggcagctgcaaaaaagacccagccaaaggccagactgacagatcccattcccaccacagagacttcaattgcaccccgccagaggcctaaagctgggcagactcagccgaacccaggaatccttcccatccagccagcgctgacaccccggaagagggccactgttcagcccccacctcaggctgcaggatccagcaatcagcctggccttttagccagtgttccccaaccaaaaccccaagccccacccagccagcctctgccgcaaactcaggccaagcagccacaggctcctcccactccacagcagacgccttctactcaggcccagggtctgcccgctcaggcccaggccacaccccagcaccagcagcaactcttcctcaagcagcaacagcagcagcaacagccaccgccagcacagcagcagccggcaggcacgttttaccagcagcagcaggcccagactcagcagtttcaggcagtacatccagcaacccagcaaccagcaattgctcagttccctgtggtgtcccaaggaggctctcaacagcagctaatgcagaatttctaccagcagcagcagcagcagcaacaacaacagcaacagcaacagctggccacagccctgcatcaacaacagctgatgactcagcaggctgccttgcagcaaaagcccactatggcagcaggacagcagccccagccacagccagctgcagccccacagccagcccctgcccaggagccagcgattcaagccccagtaagacaacagccaaaggttcagacaaccccacctcctgccgtccaggggcagaaagttggatctctcactccaccctcatcccccaaaacccaacgtgctgggcacaggcgtattctcagtgacgtaacccacagtgcagtctttggggtccctgccagcaaatcaacccagctgctccaggcagctgcagctgaggccagtctcaataagtccaagtctgcaaccaccactccatcaggctctcctcggacctctcaacaaaacgtttataatccttcagaagggtctacgtggaatccctttgatgacgataatttctccaaactcacagctgaagaactgctaaacaaggactttgccaagcttggggaaggcaaacatcccgagaagcttggaggctcagctgagagtttgatcccaggctttcaatcaacccaaggtgatgcttttgctacgacctcattttctgctggaactgctgaaaaaaggaagggtgggcagactgtggactctggcctcccgcttctaagcgtgtctgatcctttcattcctcttcaagtacctgatgcaccagaaaaactaattgagggactcaaatctcctgacacttctcttctgctccctgacctcttgcctatgacagatccttttggtagcacttctgatgctgtaattgaaaaagctgatgttgctgttgagagtctcataccaggactggagcccccagttccccagcgcctcccatctcagacggaatctgtgacctcgaatcgcacagattctctcaccggggaagattccctgcttgattgctctctgctctctaaccctactactgaccttctggaagagtttgcccccacagcaatctctgctccagtccataaagctgcagaagatagtaatctcatctcaggttttgatgtccctgagggctcggacaaggtggctgaagatgagtttgaccctattcctgtattgataaccaaaaacccacaaggtgggcactctagaaacagcagtgggagctctgagtccagtcttcccaacctagccaggtctttactgctggtggatcagctcatagacctgtagccgtgacccagtagcagatgcagttctgtaaccttcataccgtaaaatacattttcattacggagttatgaaaaaaatgatttttttaaaaaaatctgcaaataaggggccctccagcccttttctcctaccccttgccttctcctgtagaaatgataaggaaagaaaatcactttggccctccagatattccttggccagttcctccttgttagtttgctgtgttttctcattacccttcttcaatagcattatcttaaatcaagcactagatgccatgagcttcacctctgctggaatcaactccaccaaaagcttaactgtaactgaaactagtgaattgacacttttgtctcgttcttgctaggaatggcctcccagatcaattctcccaacccccgtctcctttggccagatgctgatgaatgtatttccctgtttttgctttttatcctgatgcattatcatgaggacatggctacttcagttggtcttaactctaggcagtagcctggagatgggtgtgtggtttaagaaagggtaaaacttactgactggtagtatatatttgagaagagaaattgagcccagctctagccaaccaactttgaccttgtttgatcatagacttagccaagggattttacaccccatgcaacctgcccagcattcgtccagctttctggcttccattgaaccgtgatttctcagatctggagacgtgactgcaagtatttgagatccttggatacaatgtgtacgttatataaatcccaagtattgccattccttttcatgttaactgttccaagtgggatctcagaattagaccaaaacaagacggtggtaatatgataccttttattagaagacttttcactggggcgggggtggggggaggatggggaggggaaggaattgtagcagaaacagatgtatttttcttgtgatttttattttgaatcaaatattgtaaattgtgtataaatgaagatgctgaatagttctgtttccacttggcatttcaagtctgatatcaggtgtctgtacagggttttgatttctttcccttgtataactacacaacaatcctacagtgtaacatatggaatcattttgaatagacttgtgtgctataagctttcagcaggtcctctgtctctagaataagcatgttgtttattttcagataatcagaaataagtgtgctgacaagctggacacaatctgggtgtgcccagcttacctttctttctgatgtttaaattgaaggctgcagccaatggaatatgttcagctggttttccttggcttcctagattaaaaaaaaataataaagcatagttctttattaactttaggatattgttcataaaataaataaaggcccctgcactaacatgacaacatgcctcatggtcaccctctctatatgtacttactcattaaagtgtattttatttccttatgtggaaagcacttttataaaatcacccttttgaaaagaagtgggcacagagaaccccactcctgttcttttcctctagtgccattgtccatcatcaaaagggaaactcttagttaatcagatctgtacaaataaaattccaagtccatttgcttgttttgctatctagtacttttgtttcttcttcctcacatttgcactttatgggggaaaaaagtttaacagcaacaacagcctataaaacactgcattctggagggcaaggtttgaccctaggaatgtgcgagtagcctttgaaaggcattggaggaaaagtctgaatcttccagccttccttctgtctttaaatacttcccgtgctggctgaaacaagatgagctaggtaaaggcctctagttgaataacagaccatttccaaaactgagagaggcacaagcttcctgccgaggattaaaaagcaaaagatatccacgaagggctctctgtggttggatagcagtgaaaataggacttggtttacccctttatggacaggaaaattgctgcaggtcagaattgtattctctttcctggacatagaaagaatgtataaattaatgaaggaaatgtttatttttaaataagaataatgtttgagttctatgttttcatatttgatttttttcgtatatacatgttagaaatataatgaaatatctagtttctcaatttaattgaaactatgaagagtacagtttagaaattaggtatctctaaattgttcttttcatatattacccataattacattgaaatatattatctagtcatttggctcagtaaagcttaatggaggcagttaatgaaaatgagcagactagaagccagagacggcagtagaagcctaagggagataatgacaagaaattgtcttgggcttatttagagtaaggcctcctcaaaggggagaactatttttctgttaaggaacacatatgagtgctttggtaaacggagccttccttggtttagagcatcatccctgagctgaaagagtttatttgagttgagcatagtgtcctggtacctgtggaatcatagcctgagctacaaagggacctttgagaccatcctctagtccaccatcctcttcattttacaggtgtgggacctgagctggattgaacagggtcgggggagaagaggcctgggcaggacaggccacctgggatctcatcctggcccttgccagccactggctgagtgaccttcagcaggcacttcacctctcagagttgctgttccttagagttatacgatgggtttggactagatggtctttaagattatagaagtatagggtcctaagtatatattattatattgagaagggctatgaaggatttatataatcctgatgttcttcagttatcttctgtagttcctgctattacggtagcagtgtttacattttaaagaattataatgggcttttactaacttgctctttcttgattatctgaatagaagcctaaatcataatcttagagattttcctttttaagtattacagaaacacatgcgtggacacacacctacctattctaataaaatggtatcagaagatttctttttaaatgtataatcaggcatctaccagtttaaaacgggcaaatactataagcatatgtttctgatttgcttttattccagctatgtaagaggagtaactatagcagaaaacatgacaaattgatttttccctttacaacattcaaatgagtcccaatgttttcaaaaatacatacctcagaggagataaggcttaagtggacacttctaagtatgattataattattataattaatgatttctttagcagacatatcagaattttgacatctaattaagtgttgttcccctcaatgtcatctagttttacttaagaagttaatacttattctaatgatgctgccatccttaaagttatttttgaaactcctctccttagaaataatatcaaggaaggtaataaggtataagaaaatcagctatattatttaattagtatcactttgagaaagcacctggaagtatattctttctttgtctactttttctactactcttggttctgagtaacatttagccatttccagaaagcaaattcaaccctgtaagatgaagagtggttactgttgaagacagtaaaaaggataatccacaaaaaattctcagagaggaccttataatagaaagtgaacatgattaagacttaatttctgtaattttctgaataaggaaacttctgtgattccttagtctttagaatggtttaaaacattgaaagatatgggtattaaaacacctctgaaagaagttgtcactttgttcagtgttatttgatattggacttcgctcttcctgaattagaattacacaacttggattgctaatacttgtggaaaaacaaacccaagaaacgaactactttctcaagatgtaatatttgttttattattaatacttttggttgttttgattacttatttcctactctcctgacagataattgatcaaccaatataaccttccccaggttaggaacagttctgccttcagcagtgctgtgggaatgaagggatctttggggctgacagcctatgatgtggagggatctgcactcagctaaataaatacatgctatagataccttgggccaaaataaagtctctcttgataaggtttttctgtgatttcccagagtccttaaccttctctgtctgcaagattatcaggctcccatagccactaactttgagctttgggatgaaaatgacaggattgcccagtgtgccgggttaagcaaattagaggctgcctggcagaacagaaaaactatcacatgaatatttagaatggaagctttcctgaaacactccagatactgcaaagctatctttattcctctctaaaggctataattttatcaacacaaagtcagccttttctttttccacattagtaatgtttctgaagttggatgtgcttagatttcttaaatcagaatgagtgctaggaaatctataacaagaaacctcttttgcttctcccagatttcctttcactaatacgggatagggaggctccttgggtaatgctaacctatgcaaagaagttaccaaatggtggtagttgctagaattaaagacacgttcttggttcacactttgatgtagtgacctgaatttactcttttcctgtgagtattctactctgccctattgcactctcctttgtcatgtggatgtgtgtttatcataggtctttaacgcgtccttcccaagaagacaaagcatacagttgtacatgaagatatcttatgcagtaaaaacgtgaaatttgaacattgctgcacaagtattgtataaaaaaaagtctgtaaagaactttcttatgtaaacatacaggggaataaagacttttatctgttcaaatgggagcatgatgtttagagatgtaaataacttaaaataagttgctcttttcctgagctgaaaacccacttttttgcagaaaggatttaatcacagtattgagtgacaataagtacctgggcacaagaaaagtatagctacacactgaggacatattaatgaatcatggctacctgagagagtaaaacccctgttttagtctcaaggagaataagacgcctgccagcctacactggatatgaccagactcagggttgtaaaatggagcgcaggtttgcagcttccctcctctaacttaatccctaatatacccaggccaacttaattaaacattttgtgttggcaagaataattttatccccagtgagaaaactcactcatttaattgcctcattggcctgagaggcacagctggccatttttggcttccatgaggtccctcatttcccagtcgtgggttttaatgcagctacctaatatatggtggaaccaaatgcttaattttgttatgtgagctagaaggtcatggtaattattagtttgatgtacgtctcttgatttccccagtttggttctaaaattttacgtttcaattgctgctgcatttccaagttcttgtgaagggatattttgctttctgtttactaactatatgtgagaaggcttcttctcaatgctccaagtcttcgttttctgtttttggcaagaatcatatctttgatactccctgtaaccgttctttcagtttttggtatgaggaaaagtaaacttctggtgttgtgtgatgtatttcattaaggaatatccagcctgacatttaagtcttcagattttaattctgtagggagcattctgatggccctcactatgtcaatcagatggagtttccaggggaaacccatcctaaatgattcagcactttgggttgctttggaagtgaatagggagctggtgaggatagttgccaagttgtcaggtattttaggaactccttctcttccctgaagcatgtgagttcttgctgaaatctacataatttggagcctcaaaatagactaatatggagttacccatattgaaagtgtcaacgtgcctaacctggcacacagtcctacatcagagcaagaaaaagaagtatgttttgacttcttgcttaattttatgtgtgaaaccaaaataaaaagaggcatgatccagtttgagggaattataacaaaaccctacgttaggctctatgataagtaagaccctgtgcagactatgaagccaggccctgggctttagcccctgaggtacaacaggcagtgtttactgagctctatggccacagggtatctgctatgacgtgccattggttaccaaaggaactgggtcaaggcatgtggttaggttagtataaatccttcaatgctagtaaagagactgcttcaaacacgttttcttgttgacacaatgctaccttcatataaaggaactgttcaccctgaaaacacattttccctgtaagaacacattcacatactcaaaaaaagacttttatctgccaacaagatttaatggttaccttctgtttctagtatatttggaatttatccttctctcgactaccttgtttctggtgctgccaccaccagaattccttaagggaatgtggaggtctgggcttcccccatattctctggcatttctttgcccttcagagtgccaggcctggagagttgcaaagtgtggttgctctccgcctcagccacactgtacctcctctaacaagaatagaaaggttaagggacttggccttctcaggacaaccctttaaatgtacttttccattcctacaaagcctgttgatgctgaaagaaagataggaaatagctcttgtccttgttttgaaggacaggagactaattttcccttcaaacttgatattctggtgtttttgtgactgtttttgtaaattattcaaagttgttggaattttaagtctgattttcccagtactcatcatgaaggtcatagaatatgctctgagttggaaggttttccaaatgggttctcgaccaaaaacccactttttaacaaataattttgatgggttagacatgttcttccatcctctccaaccctgaatatgggcacatacacacaccccttggtacttcctagttctcaaaatgtaatctagcacttcaggcatccaaagtgcccctggttcaatagatagctgcttttttgccagtctctgtgcacaaattgttttaactgaattcagtttaaatttccaaaaaacactgactctgttcaaactagtgttcattggattattgacctgtatgatgccagagttggtcactggcttgactaagttttccattttttttccctaagagatattttgctctcctgcagaacaagcttaataacatcaactttcaaggtagttttggaagatgagaaattgtgcttttgttttggcaactgaaaactttgtccaactgatactatgtgaggaaggtggttcaaggagttttagggccctcttgtccttctttaaggctctgcaaaccttattttggaaaacttatttttctcccttttatttgaatttcctcccagaaattatcatcttggtatcactgagacaaatctaatatcaatttacttgcctgagaaattaggattatgtctgtccacataaatcgcaaggaagaaggtattctgtttatttcctgtccactgactgatgctttcgtatcaccatgtagctgcacatactaaaattataatacaaggaaaaatttattcttttcaaaatcttattcttcaaatactattctgaaagccatttggcaccagtacagaatttaacttaacgccccaatctggaattcactgaacgcattcaaactgttagaaaggaaaataaaaatggaggacaaacacatttttgttctgtttctgaaaacaatatttaaggtcagaactgtttaaaaagaagcactgctaaaaagttataggattcagagaaacatagtatttttgtacagtatcttataaaatgttcagacctctctctacattctctttacaatgtaatgtctctaagtgactggtttcccaataaactgattttaatgcctcttctgctgtggtctgtgtgcttaattcatgcagaaactttagcaggggataatttttggcagaaatttctgctagctaatggtttgcataggaggggagagggtcagtatgggaaggggatcattgagttccatctctacagaggttctgggtcatctatggctccaaatcattgtatctaatattcttatcctggtgggttgggaaactccagtagtatctctttactgagcccatgatgaaatgatacctttacccccaaccaccctttctctggattcttcttgcttagttacatatgcctttttcctgccctcttgctaacatgtgcccaatgacatacttctaacctgctaatatttcttggaaggtaagctctcttgcattctgataattgtctatttgattttaaaagccagagcaccctgaggcacctctacctagatagaaatagactagtatattggagtttgctaatgcttctgtaatggcccatgcattttactccttctgcttaaagaactttatggcagattcatttaagcagaggagatctttatgaacttagaagactgaaaacaaaattctggggcaactccagctgaaggtgatttatttggtctgattttgatgctgtatgctcccctcagaaggtaccttcagtatttatattttgggcactcgtatgctctttgagtagtgcttgtgatgtaagtcatcaagtaaacttgcatttatcaagcagccacattctgcttcttttcagagagtttgtccctctgcatgtggcgcggatgaccacatgccagattctgaattgagtcatccccagacagtgtttctacataatccaaaactgtcatggtatatgtggagatgaatgactgggtttgttttcattccataatgagccagtgccaggtagagcaggtgtccgtgcctggccctgtgtgtaggagcattgcatagttacgctgaatgtctgtgtgcctaacatcttcatctcctttcctgtacgtcgtgcctatcatgttccaaaacgtgagacagtggttgattgtgttccagtttgtgtgcagtttccttgcctgacttttatttttatgtttttcctgttgcattttcaacatctattatttggtcccacaatgtttttgccgcgggttgaccattaaatgttccaaatagagttgaattgacctacacattaattctgcattttatgcttttctagatctccagagggagtccaatccctgtcctgtaataactgtagagcactttaaagaatcactgggtgttaaaggccttccgctgtatccagacccctccagagtacctggcacaaagactcagaacaacttagaatctgactacttggccagagatggcccttcaagcaacagctcattccacagcagcgaagaggaagggactgaccttgaaggagacatgctggactgcagtgggtctcggcctctccttatggagtctgaagaagaagatgagagctgcagaccccccccggggaagctgggaggagccgttccattcgctccaccagaagtctctcctgagcaagcaaagacagtgcaaggtggaagaaagaaccagtttcaagccttcacacagccagccactgatgggctcagtgagccagatgtttttgccatagctcccttcaggagctcaagggttccaaatgatgacatggacattttctccaaagccccatttgtctccaagagcagtatggctccttcccagccagaggagtcagacgtgtttttgagagctcctttcactaagaagaaaagcatggaggagttaacagttatccaatgcacctcccaggagctgcctgcacagaccggtctcctcagtcagacaggtgatgtccccctgcccgcgggccgtgagagagctgtgtacacctctgtccaagctcagtattccacagctggttttgtgcaacagtctaacctcctgtcccattctgtacaagcagcagaccatctggacagcatctctcccaggggatcctgcctggaatctgggggtcattctaatgacagaaacaaaggacctcagctccagaaagaagctgtctcaggccccatggctggcaaaccattccgcccccagtccttatccaagtattcccgtcactatagcccagaagacgagccaagtccagaagcccagcccattgctgcctacaaaattgtttcacaaaccaacaagcagtcgatagctgggtctgtttctatcacatccctttcctccaggactacggagctgccagctgctgatccatttgctctagcacccttcccttcaaaatcaggcaagaaaccctaggagcaaaacctgagcctcaagcctcttgtctctatcccaccctcaatacccgccatggcactcccagcttagccttctgaagaagaaatattatcagttcttatatttcaattccctgcgtcagagcagaatttcttgagtcaacaaactcagttgcagtgatatttagttgaagcccctttaagttatgttcatttttgtttgtttgtttgtttgtttatattgatttctggacttggaggcattttcatctccttcacagaggtcatccacttccaccaagaactctgctttccccccgccccacccacagaaactgtttaaatcctgaaatacttcttcaccccaatcccaaaggggccctattgttgctagttttaattcctgtagctcctgttctaagtcatgcccatcgaagaatcaagattagtccctccactaaatcaagatttagtactcttgaaaaggggagatgtctggaaagaagagcaagataaaaaccctgcacatcaacaggaagtataatcctgcagttactaataattcctgtagaagcagcagctctaggagtctccagatctgattctcagtctgtgtgcaagccaggctggctctcgtgcatgactgtctatgggtgtggaatgtacgtcagagcctgtgtagagatacaggcagatgggctaactcctcatgtctagtcatgctggcagggctttccccacatccatgcttttgaaattagtgtgagtgtacaggtttgtgtgtgcatgtatacgtgtgtgtgcacaggaagcatttccacttgagggaaatcctgccccatcatgcctacctccacaatgaaatcactcgttttttggtgtttgctcgcctaactgacttgaaccccattttatttatttagtttttttctcatggcaaagtagaatacgttggaaggtgtagggaaatcctgctggaactggtgtttcagagtaaatcttttttctctccggaatttcttgttttgctattaacaaattatatttacctgattatgaaaaattaattttccttatacattttccccttacaacactagaaaagagcaccttgttacagttccggcctctcagtatgtgggctaaatgccagcattagggaattcattaatcatgagactaggctacaaactaggcttgcttgttttggggtggttttgttgttgttgttgttgttgttgttgttgtttccaaatctctactgccttttgaggaaatgtaaatctgagacatggaaataagtgtttgggagaatggaaaagagctgaatcaggtaggcatgaaaacttttacattctctatcctctttagatgttgaaataggccagacaggttaactgatgttttttaaaattgtcttttatttctggaaagatctgacttattcctagcttttttcataccctttattattagtgccttaaaataaagctggccaggtgcagtgccacacacctgtaataccagcattttggaaggctgaggcaggaggatcagttgagcccaggaagttcaagaccaactctggcaacacagcgagaccctgtcccttcaaaaaataaataaaaaaataggctgggcatggtggctcacacctgtaatcccagcactttgggaggccaaggtgggcagatcacaaggtcaggagtttgagaccagcctggccaacatggtgaaaccccatctctactaaaaatacaaaaaattagctggacgtggtggtgcacacctgtagtcccagctactcaggaggctgaggcaggagaatcgcttgaacccgggaggcagaggttgcagtgagcagagattgcgccactgcactctggcctgggcgacagagcgagtctaaaaaataaaattaaataaaataatgaaaaaaattagctgggtatggtgacatatgcctgtagctactcaggaggctgagctggaaggatcacttgagcccaggagtttgaggctgcagtgagttgtgagtccagcctgggtgacagagtgagacactgtctccaaaaatataataataaaaataaagcctgtatctcaatgggaagatttctgctaaggcagttcaactcactggaaagaactgctgcattaggtttcaactttaatgctttctgttacttctagtaaaggttaagtgatttttccattagctgtagaagtttggagagctatttaccaagccagatcaatgatttaaaaattattggaaattcatctaagaatcaagtctgaatgcccaattctattgcggttgattaggtgtgatattctttaaagttcaggaatattggcagtaaaaaatgagcagctacttttcaatactttgtccttttttggtggtctctgcctatttcaaatgtcctgatcaaaagataaataattggcactgtgccaaggtttggttttccaactaaggtttcaactgtgccagaaacctatgtccttcactttggtggatgctaaatgttattctaagaatatgctttttcccaattctcctttctgatttttatgtattagtggatgcaaaattgtctttctagttgaatgaataatttcggctaatgcacgtggaactttgcaccccagattcttcccatggtcattatcaagtgaagccctcaaaaacatgagcgaagagcctagaaatactcagggagatttctcaccccaactcagaaattttttttttttttttcaagacggcgtcttgctctgtcgctcaggcgggagtgcagtggtgtgatctcggctcactgcaacctccattttccgagttcaagcgattctgcctcagcctcccgagtagctgggattataggcacacaccaccgcgcctggctaatttttgtattcttagtagagatggggtttcaccatgttggccaggttggtcttgaactcttgaccttgtgatccacccaccttggcttcccaaagtgctaggattacaggcgtgagccaccgcacctggcccagaaattctttttttttttttaaattattattatactttaagttttagggtacatgtgcacaatgtgcaggttagttacatatgtatacatgtgccatgctcgtgtgctgcacccactaactcgtcatttagcattaggtatatctcctaatgctatcccgcccccctccccccaccccacaacagtccccagagtgtgatgttccccttactgtgtccatgtgttctctttgttcaattcccacctatgagtgagaacatgcggtgtttggttcagaaattcttaaagtaagagatcattctaattcccctttccaaatattcaggattatctctgtaacagcccagcaaaatgtttttcctttggttatttgataattcccttctaatcaagtgactattttaattctcaaggtgcaaatcaggataaaatcatggtgattttactacatagttgaatacttcgtcaagtatgagcttgtatcctttttaaatttttcactggaggccaggcgcggtggctcacgcttgtaatcccagcactttgggaggccgaggtgggtggatcacttgagggtaggagtttgagaccagcctggccaacatggtgaaaccctgtctctaccaaaaatacaaaaagtagctgggcgtgatggcacgcacctgtagtcccagttactagggaggctgaggcagaattgcttgacccagggaggcagactttgcagtgagccaagattgtgtcattgcactccagcctgggcgagaagagcaaaactccgcctcaaaaaaaaaaaaaaaattgtcactggagacatgatgggtggagactctacataccttctttgaatacagaaacggatgcaaacacatgcaaattacttttttttttttttttggtgatgcatgaaaaaactttgacttgtggattacattaattattagtaacagttagattctgccgacttgtattacagtagggtcttatttccttaaagagaaaaaaaaatacagtcatgccccacttaatgatgagggagacattcagagaaatgcatccttaggtgattttgtcattgtgtgaacatcacagagtgtacttaacacaaacctagatggcacggcctactacctacctaggctatatggtccagcctgttgctcctgggctacaaacctgtacagcatgttactgtactgaatactgtaggcagttgtaacacaatggtaagtatttctgtatccaaacattttagacatagaaaaggtacagtaaaaatatggtataatcttatgggaccatcatggtatatgtggtccatcattgatggaatcgtttttatgcagcacatgactgtatataatcaacaaacaactctactttcttgttttcgtttgttgtgtttttgctttacacatttgatagggaacatagaagttgtgacctttcatttcagtggaaagcattgagccagaatatatttattcctaaaccatcgagccacacatgcattgatgaaccctgaaagaatccacagtaattgactaacaggcagtactgaatgaaagatgtcatatgtggtgaaaaatatttaatatatcagtttcttgggctcacatacagccctttagttccaagtgcttggttagattagaaaatgggatgaacacaatttgatgctgaagcagctgctgagcagcacccagggagtctaggtcatacgccctatattgttttcggcccacttattgttgagttgaaaagtctcatatttgtagactagagtgtatgtgtttagaggctcatgttgtatctgagttttctctggcaactaagatctctttctaaacgttctagaaagatactggtatcttactggcccattatttagtaagttttagaatacatgtacatcagtgttttcaactgcttggtggacatttcactgatgcataatcaaagtagcagattataatcatcagagtgatctgacaaggaaattctgtatttgcttccataaagaaaaataatcaaaacatatatcagatataatatatatgcagtatatcacataggaaattttattgtaggaaattagagaaggatgctactcaattcattctctagcaggaagaatacagcttaaaaatcacttgggtccctttaataaagaaaagtgtgattctgtgttgtgtgtttggaactgaaattggagaacacgtgccagtcgactgtgaaatggttgctggataaaaccacagatgtggttttatccgagaaatgtgggactgaaattattttgatgagaggtacataagagagctgcagaaaagactgtagcttctgaggaggcaggagtaccttgttaatatccaaaccacccctgagttctaatgttccaactccacctaaacgaggaattggaaactttaaatggaattatctaatttaaattcttagttttttctttgtctttctcagctgatacttgtagttttgttttgttttttaaccaccaagaacacttgcaagtttgttactgaaaacatcactaaaggaaaagaagagtttcaaaatgcttgaaaagtagtatgtggttgggaattgtttttgttcaagtccctggaagtcctcttggcttagctcccttgttcctgttcccacttcatttccttacttaacattcccctattttgagcatgtcaataagtgcatgatgaatggcacagttgaatgatcatgttaactttaattgcttcctttgttgctgtaaacagtttcttgttaagtttcagccaagtctgtgacaatctcaccaaataagaatgaaatgggcggggtgtggtggctcacacttggaatcccagcactctgggaggctgtgttgggccgatcgcttgagctcatgagttcaagaccaacctgggcaacatggcaaaaccttgtctctacaaaaaatacaaaaattagccaggcatggtggtgcacacctgtagtcccagctacttgggaggcttaggtgggaggatggcttgagcacgggaggcagaggttgcactaagccaagatcgtgtcactgcactccagcccaggcaatagagccagaccctgtctcaaaaaaacaaaacaaacaaaacatgaatgaatgaaatggctcaccttccctattatgaactagaagaaaggatgaaggaaggttggcaggaccccagccttactctgtagtgacaacccagaggtacttttcccggaatgcagggtcaagtttatgtgtgaagggactctagaatagctggtaaaaatggctacatggtaaccattcttgacttagtccagtattcccataatttgtaattccataaatttattctcagctgtcccccagccatttctaatagaaggatgtgtaccccagttttgacaatgttcttgaaatcaagttagtgttacctgcattgcattataatggaactatatgtacatgttaaagggatccgtttgattcctttcggcaaggaattgcaaaaatagtttttaccaataccagttaaaataggataggttagactttgggggcagggtgagacagtgcagccttttcactctgaaatggcaaatcagctgtactctttgagtctaccagagattcctatttgagtgtgaatggggtgtgtgtgtgtgtgtgtgtgctcattcatcttcatgctttcttccatggtgttaattcaagctctcctaataaaggtatccaaagagtactgagaagtgaccataggtatttggcatgagtaaatgtagttccttttgccaaaaaaactctcaaaagttacaactggagttcttcgcgataaaaggttggggaaatcagccatggctttagccttgttcccaagtacacatcttcttatccacaaggatgaaactctgtagggctcaccctgagggctcatgtgtggcattgagagggtagcagtgaccagaacaccacaaggcccacaagatgttttgaatgagggaacatttaatgtcatttgttaggagatagaaaccaaataataaaggacaaggaccacgctcattccgtggagaagaggtgaactccctctgctgactatttggaatggactgaatgaggaggtctctccagccagaaggagtattgaggtcatcaggcctcagaaaacaatgtacacataatctcgggctgtgaacaagagaaaggagggggggaaacatgaaagtcaatcttaacaatttttgcaatacctcttatttgcagaccattggatttatgttattgcactctcggtgtgatttatcgtatgtatctgataggttttatgaattgttttgagttgtaaactcctataccctttattaaaatggacctaattaagtgattaaaaaaaaaaaaaaaaaa

SEQ ID NO: 3865 - DNA, 5877 bp, Homo Sapiens
  NM_014912
agagcagcctgggagatgtagtcttcggaccgtctccactagaggctgcacagcccgcccggaccaacgcctccgcgcctgccgccgtctggccggcgccctcccgtttccttcctccagggggaaaaaatgtctttcgggccgctttccaggaagcagcaggatgcgccgctccactgtcggtagcaacaagctgcgcaaaccatgcaggatgatttactgatggacaaaagcaaaacccagccccagccccagcagcagcagcggcagcagcagcagccccaacctgagtccagcgtatccgaagccccgtccacgcccctctcctcagagacccccaagccggaggaaaacagcgcagtgccggccctcagcccagccgctgcccccccggcccccaacggcccggacaagatgcagatggaatcaccgctcctgccaggcttgagtttccatcagcctcctcagcagccgccgccgcctcaggagcccgcggcaccgggcgcgtcgctgtcgccgtccttcggcagcacctggtccacgggcaccaccaacgcggtagaggacagcttcttccaggggatcaccccagtcaacgggaccatgctcttccagaacttcccgcaccatgtcaacccagtcttcggaggcactttctccccgcagatcggcctggcgcagacccagcaccaccagcagccgccgccgcctgcgcccgcgccgcagccggcacagccagcgcagccaccacaggcgcagcccccgcagcagcgccgctcacccgccagccccagccaggcgccctacgcgcagaggagcgccgccgcggcgtacggccaccagcccatcatgaccagcaagccgtcctcgtcttcggcggttgcagccgctgctgccgcagccgccgcctcgtcggcctcgtccagctggaacacgcaccaaagcgtgaatgcagcctggagcgcaccgtccaacccctggggcggcctgcaggcgggccgggaccctcgccgggcggtcggtgtgggcgtgggtgtgggtgtcggggtgccttccccgctcaaccccatctcgccgctcaaaaagcccttctccagcaacgtgatcgcgccgcccaagttccctcgcgcggcccctctcacttccaagtcctggatggaggataacgctttccggaccgataatggtaacaatctgttgccatttcaggaccggagtaggccctatgatacttttaacttgcactcgttggagaactccttaatggatatgataaggactgatcatgaacctctgaaaggtaaacactaccctcccagtggcccaccaatgagtttcgctgatataatgtggaggaatcattttgcaggacgcatggggataaatttccatcatccaggaacagataatattatggcacttaacaatgccttcctggatgatagccatggtgatcaagccttgtcatctggcttaagttctcccactcgctgtcaaaatggggaacgagtagaacgctactctagaaaggtgtttgttggaggacttcctcctgatattgatgaagatgagatcactgccagctttcgcaggtttggacctctcgtagtagactggcctcacaaagctgaaagcaagtcttattttcctcctaaaggctatgcctttctgctgttccaagaggaaagctcagtacaagctttgatagatgcctgcctagaagaagatgggaaactctacctgtgtgtgtcaagccccaccatcaaggacaagccagtgcaaattcgaccatggaacctaagtgacagtgactttgtaatggatggttctcagcctttggaccccagaaaaactatctttgttgggggagttccacgaccccttcgagctgttgaactggcaatgatcatggaccgtttgtacggtggtgtctgctatgctggcattgatacggacccagagctgaagtaccccaaaggtgctggccgcgtggcattctccaatcagcagagttacattgcagccatcagcgctcgttttgtgcagcttcagcacaatgacattgacaaacgggttgaagtaaagccatatgtgctggatgatcagatgtgtgatgagtgccagggcacacgctgtggtgggaagtttgccccgttcttctgtgccaacgtcacctgtctgcagtattactgtgaatactgctgggcgagcatacattcccgagccgggcgggagttccacaaaccgctggtgaaggagggaggcgaccgccctcgtcacgtcccgttccgctggagctgagccacgggccgacccagccacaagtactggagtagataacaaggagggaaaagagagggcactgcctcagggcttacagtgttctggaaatctgtgcattcgttctcgatttttaaagaagaattgggtctttttattattattattattatttacagtcatattactgaactcagtgtccagtataatgcagaattgcagagtgtagaatggtactgatttgcactttgattcacacctttgtctgcttggtaccttaattttttatacctgatttgtcactcgtgacagtatgtagactgccattctcatcagcggccgtcaggctactgtctgtgattcttttgtttgttgttgtggtgttgttctgattgttttgaactggagcatgcacttattttcagaaacttagagagttgcccctaggacaagacttaccaaaggtaatactcgtgagtaggtggcagatgtagcaaaaacttcacaacaattcagcaatcattagctcgggtcacttagagtaaggataacccttcatgaaaataagcctttagttgctctctattttgacttgtaaggatacctcataagctggatcttttatttttccttcatgtttgatttttgttttgccgaggattttggttagatcttttagtattatgtaaatttatgctgcaatagcttttgctgctattaaaatggtattattaataccataatactctattcaggctaggatatcaattaaacacaaaaacccaacaacacacttttgtgattttagggatagagtcagctgccgaacggagatcagaatagacttcagaaagcttcggtggaaggtcactatttctgactgcatgtttacttaatcaggttgctgcatgcaataaattttatatccaatgtctagtataaaacgttcccacaatgcacaaattaagaatctatataagctataaaaatactcattttttaaaaaaagtttttttcattcaaagaattggtaattgaccggaggaaggcatgcctcaataaatggaatgctctgaatgggaagagcccataacagaatgacctatattacaaccgatataaaacctaggtgtaggatattcttcaagcaaatttgtggatggtagatgaagtactttgcggtgctctgttatatattgtgaaatttattttatatagtaaagtgattatgtctaactgtgatcaaacttaactgtttaaagcctctgtcagacattaatgaacttgacagttcataactgatatattataaactaacacatgagctcttagttacaatctcttagtgcttgcaccattttacatagcttcagaccttgtccagaaaaccaaagagctcatcttagcttacaaacactaagaatatatacaggatatagagataagttgtcagattgacaaactaggcacatttttaagaaagttgtgtaatggtgatgctaaagaaatgtctgtacaaaataagatggcctgggcagagttggttgtctgagtgagaaactaactacttaattccctggatttatcctgttaagcttgagtagaatgaaggcctgctagcactagcgtggtctagaatgaaggcctgctagcactagcgtggacatttttctagcattcacccttgggctgcagatagtaatatataaacacacacaatgattgcaagactatgtaaatctttttttaatcttcttcctatgttttggaattctggggacaatctgactggatatgacactgcagaatagatttaagtcgctgtgttttctgtgctgtgatgtccttgtactgtcttaagttagtgttgcttgtttttgttttgttctcccatgtttagttgcaattactggctctcaagctatagtttgttttcaaaaaggaaaaacaaaatagttttttactggattaaaaatgcttattttagaatcctcccctttttgaggctttttggtaataattgcttttttccagcccaggtgtggttttgtttgtttttttctatgtttgtgggttttttttcatctgtacaagaaattttgttatgcactactactttttgtattctagacagttttcaaaagttggcagatttttttttttgtttttaaggaaaaaggcatgctttctgactgacatgatcttttgcaatacctcaattttgaaatataggaaagaaaatgatattttctaagtaagtttattcagaaaaatatatattaatttaattctgcaagaaaatgatttaacagatgggtaactttatttttttcatgcttatttgtgttttttgaaaatgaagaagttagagctttataactataatattaaagatcatatctaacctacagaaatctacctaattatgtgaaagaagcaaaactttttgaagaagcacccctctttcatgtattaaaataacactgagatttttttaaaagctggaagattgtacagcataaagctaaagtgaaggcaaaaaacattgtcctgaagaataggttacaaaaaataaactccatttggtgctgaaagttgtgaatagatggtggaaactactttcccttaatttgtatatttctaatcaagtgttgattgtgcgcgactgaccaggattgtgaaagagttcttctgtttgtatttttttaaagagaacttttttagtttattaaattataacatgttcccttttgttttgtaaataaatgtgcccccaagttgttaatgttatattaaaagagagggtccttcaaaaaaattattttttaaaacacagaggtgttctgacctgcaacttgactgggaagcccctgggtaacacaggtcctgctgtggcctttccttggtgtgacacttgaactagtcgattttttgaaggctataacctaacctcgactatttgttgttatgtgcaatactgtttgtactgtttgtataaaaaatagaaaaaaaaaagaaaagaaaaaaggcataaatctttattgcagatttattttcattgcaaactttagacattgtgattcactgaaatcatttttctactgtcaaatatgtaccttttcttcatgctggtattttttcaatagtaatgtagcctttgtactgagacaaattttcattgttatttttagaaagattttttgctaagaaaaaaattaaacatatttacatatttttcattttatttcgtattttctttaaggagtgctttctcaatcattaatagagttgtttctgggagggactttcatatctggtcaatgtcataatattattttgtatttttattggaataaattaattttatgatgctaattctttaaaagtttatttttttcattttcagttatttttgaagctaaaacctttgtaatattgttactaaagtgtctagttttttgaaatgcaaagctttatgtattaacttgctgatgtggtttacaatagtgtgacaacgatgaaaatgcttggttatgtaaagtgattggaaatgtaatggataattgggtaataaaatgacagaatgagcagaaaaaa

SEQ ID NO: 3866 - DNA, 5401 bp, Homo Sapiens
  NM_014913
acgagagtttgcacagatgtggaaaggagctggcagggcagttccctgggacagaagggagtcagggggtccaacaggggccccccactgccaccccagagcctccagtccagctttaggcaggggccccggggggcctgtgggaagtgccaggggcccccaagcacactctgctctcattggctggctgcgcctacatgcaaatgagggccaacgtcacttcctgaggccaatcgagcgccattttctctttctggctgcgcgggaggaggggaccagtcgcgctgggggtgggcgcgcgctgaggcgggggtcccgccgcgcggggcggaggcgcgggcgggcgcaggcggccccacgggacgcggctgcgctcggcggaagacgcggcagccctgcgagaggcagcagcggagacgcggtgctcctcgggcgccaagcggaaaatttcaaaaatgtttcaaattcctgtggaaaatcttgacaacatcagaaaggtgcgaaaaaaggtgaaaggtattcttgtggatattgggcttgacagctgcaaggagttactgaaggaccttaaaggctttgatccaggagagaaatactttcataacacatcatggggtgatgtttctctctgggaaccttctggaaagaaagtgagatatcgaacaaagccatactgttgtggcctctgtaaatactctacaaaggtgcttacttcattcaagaatcatttacatcgttaccatgaagatgaaattgaccaagagctggtgatcccttgcccaaactgtgtatttgcatctcagcccaaagttgtgggaaggcacttcagaatgttccatgcacctgtccggaaagtccagaactacacagtgaatattttaggtgaaactaaatcatctaggagcgatgtgataagtttcacatgtctaaaatgtaacttttcaaacactttgtactacagcatgaagaagcatgtgctggtagcccattttcactacttaattaactcctactttggcctaagaactgaggaaatgggtgagcaaccgaaaactaacgatactgtttctatagagaagatcccaccacctgacaaatattactgtaaaaagtgcaacgccaatgccagcagccaggatgcgttaatgtatcacattttgacatcagacatacacagagatttggagaataagcttagatctgtgatttcagaacatattaagaggactggactcttgaagcaaacgcacattgctccaaaaccagcagcacatttggctgcaccagcaaatggcagtgctccaagcgctccagcgcagcctccttgcttccatcttgctttgccacagaacagtccaagcccagccgcaggacagccagtgactgtggcccagggtgcccctggaagcctcactcattccccccctgctgctggccaatcccacatgactctggtctccagccctctgcctgtgggccagaacagcctcaccctgcagcccccagcacctcagcccgtctttctttctcacggggttccacttcatcagtctgtgaatcctcctgtgttgcccttgagtcagccagtcggacctgtcaataagtctgttggaactagtgtcctccccataaatcagactgttcgccctggggttttacccctcacccagcctgtgggacccataaacagacctgttgggcctggtgttcttcctgtgagcccctctgtcacccctggggtcctgcaggctgtctcgccaggggtgctttctgtgagtcgggcggtcccgtctggagtccttcctgcaggccagatgactcctgcaggccagatgactcctgcaggggttatccctgggcaaacagcaacttctggggttcttcctactggccagatggtccagtcaggagttctccctgtgggccagacagctccgtcacgggttcttcccccaggccagacagccccattgagggttatctctgcaggccaggtggtcccgtctgggcttctttctcccaaccagacagtctcctcctcagctgttgtgcctgtaaaccagggtgtgaattctggtgttctgcagcttagtcagcctgttgtgtcgggagttcttcctgtgggccagccagtgaggcctggggtcttgcaactcaaccagactgtgggcaccaacattctgcctgtgaatcagccagtgagacctggtgcttcgcagaacaccaccttcctgacatcaggctctattctcagacagctcatccctacagggaaacaagtgaatgggattccaacctacacgctggcccccgtgtctgtcactctgccggttccccctggaggccttgcgactgtcgctccgccccagatgcccatccagctcctgccgtcaggtgcagctgcaccaatggccggttccatgcccggcatgccctctcctccagtgctggtgaatgctgctcagagcgtgtttgttcaggcctcctcctctgcagcagacacaaaccaggtgctcaaacaggccaagcagtggaagacctgccctgtctgcaacgagctctttccgtccaacgtctaccaggtccacatggaggtagcgcataagcacagcgagtccaagtctggtgagaaacttgagcctgaaaaactggcagcgtgtgcaccatttctaaagtggatgagagagaaaacggtgcgatgtctgtcttgtaagtgcttggtctctgaggaagagcttatacaccacttgctgatgcatggcttggggtgcttgttctgtccatgcaccttccatgatatcaaaggtctttcagagcacagcaggaataggcacctggggaagaagaagttgcctatggattatagcaacagaggttttcaattagatgtcgatgccaatggcaacctgctctttccccaccttgatttcatcaccatattgccaaaggagaagcttggggagcgggaagtctacttggcaatcctggctgggatacactccaagtcactggtgcctgtgtatgtgaaggtgaggcctcaggctgagggcacccccgggagcaccggcaagcgagtgtccacctgccccttttgctttggcccctttgtgacaactgaggcctatgagctgcatttgaaggagaggcaccacatcatgcccacagtccacacggtcctgaagtctcccgccttcaagtgcatccactgctgtggggtctacacgggaaatatgaccctggctgccatcgccgtccatttggtgcgctgcagaagtgctcccaaggacagcagctcagacctgcaggcccagccgggttttattcacaacagtgaactgcttttagtcagtggtgaagtgatgcatgattccagtttttctgttaagagaaagctgcctgacggccacttaggggccgaagaccagcggcatggggaggagcagcctcccatcctaaatgccgatgcagccccgggtccagaaaaggtgacgagtgttgtgccttttaaaagacaaaggaatgaaagcagaacagagggacctattgtcaaggacgaggctcttcagattttagcattagatcctaaaaaatatgaaggccgttcttatgaagaaaagaagcaatttcttaaagattatttccataagaaaccatatcctagtaaaaaggaaatagaactgttgtcctcactcttttgggtgtggaaaattgatgtggcttcattttttggaaaaagaaggtatatttgcatgaaagcaataaaaaatcacaagccttctgtacttttaggctttgatatgtctgaacttaaaaatgtgaaacatagattgaactttgaatatgaaccataaaacttgcaaaaaaaaaaaaaagtaactctaaagtagtaggtagatttttttcagttgaaatttcacagtgttgtcctcactgtgttggtgaatcaacctcagtggtcactgtgctgctctgcagagttacttcaggtgctggagagacccctgttaccaggaagccagtagttatttcacatctattgtttcctgcagtttgatttgtaacagaacagttgttttcaggtttttttctctgtcatgtaaatgaaatcttttgatatttcatgcacgccttgttttcccactagtgtcagtatcgtatgataagaaactgaaatctataaataatttgctttttcattaaggacatttcagcctttttcagaatacttgatttaactgcgagtggaagcatcgatctccttcagctttccctgtagcagcagatggtacagtgagtgttcagagacgtgggtacaaaccctgtgatgtatgtataaggctccctgaggatgcactgcattaacttacgctgacttctttgtaagatctttgcttatagattataatttagatctgtatttttttaggtttatcctaatagctgtttttttttttaaccataactcatagaaaatcaaatgtttttatttgttaaaagtagactgaatttgacatctggtatgctggtatgtagctcatacatcaagagttattttacaaataaatttattctgtagatgcagaaatatttttcagtgtagattttcccttttgatatgctaagtcatttctccgttcagaggtaaaacaataaatttttagtgcctttagaataaacattgaaagaatacaccccaaaactcttctcctaacttaactactcataaactagtgaaagggaaggtctatgatactcaggaataagattattgcccctgagtgtgaaaactaacttaaatttcagcatagggtttcaggggacatggcgaagtttacagactgagatctcagtctccatggttggtacagtaagtctttgaccacattttctgaaggtcatgtttagtggagaaacgggcttttctctagctggtttaggctggaagctgtgtccgggtcgatgggatggcatattgttaaagaatctccattgtcgtcactgtcctgtggatgttaaacctcgtttttttccccacacgatattaaaacttaaagcaccagaaccagtcatggagaccagccagtttagatggtaagtcatatttctggtggtacacagcagaggaaccccttcactctatctttaggtagaaatatttggaggatgtgacagcctctgagaaacataatgttactatgtggattttaaaaaatataatacttgcatgtaattgctataatgttcatatttgaggcagttgtgaaactggtttatgattgttggtgtactctgttgtaaattcaaagagagcttgttgaacattttttttttttacctattgttttcagagtgtctattttgaattaaaatttgttacaccgctgcaaaaaaaaaaaaaaaa

SEQ ID NO: 3867 - DNA, 4371 bp, Homo Sapiens
  NM_014914
gctcggagcgggctccgcggcttgcaaggcgcctgcgactcggtcccaggtcggcgggcggcgcacggcgggctcgcgcgggggccccggcgcgccgggcggcgcagtacgcagcgcgcggacccacgccacggccaggagcccagagcagcgcggccacactgcccaggggtcggccctcggccccggcgctcggagcgcggcggctgcctgggctttaatggctgctccgcggagcagcgcctagggctggaaggcggctgcggctcaggaagtcacccgagcaagcctccttcggggccggccgcacccgccgcggcgcgctccatgggggcgcgctccccccgggcggcccgctgacccgggacgccggggcccgctcgctcgccggccgcgcgtcccggccatgaactgagcccgcgggccagccccgcgcctgctccgcccgcgcctttcttctcgcgcctcctccgcccgccgccggcgggcccggctccccgggggctgcggcgccccgggctcggcggcccgcgggccccggggcgcggggcggcggcggcggggggcgcgcggctccgggcgcggcgcctgcaccatgaactaccagcagcagctggccaactcggctgccatccgggccgagatccagcgcttcgagtcggtccaccccaacatctactccatctacgagctgctggagcgcgtggaggagccggtgctgcagaaccagatccgggagcacgtcatcgccatcgaagatgccttcgtgaacagccaggaatggacgctgagtcgatctgtcccggagctcaaagtgggaattgtgggtaacttggccagcggcaagtctgccctggtgcaccggtacctgacgggcacatatgtccaggaggagtctccggaaggtggcaggttcaagaaagagattgtcgttgatggacagagctatctgctgctgatcagagatgaagggggccccccggaggcgcagtttgccatgtgggtggacgctgttatatttgtcttcagcttggaggatgaaataagtttccagaccgtttaccactactacagtcgaatggccaactatcggaacacgagcgagattcctctggttctggtgggaacccaggatgccataagttctgctaacccgagggtcatcgatgacgccagggcgaggaagctctccaacgacctgaaacggtgcacgtactacgagacgtgtgctacatacgggctgaatgtggagagggtcttccaggacgttgcccagaagattgttgccacaaggaagaagcagcagctgtccataggaccctgcaagtcgctacctaattctcccagccattcctccgtctgttccgcgcaggtgtctgccgtgcacatcagccagacaagtaatggaggtgggagtttaagcgactattcctcctccgttccatcgactcccagcaccagccagaaggaacttcggatcgatgttcctcccactgccaacacgcccacgcccgttcgcaagcagtctaagcgccggtccaacctgttcacctctcggaaagggagcgacccagacaaagagaagaaaggcctggagagtcgtgcggacagcattgggagcggccgagccatcccaattaaacagggcatgctgttgaagcgaagtggcaaatcgttgaataaagagtggaaaaagaaatatgtcaccctgtgtgacaatggcgtgctgacctatcatcccagtttacatgattacatgcagaatgttcatggtaaggagattgaccttctgagaaccactgtgaaagtcccagggaagaggccaccccgagccacgtcagcctgcgcacccatctccagccctaaaaccaatggcctatccaaggacatgagcagtttacacatctcacccaattcagacacagggctgggtgactccgtatgctccagccccagtatctccagcaccaccagccccaagctcgacccgcccccctcccctcacgccaacagaaagaagcaccgaaggaagaaaagcactagcaacttcaaagccgacggcctgtccggcactgctgaagaacaagaagaaaattttgagtttatcattgtgtccctcactggccaaacatggcactttgaagccacgacgtatgaggagcgggacgcctgggtccaagccatcgagagccagatcctggccagcctgcagtcgtgcgagagcagcaagaacaagtcccggctgacgagccagagcgaggccatggccctgcagtcgatccggaacatgcgcgggaactcccactgtgtggactgcgagacccagaatcccaactgggccagtttgaacttgggagccctcatgtgcatcgaatgctcagggatccaccggaatcttggcacccacctttcccgagtccgatctctggacctggatgactggccagtcgagctcatcaaggtgatgtcatccatcgggaacgagctagccaacagcgtctgggaagagagcagccaggggcggacgaaaccatcggtagactccacaagggaagagaaggaacggtggatccgtgccaagtacgagcagaagctcttcctggccccgctgccctgcacggagctgtccctgggccagcacctgctgcgggccaccgccgacgaggacctgcggacggccatcctgctgctggcacacggctcccgggacgaggtgaacgagacctgcggggagggagacggccgcacggcgctgcatctggcctgccgcaaggggaatgtggtcctggcgcagctcctgatctggtacggagtggacgtcacggcccgagatgcccacgggaacacagctctggcctacgcccggcaggcctccagccaggagtgcatcgacgtgctgctgcagtacggctgccccgacgagcgcttcgtgctcatggccacccctaacctgtccaggagaaacaataaccggaacaacagcagtgggagggtgcccaccatcatctgaggaacagccgtgcccgcctgctcgccgcacctgggacgcggcagcctcgccgcattctcgctcagaagtcgcagcacgtgagtcccgtcgcatcccctccctcttcctggtggccacctccctcccgcccacccactctcaccccaaacaaaatcacaaaacctggacatccctcaaggggcgaagaggcggccgggagactgcagaagtggctccttttcataaactcccctaaaccacacacaggagagagcgacgggcctcggccctttgatgatagcacatggcgcaggacccttgtcctggtggcacaagggatggggacgcgagggggaggggaggcgaggaacaaggagaaggggcaactttccttaactggcagttgagcacatagtacatttcccctctaccaaacggaacacttggattccatctcttctctgaggagctcgacggcataaatcagaagcaagcacagagtttgtcaggtttgaagcccctatgatggtgtgtgtcaaatcagttgtagctaatctgtccagggagaatactggcttcattacacttgtacagccgagttcttcccgcattactgctgtttaatagaacgtgattagtcatcgccgagaagaaagcatattagccgaggaggtagtcacgcggcacgcgccggtgattgccacgatgtgattgcaatactcttagaagcaccatattatcccagacatgttctttcaagcccttggagccctctctaaattcactgtcatcatttagtatctgtttaatttttcagtccaaagagaggaaatcagtcgctgagtattatttgactccggtctccttggtgcaaaaacaaaatgggaaaaataaataagaataactcagaaactcaaaaggaaaccacaaattcagctaataatagcatttcgagtatatttcgtaaactaaggaaatacacaaaaggctgttttttccgactgtaagagatatttgatgtccttttgccgaggtggatgtgttagtctcaggccctcctggaccacgttgcccaagtcacacaggcttctgtgttatgtatttagataagatgtgtgaaaatatatttgaataaaagaagttcataaatatgcattgatttttgtacagacaaatggcacctctcttaatttataaattgaactggatgtgaactaataatgtgcaactagttgagataagagggttacagatcattgtacatggaaaatattcccagcagtaaacacttccattaatgtgatctacggcttttgaaaaggagcatctcagaataagatggtggtacaatttgcttattaaaattgagaaagaaaaaaaaa

SEQ ID NO: 3868 - DNA, 4567 bp, Homo Sapiens
  NM_014918
ggcgagctaagccggaggatgtgcagctgcggcggcggcgccggctacgaagaggacggggacaggcgccgtgcgaaccgagcccagccagccggaggacgcgggcagggcgggacgggagcccggactcgtctgccgccgccgtcgtcgccgtcgtgccggccccgcgtccccgcgcgcgagcgggaggagccgccgccacctcgcgcccgagccgccgctagcgcgcgccgggcatggtcccctcttaaaggcgcaggccgcggcggcgggggcgggcgtgcggaacaaagcgccggcgcggggcctgcgggcggctcgggggccgcgatgggcgcggcgggcccgcggcggcggcggcgctgcccgggccgggcctcgcggcgctagggcgggctggcctccgcgggcgggggcagcgggctgagggcgcgcggagcctgcggcggcggcccggcgggcggagcggcgcgggcatggccgcgcgcggccggcgcgcctggctcagcgtgctgctcgggctcgtcctgggcttcgtgctggcctcgcggctcgtcctgccccgggcttccgagctgaagcgagcgggcccacggcgccgcgccagccccgagggctgccggtccgggcaggcggcggcttcccaggccggcggggcgcgcggcgatgcgcgcggggcgcagctctggccgcccggctcggacccagatggcggcccgcgcgacaggaactttctcttcgtgggagtcatgaccgcccagaaatacctgcagactcgggccgtggccgcctacagaacatggtccaagacaattcctgggaaagttcagttcttctcaagtgagggttctgacacatctgtaccaattccagtagtgccactacggggtgtggacgactcctacccgccccagaagaagtccttcatgatgctcaagtacatgcacgaccactacttggacaagtatgaatggtttatgagagcagatgatgacgtgtacatcaaaggagaccgtctggagaacttcctgaggagtttgaacagcagcgagcccctctttcttgggcagacaggcctgggcaccacggaagaaatgggaaaactggccctggagcctggtgagaacttctgcatgggggggcctggcgtgatcatgagccgggaggtgcttcggagaatggtgccgcacattggcaagtgtctccgggagatgtacaccacccatgaggacgtggaggtgggaaggtgtgtccggaggtttgcaggggtgcagtgtgtctggtcttatgagatgcagcagcttttttatgagaattacgagcagaacaaaaaggggtacattagagatctccataacagtaaaattcaccaagctatcacattacaccccaacaaaaacccaccctaccagtacaggctccacagctacatgctgagccgcaagatatccgagctccgccatcgcacaatacagctgcaccgcgaaattgtcctgatgagcaaatacagcaacacagaaattcataaagaggacctccagctgggaatccctccctccttcatgaggtttcagccccgccagcgagaggagattctggaatgggagtttctgactggaaaatacttgtattcggcagttgacggccagccccctcgaagaggaatggactccgcccagagggaagccttggacgacattgtcatgcaggtcatggagatgatcaatgccaacgccaagaccagagggcgcatcattgacttcaaagagatccagtacggctaccgccgggtgaaccccatgtatggggctgagtacatcctggacctgctgcttctgtacaaaaagcacaaagggaagaaaatgacggtccctgtgaggaggcacgcgtatttacagcagactttcagcaaaatccagtttgtggagcatgaggagctggatgcacaagagttggccaagagaatcaatcaggaatctggatccttgtcctttctctcaaactccctgaagaagctcgtcccctttcagctccctgggtcgaagagtgagcacaaagaacccaaagataaaaagataaacatactgattcctttgtctgggcgtttcgacatgtttgtgagatttatgggaaactttgagaagacgtgtcttatccccaatcagaacgtcaagctcgtggttctgcttttcaattctgactccaaccctgacaaggccaaacaagttgaactgatgagagattaccgcattaagtaccctaaagccgacatgcagattttgcctgtgtctggagagttttcaagagccctggccctggaagtaggatcctcccagtttaacaatgaatctttgctcttcttctgcgacgtcgacctcgtgtttactacagaattccttcagcgatgtcgagcaaatacagttctgggccaacaaatatattttccaatcatcttcagccagtatgacccaaagattgtttatagtgggaaagttcccagtgacaaccattttgcctttactcagaaaactggcttctggagaaactatgggtttggcatcacgtgtatttataagggagatcttgtccgagtgggtggctttgatgtttccatccaaggctgggggctggaggatgtggaccttttcaacaaggttgtccaggcaggtttgaagacgtttaggagccaggaagtaggagtagtccacgtccaccatcctgtcttttgtgatcccaatcttgaccccaaacagtacaaaatgtgcttggggtccaaagcatcgacctatgggtccacccagcagctggctgagatgtggctggaaaaaaatgatccaagttacagtaaaagcagcaataataatggctcagtgaggacagcctaatgtccagctttgctggaaaagacgtttttaattatctaatttatttttcaaaaattttttgtatgatcagtttttgaagtccgtatacaaggatatattttacaagtggttttcttacataggactcctttaagattgagctttctgaacaagaaggtgatcagtgtttgcctttgaacacatcttcttgctgaacattatgtagcagacctgcttaactttgacttgaaatgtacctgatgaacaaaacttttttaaaaaaatgttttcttttgagaccctttgctccagtcctatggcagaaaacgtgaacattcctgcaaagtattattgtaacaaaacactgtaactctggtaaatgttctgttgtgattgttaacattccacagattctaccttttgtgttttgttttttttttttacaattgttttaaagccatttcatgttccagttgtaagataaggaaatgtgataatagctgtttcatcattgtcttcaggagagctttccagagttgatcatttcctctcatggtactctgctcagcatggccacgtaggttttttgtttgttttgttttgttctttttttgagacggagtctcactctgttacccaggctggaatgcagtggcgcaatcttggctcactttaacctccacttccctggttcaagcaattcccctgcctttgcctcccgagtagctgggattacaggcacacaccaccacgcccagctagtttttttgtatttttagtagagacggggtttcaccatgcaagcccagctggccacgtaggttttaaagcaaggggcgtgaagaaggcacagtgaggtatgtggctgttctcgtggtagttcattcggcctaaatagacctggcattaaatttcaagaaggatttggcattttctcttcttgacccttctctttaaagggtaaaatattaatgtttagaatgacaaagatgaattattacaataaatctgatgtacacagactgaaacatacacacatacaccctaatcaaaacgttggggaaaaatgtatttggttttgttcctttcatcctgtctgtgttatgtgggtggagatggttttcattctttcattactgttttgttttatcctttgtatctgaaatacctttaatttatttaatatctgttgttcagagctctgccatttcttgagtacctgttagttagtattatttatgtgtatcgggagtgtgtttagtctgttttatttgcagtaaaccgatctccaaagatttccttttggaaacgctttttcccctccttaatttttatattccttactgttttactaaatattaagtgttctttgacaattttggtgctcatgtgttttggggacaaaagtgaaatgaatctgtcattataccagaaagttaaattctcagatcaaatgtgccttaataaatttgttttcatttagatttcaaacagtgatagacttgccattttaatacacgtcattggagggctgcgtatttgtaaatagcctgatgctcatttggaaaaataaaccagtgaacaatatttttctattgtacttttcgaaccattttgtctcattattcctgttttagctgaagaattgtattacatttggagagtaaaaaacttaaacacgattcaaaaaaaaaaaaaaaaaa

SEQ ID NO: 3869 - DNA, 7859 bp, Homo Sapiens
  NM_014921
tttttttttttttttcctaatttttggtcggcggcggtgctgggccaggggaaggaagggacacggaggccgccctcgtcccgccacctcctacccgcttccccccagccccggctccgggagatgtgccgggcggggggcccgggttcgccgagccgcaggagagacacgctgggccgaccccagagaggcgctggacaggctggtggtccaggccgtggtgcctgccaggtgatgtggggcaaagccccccgcacaggccactgagagctccggacacgcacccggctgccaccatggcccgcctagccgcagtgctctggaatctgtgtgtcaccgccgtcctggtcacctcggccacccaaggcctgagccgggccgggctcccgttcgggctgatgcgccgggagctggcgtgtgaaggctaccccatcgagctgcggtgccccggcagcgacgtcatcatggtggagaatgccaactacgggcgcacggacgacaagatttgcgatgctgaccctttccagatggagaatgtgcagtgctacctgccggacgccttcaagatcatgtcacagaggtgtaacaaccgcacccagtgcgtggtggtcgccggctcggatgcctttcctgacccctgtcctgggacctacaagtacctggaggtgcagtacgactgtgtcccctacatcttcgtgtgcccagggaccctgcagaaggtgctggagcccacctcgacacacgagtcagagcaccagtctggcgcatggtgcaaggacccgctgcaggcgggtgaccgcatctacgtgatgccctggatcccctaccgcacggacacactgactgagtatgcctcgtgggaggactacgtggccgcccgccacaccaccacctaccgcctgcccaaccgcgtggatggcacaggctttgtggtctacgatggtgccgtcttctacaacaaggagcgcacgcgcaacatcgtcaagtatgacctacggacgcgcatcaagagcggggagacggtcatcaataccgccaactaccatgacacctcgccctaccgctggggcggaaagaccgacattgacctggcggtggacgagaacgggctgtgggtcatctacgccactgagggcaacaacgggcggctggtggtgagccagctgaacccctacacactgcgctttgagggcacgtgggagacgggttacgacaagcgctcggcatccaacgccttcatggtgtgtggggtcctgtacgtcctgcgttccgtgtacgtggatgatgacagcgaggcggctggcaaccgcgtggactatgccttcaacaccaatgccaaccgcgaggagcctgtcagcctcaccttccccaacccctaccagttcatctcctccgttgactacaaccctcgcgacaaccagctgtacgtctggaacaactatttcgtggtgcgctacagcctggagttcgggccgcccgaccccagtgctggcccagccacttccccacccctcagcacgaccaccacagccaggcccacgcccctcaccagcacagcctcgcccgcagccaccaccccgctccgccgggcacccctcaccacgcacccagtgggtgccatcaaccagctgggacctgatctgcctccagccacagccccagtccccagcacccggcggcccccagccccgaatctacacgtgtcccctgagctcttctgcgagccccgagaggtacggcgggtccagtggccggccacccagcagggcatgctggtggagaggccctgccccaaggggactcgaggaattgcctccttccagtgtctaccagccttggggctctggaacccccggggccctgacctcagcaactgcacctccccctgggtcaaccaggtggcccagaagatcaagagtggggagaacgcggccaacatcgccagcgagctggcccgacacacccggggctccatctacgcgggggacgtctcctcctctgtgaagctgatggagcagctgctggacatcctggatgcccagctgcaggccctgcggcccatcgagcgcgagtcagccggcaagaactacaacaagatgcacaagcgagagagaacttgtaaggattatatcaaggccgtggtggagacagtggacaatctgctccggccagaagctctggagtcctggaaggacatgaatgccacggagcaggtgcacacggccaccatgctcctcgacgtcctggaggagggcgccttcctgctggccgacaatgtcagggagcctgcccgcttcctggctgccaaggagaacgtggtcctggaggtcacagtcctgaacacagagggccaggtgcaggagctggtgttcccccaggaggagtacccgagaaagaactccatccagctgtctgccaaaaccatcaagcagaacagccgcaatggggtggtcaaagttgtcttcatcctctacaacaacctgggcctcttcctgtccacggagaatgccacagtgaagctggccggcgaagcaggcccgggtggccctgggggcgcctctctagtggtgaactcacaggtcatcgcagcatccatcaacaaggagtccagccgcgtcttcctcatggaccctgtcatcttcaccgtggcccacctggaggacaagaaccacttcaatgctaactgctccttctggaactactcggagcgttccatgctgggctactggtcgacccaaggctgccgcctggtggagtccaacaagacccataccacgtgtgcctgcagccacctcaccaacttcgctgtgctcatggctcaccgtgagatctaccagggccgcatcaacgagctgctgctgtcggtcatcacctgggtgggcattgtgatctccctggtctgcttggccatctgcatctccaccttctgcttcctgcgggggctgcagaccgaccgcaacaccatccacaagaacctgtgcatcaacctcttcctggctgagctgctcttcctggtcgggatcgacaagactcagtatgagattgcctgccccatcttcgccggcctgctgcactatttcttcctggctgccttctcctggctgtgcctggagggcgtgcacctctacctgctactagtggaggtgtttgagagcgagtattcccgcaccaagtactactacctgggtggctactgcttcccggccctggtggtgggcatcgcggctgccattgactaccgcagctacggcaccgagaaggcctgctggctccgagtggacaattacttcatctggagtttcatcgggccagtctccttcgttatcgtggtcaacctggtgttcctcatggtgaccctgcacaagatgatccgaagctcatctgtgctcaagcccgactccagccgcctggacaacattaaatcctgggcgctgggggccatcgcgctgctgttcctgctgggcctcacctgggctttcggcctcctcttcatcaacaaggagtcggtggtcatggcctatctcttcaccaccttcaacgccttccagggggtcttcatcttcgtctttcactgcgccttacagaagaaggtgcacaaggagtacagcaagtgcctgcgtcactcctactgctgcatccgctccccacccgggggcactcacggatccctcaagacctcagccatgcgaagcaacacccgctactacacagggacccagagccgaattcggaggatgtggaatgacactgtgaggaaacagacggagtcctccttcatggcgggtgacatcaacagcacccccaccctgaaccgaggtaccatggggaaccacctgctgaccaaccccgtgctgcagccccgtgggggcaccagtccctacaacaccctcatcgccgagtcagtgggcttcaatccctcctcgccccctgtcttcaactccccagggagctaccgggaacccaagcaccccttgggaggccgggaagcctgtggcatggacaccctgcccctgaacggcaacttcaataacagttactccttgcgaagtggggatttccctcccggggatgggggccctgagccgccccgaggccggaacctagccgatgcggcggcctttgagaagatgatcatctcagagctggtgcacaacaacctgcgggggagcagcagcgcggccaagggccctccaccgcctgagccccctgtgccacctgtgccagggggcgggggcgaggaagaggcgggcgggcccgggggtgctgaccgggccgagattgaacttctctataaggccctggaggagcctctgctgctgccccgggcccagtcggtgctgtaccagagcgatctggacgagtcggagagctgcacggccgaggacggcgccaccagccggcccctctcctcccctcctggccgggactccctctatgccagcggggccaacctgcgggactcaccctcctacccggacagcagccctgaggggcccagtgaggccctgcccccaccccctcccgcaccccccggcccccccgaaatctactacacctcgcgcccgccagccctggtggcccggaatcccctgcagggctactaccaggtgcggcgtcctagccacgagggctacctggcagccccaggccttgaggggccagggcccgatggggacgggcagatgcagctggtcaccagtctctgagggcacctcatggaccaggggctggtggcccaggccagggagggaaccctgggcagggctctggtgggagagggagacagatggaggcagtggctggtgggccactctctccaggtgcccctcagccatgggccctacagtcccctcaggggactctaacctgggggcctgaggtgccagggttcacagacagggtttcccaccagccacacgcaccagctctatttgggggaagtgtagtgaggaggagcccagaggaccccaggggagtgaggagggagaacttggaagggtgcagcccacttccagactctcccctctcccacccttctaccctgtgaagggaaatgagggctttagtttcctgggcagggaggggcagcttctgaggttgccaaaggcccccactggatggaacctgttagctgctcctctccgcagccagaaatgctgccggctgcacccagagggagcagtgaggcaggacagatggacaggttcctcctgcgctgtaattccctgctccctggagactgggaaaaggccgcagggcagggggactgggcggtggtggctggtggtttaaaggttgaactttctctgaagctcctttccccttgctcttggtccctgccccgcaagcaaacctgccccctctgcctcccagtgcacccaatgaccccctcccttggggcgactcctgatgaagcacaactccccgcagggcccccagcccacaggggtggccatatttgggcagttcccagtcctgtgggctcggctatctggggagcagattttgggtctggatctccctggggagtgggtcctgggcttggatctttccctagggggccctcttactccttcctctctcctcctccttccccattgctgtaaatatttcaacgaaatggaaaagaaaaaaaaaagacaaaaaaaaaaaaaaagaaaagaaaaaaaatctcatcacttgaagccaccgggagcctgcggcccgggccagcccgggctttctccggagcagagcagcgctgctggcctggcagccaggacttctccgtgtacgtgcatccccagtccccgccggggcgggcgggccgccagagcagctttttacaatccagagacagaaaacaaaatctagatgcaacagcgaaacaaagaacccatttccttcctggcaccctcctttcctgctccgcctgcccggcatcatcagcccttctggggcgtgtacctctcactgcctgccccaggaccagaggcctgtctcccccttccctccccaccggcccgggggagacctcttcacacccaaagatgctttgtcaagatggctgcgctgtccctttgagttcctgcttcttgtatattgctctggggactctcgccggggaagatggggctgatttcccacctagagaggttgatggcagaaggaaaatggggaggcactggggttgtggagggcatgggtatggctgaggagggtgctgggaacggcaaggcggtctgggggatggggaggggcaaaggtgagagatcaccttccctatcctccaccttcccgcagggaagacgaagccaggtgccagggctggggtcgggacacccatgttctgggcggcttgaccccaaatcccagaccccggaagctccaggctcgggatgtgtcctgagcacctgtcccggccccctcctctccagcctgtcaggccagcctccccagcccccttccctcaactctaggggcagcatagccccaggccaccctagcccagcccctgcattgccgtttccccagaggtggcccctccacctctgctctgacctctccccatctctctgcccctccttttctcacaagtgccatgagttttcaaacatcttcgggtctcagcctgctgctgccatgaactttgttgggttaagggggaggggctctaggaaggaactggggggaaggggacaggtaggtggctggagggaccctttttgctgctagaaagcccctcccttctcccggggagctggggctggcttgtccccatcaattaggggagaaggggtcagaccaaagatggtggtttgtcccgtgtaagggaacaggtgtggggaagaggtggggttgggttccaactctggctttttctggtagaaaggcctaacccattacaccagaagaccatgggtgaagtctagatggggaggagaagtgaggccagggacagtcttgccagacgactctgaggagggcaagggacagttccatggcccttcccggactgcactaggctgggagctctgttgtgtggaggggtggtcagaggtctgtgaagagcgggcaggaggcatgagcaggcgaggagctggcctgtcccgggaagcagcccagcctgtggctgcccccgacaccaggaggagggccaggagagttccagggggctgaggcacacagagaggccaacttcctccctgcccagccttccttgtatctctccagactcggacaatcaaagggagagagggtgtatcgggtcctgttccagccggcatcgccgggtggcttccaggcctcagagctgtgtggcagggccccctgctggggctggacatcactgcagtccagtgcaaagccgcccccagagcccaggtgtccccccaacctaaccagacctggtgccttgacgcccccaccccagctgggacggtacagagaagggtcttggtttcctctcctactcccttccttaggctcctgaactcgtttgctcctaaatcttgttaattctttttctctggattttggtttcttttggctttcccttgccttcccctttctctgtctccaacactctttccccatgtctttctggctgtctctatgttcctcttctcttatcctcaactttctgtccattcgggcctcctccccacctcccacgccccagcccctccctccttggtctccttttcgatatgccaaaccaattttgggtcgagtgcatttaacgagaacaaaacaaaaggctcataacaacaagaacgtttcagaaaaaaacaaaaagttttaaaaaaattgttgagtcaaaaagtcaaacaataaagaaattaagatttcttggaatgacaaaaaaaaaaaaaaaaaaa

SEQ ID NO: 3870 - DNA, 6837 bp, Homo Sapiens
  NM_014929
taaagttaggacctgaatgggttacgttgcgatacacgatcaaacatcgcccttataagctctgtggtatccccgagccccactcctgtatgcagggaaattagtcattctccttggtaaactttcttcaagtaagtccttcagctacagccgcgaacatatgctttttgacctttgagggaatccgtaagatctcgtgagaagcgcagcttctcggggaagctgtcatggctgctcctgtacgtagtcacggtcttgtgctctaaggaaaacgacagcacgtgttctttttcactagtagaagtgacgttggtttcatgttgacaactttgaagccatttggaagtgtttcagtggagagcaaaatgaataacaaagcgggctcctttttctggaaccttagacaattcagtacattagtttcaacaagcagaactatgaggctatgttgtttgggactttgcaaaccaaaaatagttcattcaaactggaacattttaaataactttcataacagaatgcaatcaactgatatcattagatatctctttcaggatgcattcatttttaaatcagatgttggctttcaaacaaagggcataagcactctaacagcccttagaattgaaagactactttatgctaaaagactgttttttgactcaaagcagtctcttgtccctgttgataaatctgatgatgaattgaagaaagtaaaccttaatcatgaagtctccaatgaagatgttcttaccaaggaaacaaaaccaaaccgtatcagcagtagaaaactgtctgaggaatgtaattccctgagtgatgtgttagatgcattttcaaaagcgcccacatttcctagtagcaactatttcacagcaatgtggacaattgccaaaagactgtctgatgaccagaagcgctttgaaaaacgactgatgtttagccaccctgcatttaatcagctctgtgaacatatgatgagagaagccaagatcatgcagtataagtacctactgttcagtcttcacgccatagtgaagcttggaatccctcagaacactattttggtgcagactttgctgagggtgacccaggaacgtatcaatgagtgtgatgagatatgcctttcagttttgtcaactgttttagaggcaatggaaccatgcaagaatgttcatgttctacgaacgggattcagaatactagttgatcagcaagtttggaaaatagaagatgtcttcacattacaagttgtgatgaagtgtattggaaaagatgcaccgattgctcttaagaggaaactggagatgaaagccttgagggaattagacagattttctgttttgaatagccaacacatgtttgaagtactagctgccatgaatcaccgatctcttatactcctggatgaatgcagtaaggtggtcctagataatatccatgggtgtcctttaagaataatgatcaacatattgcagtcctgcaaagacctccagtaccataatttggatctcttcaagggacttgcagattatgtggctgcaactttcgacatctggaagttcagaaaagttctttttatcctcattttatttgaaaaccttggctttcgacctgttggtttaatggacctgtttatgaagagaatagtagaggatcctgaatccctaaacatgaaaaacattctatctattcttcatacttactcttctctcaatcatgtctacaaatgccagaacaaagaacagttcgtggaagttatggctagtgctctgactggttatcttcacactatttcttctgaaaacttattggatgcagtatattcattttgcttgatgaattactttcccctggctccttttaatcagcttctgcaaaaagacatcatcagtgagctgctgacatcagatgacatgaagaatgcttacaagctgcatactttggatacttgtctaaaacttgatgatactgtctatctgagggacatagccttgtcactcccacagctgccgcgggagctgccatcgtcacatacaaatgcaaaggtggcagaggtgctgagcagccttctgggaggtgaaggacacttctcaaaggatgtgcacttgccacacaattatcatattgattttgaaatcagaatggacactaacaggaatcaagtgctaccactttctgatgtggatacaacttctgctacagatattcaaagagtagctgtgctatgtgtttccagatctgcttattgtttgggttcaagccaccccagaggattccttgctatgaaaatgcggcatttgaatgcaatgggttttcatgtgatcttggtcaataactgggagatggacaaactagagatggaagatgcagtcacatttttgaagactaaaatctattcagtagaagctcttcctgttgctgctgtaaatgtgcaaagcacacaataaagtgaaaatcaaccttttcatattaggagacatgcatttgtaaaaattaataaagatgacaagtcagttgtcaatggaattgagctatctgctaagacaaaaaatgttacctcagttcactattaaaattaattttaggagtggaagaaatgttgttactgccatttaaaaatatgctgagaaaattccagaagggttatttttccaaccacacctattccctctagtgcccagatatttgatttgtgagctgtacgtttcaccttttcatctttgatctactaaaaactggtttcttagttgtgaggtgtcacaggcaggttgatgtgggtagtagtccttgtctttggaatctgaatatttatactcctgctctaagctgttctaagacttggggttatgcctttaaatcattttcaagcattggccaaataataattggacaaagttctaaagttgtcaagtgtgtaagaattagtgaggtagctgttgaaaatgagtgaggatggtatttgtatttgtaataagcactgcaggtagagatatttcatgggttataataagagaaacacagatgagatgtagatggtaaggagtcttactgttgttggggtccttcctttctctttcttttttcccccttacccctcccacaatttcatgaagtcttttaaattaaatatatagctgaattgtgttgtgaatcagacctgaggactattttttcgattatgtgtgttcattctttgttcaaatatttgtccaaattcaactattttgttcaatatgcctgtctacctagtatttggctcgctggggatatagtgatgaataggcatggtctcttgtggaacttacagcatgggttccatgcaagttggtgttattctgcccccaagcacacagacatgcaattactagacatcttagtatgtgccgggcactgctaagtattcatttgtgtgctgccttttcatgatctgaaccctttgaggtgtagctgctattatgattctctctgtgtcttcacttcctcatctctaaaatcaggataggtatttgcccaaggctacacagagtaggggagggctggagtttgaatgtgagctaacataggcttataagaaaatacaaaaactgggctgggcacggtggctcgtgcttgtcatcccagcacttgggaggccgaggtgggctgatcatgaggtcaggaggtcaagacaatcctggccaacacggtgaaaccccatctctactaaaatacaaaaaattagccgggcatggtggtgcatgcctataatcccagctactggggaggctgaggcaggggaatcgcttgaacccgggaggtggagattgcagtgagccaagatggtcctgctgcactccagcctgaccacagagcgagactctgtctcaaaaaaaaaaaaaaaaaaaaaaaaaaaaaaatacaaaaactatagcaatatgacaacagctgccaggttgtatcaatttatccagcttgcatttagaaaaggttagagctgaaaggaaatttagtgattatttaattgttacttccctcattttatggacgaggaagataaggctcaaagaattttcctttcctgaagtctcagctatgccattggttccacatcatttcatcctcacctgctcttcagcttgtgtcccaggagatcaggcttctggttccagattggacaacctctagttttgtatacttggccaagtgatttaaccttataagcttcagaacaagatgcagatattctgttattaaaggaactaaggttttgtctttaaatgttgagtgtgcatcagttttgagtgtctaattatgactcctcttcaaaggatttgacaaatttgtgaatatttatgaccaccttttagggtagtaattttcagtttgtactagttaacctggcagataaaaaggcatccctcttttactagcattctagtgttagcattcttcattgctttgtgtcaatgaaagaaaaatgggcaaagagctgatgaacatgaaaaaagttcagtctacttgtaaagacatgcacattgaaacagaagagatggttttgcctttcaaattagcagttttttttcttttaagaattacagtgctgatgaaggtataatgaggcaagcacttgcataagctgttggtagactgtaaattaatacctttctggaatgtactttgtggggttttcttctcccataatttaaaaaatagctttattatagtataattgacatacagtaaactgcatatatttaaagtgtaccgttaggtcagttttgacgtacatacacacacacacacatctgtgaaaccacaatcaagataatgaatatatctatcacctctaaaaggttcctgtctttgcttttttctctgtcccctaaacaaccactgatctatggcacacatagaaaaaaattaggaaatatattaaatgctcattttgtgtgagatatccaaatatttttttcagaatccctaatgaaaaggttgatcttgctctagatacaagatataaaattgtattcttgaaatagctacatgcaattcttttttattattttttaattttaatttttagatttttaaagatggggccctgctatgttacccaggctagcttcaaactcctgggctcaagggatcctcctgcctcagcttctcaagtagataggactgattataggtacaggctactgtgcccagctcaattcttgattgagacatttaccagctctccgaattctcagtagttaccactgaatagaaactttctttacacaaagctgattaaacagtttagaacttttaaaaaacattcaaaaattgaaaatttcatatatacatagcctaacaactcttcttgtcattgacaaaatgtgatggtattttttttgtgataatacacatggacctcaaatgcaattgaactattcatatcaagtatttccaaataacaatgacattccaatttatagaatgtcatgtgttgtgagggtagtcaccctgcaactggcttggacatctctaagcaaatagaagtttctgtaagatagagatttggggcatctacttggaactacctatgaggagctggcattcctcaaatcccaactgactgcacttttccatgaaattacccagcagttatgatggtcagtggctcactcagcagcaagccacttaggtagctggcgagggacgtggcacagccttgtcttcacacagcacatcacagccaggcagcaaaggacagatctctctcatactcttcattcacagggcctgagaggtggaccatcagactccaccctgttttgcgctgacttgtagggagacctaggtgtggagcttcctggccaggagggcagtggctgcccagaaggcaggagatggctatctctttttttttcctgagacggagtcgtggtctgtcgcccaggctggagtgctgtggcgtgatctcagctcactgcaagctccgcctcctgggttcaagccattctcctgcctcagcctcccgagtagctgggactacaggtgcccacctccatgcccggctaatttttgtatttttagcagaaacagggtttcaccatgttagccaggatggtctcgatctcctgaccttgcgatctgcccgcctttggccttccaaagtgctgggattataggcgtgagccaccacccccggtccaagatggctatctcttaacacacttgtaacccatttgtgcacacaggtgtgccgtgactcactggtggatccaaaaaaagctgaagcctacatttcccagagcccctttcagcttgaattccaaatgtgacttagcttcctctatgcagatgtacctacttgaaactgggaaggccaaatgagatagaggtaatgtttctgccaacaaacagccacagagcattttatttttctagaagagcaataacagagaccccagggtgtggtgtggcaggacgaggagcatccattttgctggtggggattgtggctaaaataatgtggctctggagccagcaatgggcagcatcttcatgactttccagcttccaggctgtaagcagagatagcatctcttctggacagccagttatgtgatagtgttctgagagtcattcctggaagtcagactaaaggctgctccttcagcctttccattcatcttgtaagcaggaggcttctgtgcatggccagaaactaacaaaagcacattgtgtctaaactaggttgcagtggtttctgttatcagcaagtaaatcctgattgataaagatactacaatatatgcacatatatatgttatagaatcaataaaaattggatactttgctttaaaa

SEQ ID NO: 3871 - DNA, 5154 bp, Homo Sapiens
  NM_014930
gttcgcagctcaggaaggagggagccccaggaacaggagtcccaccgaagaactgctctctgacagaacagagacctcctcaccagggcttccaaacagatgcagaagaacccagaaaggagcaggtcttgatttgcccaaccagcggcacttcttcatccccttgcccagagagcaccagacttggtgatgtcgccacatccagaagccatcacagattgtgtgacactgaacactgtgggccaacttgcagaaggtggttatcctttacggttctccacactctttcaggagcagcagaaaatgaacatatctcaggcatcagtgtcattcaaggacgtgactatagaattcacccaggaggagtggcagcaaatggcccctgttcagaagaatctgtacagagatgtgatgctggagaactacagcaacctcgtctcagtggggtactgctgtttcaaaccagaggtgatcttcaagttggagcaaggagaggagccttggttctcagaggaggaattctcaaaccagagtcacccaaaagattacagaggtgatgacctgatcaagcagaacaagaaaatcaaagacaaacacttggagcaagcaatatgtatcaataataaaacattgactacagaggaagagaaagttttggggaaaccatttactctgcatgtagctgctgttgcttcaacaaaaatgtcctgcaaatgcaactcatgggaagtgaatttgcaaagtatttctgaatttatcattaataatagaaactattcaacaaagaaaataggttgcggtaatgtatgtgagaattcacctttcaaaattaactttgagaaaactcagactggagagaaattttatgaacataataaaaacatgaaagctctcaattataatgaaaatcttcccaagcatccaaagtttcaaactttggagcaagcttttgaatgtaataaaattggaaaagcctttaatgataaggctaactgtgttaaacataacagttctcacacaggagaaacatcctctaaagatgatgaatttaggaaaaattgtgataagaaaactctctttgaccacaggagaactggcacagggaagaaacacctgcatcttaatcaatgtgggaaatcctttgagaagtcaactgtggaggaatataataaacttaatatgggtataaaacattatgaattaaatccaagtggaaataatttcaacagaaaggcacacctcactgatcctcaaacagctgtcatagaagagaacccattggtaagtaatgacagaacacagacttgggttaaatcctctgaatatcatgaaaataagaaatcctaccagacgtcggttcacagagttcgccgaagaagtcactcaatgatgaaaccctataaatgtaatgaatgtgggaaatccttctgtcagaaaggacatctcattcaacatcagagaactcacacaggagagaaaccatttgaatgtagtgaatgtggaaaaactttctcccagaagtcacacctcagtactcatcagagaattcatacagcagaaaaaccctataaatgtaatgaatgtggaaaaacatttgtccagaagtcaaccctcaggggacatcaaagaattcacacaggagaaaaaccctatgaatgtagtgaatgtgggaaaacttttgttcagaagtccaccctcagagatcatcacagaattcacacaggggagaaatcctttcaatgcaatcaatgtggaaaaacatttggccagaagtcaaacctcagaatacatcagagaactcacactggggagaaaacttaccagtgtaatgaatgtgaaaaatccttctggcgaaaagatcatctcattcaacatcagaaaactcacacgggagagaaaccattcaaatgtaacgaatgtgggaaaacttttgcccggacatcaaccctcagagtgcatcaaagaattcacactggggagaaaccatttaaatgtaatgaatgtgggaagaaatttgtccggaaagcaatccttagtgatcatcagagaattcacacaggggagaaaccctttcagtgtaataaatgtgggaaaacttttggccagaaatcaaacctcagaatacatcaaaggactcacagtggggagaaatcttatgaatgcaatgaatatgggaaattatgtaagaagtctaccctaagcttataccagaaaattcagggagaggggaatccctattgatgtaataactagaaaatccttttgacaaaaggaataccccatttgatatcagagatacacaaaaaaccaattgagggtagtgaatgtaagaagacagtcccagaagtaaaccctcactgtgaatcagagaattcacataggaaagaaaccagatgaagatgaatgcaggaagaattgtgtccaaaatgcaaccttcagagtgtatcaaagaattcagacaggcttctgttttcagagtactatggataggcctgaatgaagtcataccctattagatagctcccacacatcacacaggctggtaatctcttcaccagcaccaatttcattttactccaggcacatagtccagatttcccaatctccttttcatccaggttggtctttgtgactggctactaagatgtggatgtccatgatgtatatcacatcccagtctgaaacataagagacttccctaataaattaccagggccctgtcacaacaaaatggatatcatttctaggacaagcttggtgccgtgctttaatgtggcatggtacaagataaagaagtctgtgcctgaatgaatacacgcagcaaaattctcctcttctgtgtctttcccagttgaacattatgtgagcaaaatttaagcttatacagtagtccccccttatctgtattttcactttacgcaatttccattaaccatggtcaactgtactttaaagttattaaatggatccagaaataaacaattcctacattttaaactgcacccgattctgagtagtgggatgaagtctcatgccctcctgctctcccatgagggttattgaatcattccttagtctagcatatccacagtgtatacactatctgccagttagtcacttacttgacattttagttatcagatcacctgtcagggtatgacagtgcttgtattcaagtaacccttgttttactaaataatggcctgaaattgcaagagcatttctggcatgttgttgtaattattccattattagtccttaatttataaattaggcacagcaagagattaaactatcataggcatgtgtatatgtaggaaaaaaatatagtatatacagggttcagtatacccgtggtttcaaacatcaacttggaattcttggagagcattccttgtagttaagcagggactactgtattctgttgagctttcacatgtttgagtctatttgtttctacacataatttagttatcttctgctaggaaggcagaaagcttctgtgtaagccaggcttaagtcaatcagagggcacaaaccttattaggaggctagagagtcaaggagaacctcaaatatgatcagagaattgtggaaaagacatcctttcaatgtaatgaaattgatagtaccacctgatacagggctttgcatgaacctaaaagtcttttggctgaatggtgagcagccactgtgcagttcaacgtaagtgtgccttaattgcacagaggtactgcccccacacctcctgacacctccatataccccagctatatctgctttaaggagttttccctggctccaaaggccattggcacccacccaagtattatgggaaacctccagagaggggagggactcagatttatatggctttattgaatccatgcccaaggcaacatcttactagttcctgtgggggtacaggacacctagatttagctaatggggtttggcaatgggaaggcaaacaaatttaataactttatgggtgaggtactttgggccagtagagtatactacagttatgtttacatctgaaagtgtagtagggattaattcccataagttatagagagaattctaattccctgtaattcgcataagtcatagaattctaatcaggaataattgtatgtaaagatacctctgaggtccaacagctctgatcattttgggcttcaagtctctctctgtgactggtgattttgtgggttgaaacttctggcaaaagggggcagcccttgggagctgggggccaggggattgacttggttccctgacaagggtaccaggtccaccccttctgaaaagcagctgttagtttactcttgggctcttttacacattggatatctcttccttgggtagagggttctgacctaaaattccactttaggagtttgtcgtcttggactcaacaactaacaaaatgaaaaggacccagcaagcctcacttgtggaatgaaaatggggcattcaggaaagcacctgtcctggccccacagtatgtcagctgtataggcaatagtagtagctgtctcttagaagggaaataatgtatcacctctttccagaacgaagcaaagttgctggcttagtagagccctcaattcatagaggttactgtaattgggcctggctcactgatgctttcgccaactgaaactactaggatcctgtgtgtgttcaaactcagtgccattaacaaacccaaagtgaagcggtcactcctctcagtggaaagagcacgaggatgttctcagctctggccaatactccatttcataaaccatgttacatttttgttaagccttggctctggatgtggcctagatatttgatattctaattggaaattacagattaaaaagcaccctttctttgtacagtgggggtaaaagtcacagctgcttagtacaaccatctgggttgctcaagtagatgcccataataagagactattttctgataagactgactggaatcaagctgccgacagctttctccatccagattgtgacggttgctacctggatccatcattttactggtatggcaaaaaatcacccatgtgacactgggtgacatggtaaaagtacatggtacttttacagtaccatgtactgtacaaaataaaggtctctttatctg

SEQ ID NO: 3872 - DNA, 4273 bp, Homo Sapiens
  NM_014933
cggggaaagatgtcgctcccggaagtgttgggcgcagggcgtggctgcggctgcggctgccacgttggaacggaacgtggaggtggccctggccggggaggaggggcggcggcgaatgctgggagagtccgacgagcgctgcactaacgcaggatccggctgccgaaggtcctcgccaggatgaagttaaaggaagtagatcgtacagccatgcaggcatggagccctgcccagaatcaccccatttacctagcaacaggaacatctgctcagcaattggatgcaacatttagtacgaatgcttcccttgagatatttgaattagacctctctgatccatccttggatatgaaatcttgtgccacattctcctcttctcacaggtaccacaagttgatttgggggccttataaaatggattccaaaggagatgtctctggagttctgattgcaggtggtgaaaatggaaatattattctctatgatccttctaaaattatagctggagacaaggaagttgtgattgcccagaatgacaagcatactggcccagtgagagccttggatgtgaacattttccagactaatctggtagcttctggtgctaatgaatctgaaatctacatatgggatctaaataattttgcaaccccaatgacaccaggagccaaaacacagccgccagaagatatcagctgcattgcatggaacagacaagttcagcatattttagcatcagccagtcccagtggccgggccactgtatgggatcttagaaaaaatgagccaatcatcaaagtcagtgaccatagtaacagaatgcattgttctgggttggcatggcatcctgatgttgctactcagatggtccttgcctccgaggatgaccggttaccagtgatccagatgtgggatcttcgatttgcttcctctccacttcgtgtcctggaaaaccatgccagggggattttggcaattgcttggagcatggcagatcctgaattgttactgagctgtggaaaagatgctaagattctctgctccaatccaaacacaggagaggtgttatatgaacttcccaccaacacacagtggtgcttcgatattcagtggtgtccccgaaatcctgctgtcttatcagctgcttcgtttgatgggcgtatcagtgtttattctatcatgggaggaagcacagatggtttaagacagaaacaagttgacaagctttcatcatcttttgggaatcttgatccctttggcacaggacagccccttcctccgttacaaattccacagcagactgctcagcatagtatagtgctgcctctgaagaagccgcccaagtggattcgaaggcctgttggtgcttctttttcatttggaggcaaactggttacgtttgagaatgtcagaatgccttctcatcagggagctgagcagcagcagcagcagcaccatgtgttcattagtcaggttgtaacagaaaaggagttcctcagccgatcagaccaacttcagcaggctgtgcagtcacaaggatttatcaattattgccaaaaaaaaattgatgcttctcagactgaatttgagaaaaatgtgtggtcctttttgaaggtaaactttgaggatgattctcgtggaaaataccttgaacttctaggatacagaaaagaagatctaggaaagaagattgctttggccttgaacaaagtggatggagccaatgtggctcttaaagactctgaccaagtagcacagagtgatggggaggagagccctgctgctgaagagcagctcttgggagagcacattaaagaggaaaaagaagaatctgaatttctaccctcatctggaggaacatttaatatctctgtcagtggggacattgatggtttaattactcaggctttgctgacgggcaattttgagagtgctgttgacctttgtttacatgataaccgcatggccgatgccattatattggccatagcaggtggacaagaactcttggctcgaacccagaaaaaatacttcgcaaaatcccaaagcaaaattaccaggctcatcactgcagtggtgatgaagaactggaaagagattgttgagtcttgtgatcttaaaaattggagagaggctttagctgcagtattgacttatgcaaagccggatgaattttcagccctttgtgatcttttgggaaccaggcttgaaaatgaaggagatagcctcctgcagactcaagcatgtctctgctatatttgtgcagggaatgtagagaaattagttgcatgttggactaaagctcaagatggaagccaccctttgtcacttcaggatctgattgagaaagttgtcatcctgcgaaaagctgtgcaactcactcaagccatggacactagtactgtaggagttctcttggctgcgaagatgagtcagtatgccaatttgttggcagctcagggcagtattgctgcagccttggcttttcttcctgacaacaccaaccagccaaatatcatgcagcttcgtgacagactttgtagagcacaaggagagcctgtagcaggacatgaatcacctaaaattccgtacgagaaacagcagctccccaagggcaggcctggaccagttgctggccaccaccagatgccaagagttcaaactcaacaatattatccccatggagaaaatcctccacctccgggtttcataatgcatggaaatgttaatccaaatgctgctggtcagcttcccacatctccaggtcatatgcacacccaggtaccaccttatccacagccacagccttatcaaccagcccagccgtatcccttcggaacaggggggtcagcaatgtatcgacctcagcagcctgttgctcctcctacttcaaacgcttaccctaacaccccttacatatcttctgcttcttcctatactgggcagtctcagctgtacgcagcacagcaccaggcctcttcacctacctccagccctgctacttctttccctcctcccccttcctctggagcatccttccagcatggcggaccaggagctccaccatcatcttcagcttatgcactgcctcctggaacaacaggtacactgcctgctgccagtgagctgcctgcgtcccaaagaacaggtcctcagaatggttggaatgaccctccagctttgaacagagtacccaaaaagaagaagatgcctgaaaacttcatgcctcctgttcccatcacatcaccaatcatgaacccgttgggtgacccccagtcacaaatgctgcagcaacagccttcagctccagtaccactgtcaagccagtcttcattcccacagccacatcttccaggtggccagcccttccatggcgtacagcaacctcttggtcaaacaggcatgccaccatctttttcaaagcccaatattgaaggtgccccaggggctcctattggaaataccttccagcatgtgcagtctttgccaacaaaaaaaattaccaagaaacctattccagatgagcacctcattctaaagaccacatttgaggatcttattcagcgctgcctttcttcagcaacagaccctcaaaccaagaggaagctagatgatgccagcaaacgtttggagtttctgtatgataaacttagggaacagacactttcaccaacaatcaccagtggtttacacaacattgcaaggagcattgaaactcgaaactactcagaaggattgaccatgcatacccacatagttagcaccagcaacttcagtgagacctctgctttcatgccagttctcaaagttgttctcacccaggccaataagctgggtgtctaaaaggacagcttctcttccactcaatattgccatttttccaaagaaacatgttaaaaaaaaaaattataagacatggactagtcctcattagcatgtttgcatagcaaccagtcaagagcatttacactatttctgctgatatactcaccttagaactgctcagaaccctggtgctttatttttgttttaatcttttgttgccagtgatgattttcctattctgcaaatagtgtatttcctggattacacatagtatggtttcctgaagtattctgataaatgtgttttttaaaacctcaatatactttttagaaaaggagcatctggttatgcataaagcagagctaaaactaaatttctttcatgtcctccctacttcctcagtgtcaatcagattaaagtgtgtaatcctaaaaaaaaaaaaaaaaaa

SEQ ID NO: 3873 - DNA, 4697 bp, Homo Sapiens
  NM_014936
agacgctcgcctggcagctgcgcacactcggagcgccccgagcggcgcagatagggacgttggggctgtgccccgcggcgcggcgcctgccactgcgcaggcgcctcaggaagagctcggcatcgcccctcttcctccaggtcccccttccccgcaacttcccacgagtgccaggtgccgcgagcgccgagttccgcgcattggaaagaagcgaccgcggcggctggaaccctgattgctgtccttcaacgtgttcattatgaagttattagtaatacttttgttttctggacttataactggttttagaagtgactcttcctctagtttgccacctaagttactactagtatcctttgatggcttcagagctgattatctgaagaactatgaatttcctcatctccagaattttatcaaagaaggtgttttggtagagcatgttaaaaatgtttttatcacaaaaacatttccaaaccactacagtattgtgacaggcttgtatgaagaaagccatggcattgtggctaattccatgtatgatgcagtcacaaagaaacacttttctgactctaatgacaaggatcctttttggtggaatgaggcagtacctatttgggtgaccaatcagcttcaggaaaacagatcaagtgctgctgctatgtggcctggtactgatgtacccattcacgataccatctcttcctattttatgaattacaactcctcagtgtcatttgaggaaagactaaataatattactatgtggctaaacaattcgaacccaccagtcacctttgcaacactatattgggaagaaccagatgcaagtggccacaaatacggacctgaagataaagaaaacatgagcagagtgttgaaaaaaatagatgatcttatcggtgacttagtccaaagactcaagatgttagggctatgggaaaatcttaatgtgatcattacaagtgatcatgggatgacccagtgttctcaggacagactgataaacctggattcctgcatcgatcattcatactacactcttatagatttgagcccagttgctgcaatacttcccaaaataaatagaacagaggtttataacaaactgaaaaactgtagccctcatatgaatgtttatctcaaagaagacattcctaacagattttattaccaacataatgatcgaattcagcccattattttggttgccgatgaaggctggacaattgtgctaaatgaatcatcacaaaaattaggtgaccatggttatgataattctttgcctagtatgcatccatttctagctgcccacggacctgcatttcacaaaggctacaagcatagcacaattaacattgtggatatttatccaatgatgtgccacatcctgggattaaaaccacatcccaataatgggacctttggtcatactaagtgcttgttagttgaccagtggtgcattaatctcccagaagccatcgcgattgttatcggttcactcttggtgttaaccatgctaacatgcctcataataatcatgcagaatagactttctgtacctcgtccattttctcgacttcagctacaagaagatgatgatgatcctttaattgggtgacatgtgctagggcttatacaaagtgtctttgattaatcacaaaactaagaatacatccaaagaatagtgttgtaactatgaaaaagaatactttgaaagacaaagaacttagactaagcatgttaaaattattactttgttttccttgtgttttgtttcggtgcatttgctaataagataacgctgaccatagtaaaattgttagtaaatcattaggtaacatcttgtggtaggaaatcattaggtaacatcaatcctaactagaaatactaaaaatggcttttgagaaaaatacttcctctgcttgtattttgcgatgaagatgtgatacatctttaaatgaaaatataccaaaatttagtaggcatgtttttctaataaatttatatatttgtaaagaaaacaacagaaatctttatgcaatttgtgaattttgtatattagggaggaaaagcttcctatatttttatatttacctttaattagtttgtatctcaagtaccctcttgaggtaggaaatgctctgtgatggtaaataaaattggagcagacagaaaagatatagcaaatgaagaaatattttaaggaaacctatttgaaaaaaaaagcaaagaccatttgataaaagcctgagttgtcaccattatgtcttaagctgttagtcttaaagattattgttaaaaaattcagaagaaaagagagacaagtgctcttctctctatctatgcttaatgcctttatgtaagttacttagttgtttgcgtgtgcctgtgcaagtgtgtttgtgtgtggttgtgtggacattatgtgatttactatataaggaggtcagagatggactgtggccaggcttccacattcctgaagcacacagatctcaggaaaggttatttttgcacttcatatttgtttactttctcctaactcacaagttaaaatcataacttaatttcattaacttttatcatttaactctctcatgtttgttgtaacctgaggtatccaaatgctacagaaaaatttatgacccaaatacaaatctcaatttgactgggacagaatgaggaatggagatttttgtatttatctttgggactttatgccttactttttaggctatagaatagttaagaaattttaaacaaaatttagtatcttttggtctttcacaccattcatatgttaagtggcagaatagccttagtgctacctccacttttttctccagtatttgcatcacagaaataatccctctgtttaacatgtttgttcagagccaagggtttattgtgaagaactgtcatcctgcctttgctagctggtaccttctagtaatcaaaattaatatgaagaaactaggttgtgacagactagattatatttagtaggggaaaaattgggctcaagaaccattcatcagtacgtgagacaagcagttaatagtatgatctttaaagttttgacaatataaaataaacttggtaactgttttacaaatataaaagtataataaatatgcagcccagttaaatattgattatctgtgatggtaaagaacaacagtggtgccagtcatcaaacatacagtgcgtcctattgagtcactgctaatttcttgagcctggtatttgctgcctattgtatttgtggttgttgagaggcattttcaaaccctgtataaataatccatgctgttggtcataagttaactgtattaagaacagtaaaataaataaaaaccaatagtactaattttgctttaaaaaaatttctaatttttttcacataaaacaattatcctaaaggttaatagttgatcgaaacagaataatagaaaaattctactttaatttccattaaaaagcaaatagcattgacacatttaaagcttttcatttaaagtagtggatgtttttgaagtatctaaaatagtagcagaatattttatacttggtccttgcaatggtgtgagttttaatgattgcattatcgtgattggtggttatgagtttcagaaatctatacttggcatccaactcatgagtggattttatataggatggaacaggaaggtatgtcctgtcagtatcttaaccctttcaacaagacatttacctatttgtctttccttacgttctcaaaatattaactcgaattgtaaattaagcaaaaatttaaaaagtatatgttgatgggacaagaagaatagtatttatttaataaaacatatattatattgaactatgtgttaattcatttgtatcttttaaaaaattatcactgttaaagccattgactcctttagtacactgagaaaaatcttatagtaaaactagcctttcacattaaggttttggtgtgtattttgttaaataactaacatgctgctctattttctgggtgtagaaagtatttggctctaggaaacatttacttgtttgtgaaaacaataccccaaggtaataggaaaagtttgagttaagtgtttttaattcagtcagtgaattcagaataagtacattcatgtataacatagggacagttctgctgctgttatttatatgcaattcttctggtaaatagcaatagaataaaacatatttcaatgtttgtgtataggttttatattattattccactaggaatggcataagaatttatagataaattcttgtaacattaaaggattaaaatgtttttacattgtttttgggtgtctccttcttgtgcccatatctgataagctttatggattattgcatttaattccttttatttggagggttttacttccttgttaacatataaagttataaatgaaggacaaggaggagatggaaaatgtgtatttattgttaattcttaaaatagtgtgtaaataaaataacatcagtgtgctttaaagaaatgtgtatgtagtgccttaatttaaattaaaatatttttgactgttacttgagttcagaattaatgactttgttcatgatttttaaaatgtgtgtgaataaaatctaccaaaaaattcttactgtaattattaaatataaagttcagtgtcaaaaaaaaaaaaaaaaaa

SEQ ID NO: 3874 - DNA, 4467 bp, Homo Sapiens
  NM_014941
cgagactcagattgtctgaattgagctatcgcaacttaatgctaaaagctccttaaagctacagatttatgacatagttccttccaaaatattacatcataaatcattgagaagattaaaaaaaaacacttgaagaaattgtagttttaaacatctctgcatatattttggatagctactaggttactttaactgtcattaaggagcacagacttactgaagctttactggacagaatcctgggaaatcgatatcattataaggttatatttcccagttagcgggtgaagggctggagaccttattgcagtcatggctttcacaaattacagcagtctgaatcgagctcagctaacctttgaatatctgcacacaaattcgtaagtatcctctaggtgccactgaggtaaccagtaactcgttccttgatattatatggaaatcgtttccccagaaaattttgctttttcactttttgagatgtatcccactggagtgaaatgtgtcactggatatcttgagctctgtattgaagaactgagatcagtgaaatacttgttgctaatccagaagaatctgatttttgtttattggatcaaaattttctaaatgcaaactttagttatttgaagtcaatatgttgagttgtttcattcaagtgtttataggaatccaacaaatactgctctattggatcgccaaatgttggactattttagtatcaaccgtttcccctctgtagtgacaacgtcctaaacagttaggtttataacaagtgtttactttctaacaagaaaacagaagacatttaaatgacaactttcaagaagaaaatttttattttttcagaagttggcattatcttcctggcagattgctcacatccaatattatttgtatatgctaaacaggaaacggcaacttgtttatatctctatttagatagtctttccccaaaatttccacagaaacatacagtgttcatggttcttgagttcatgaaggagtaatctaatcactccaacatggtctggaatgtttcaggtttaatccatatgcccactctcttggaggctgtccagtagcgtcaaaactttagtgttttaatacattcacctgttacttttgagatgaagttcacctttcttggatcacatgcaaaggatgtttaggtctgtgaagaaaagaatttctaggccgggtgctgtggctcacgcctgtaatcccagcactttgggaggccgagaaccactcacgaattcttgtttggtgctcttgctgaactggttgataatgcaagagatgctgatgccaccagaatagatatttatgcagaaagacgagaggaccttcgaggaggatttatgctttgctttttggatgatggagcaggaatggatccaagtgatgctgccagtgtgatccagtttgggaagtcggccaagcgaacacctgagtctactcagattgggcagtacgggaatgggttaaaatcgggctcaatgcgcattgggaaggattttatcctgttcaccaagaaggaagacaccatgacgtgcctcttcctgtctcgcacgtttcatgaggaagaaggcattgatgaagtgatagtcccactgcccacctggaatgctcggacccgggaacctgtcacagacaatgtagagaaatttgccattgagacagaactcatctataagtactctccattccgcactgaggaggaagtgatgacccagtttatgaagattcctggggacagcggaacattggtgatcatcttcaatctcaaactcatggataatggagagccagaactagacataatctcaaatccaagagatatccagatggcagagacgtccccagagggcacgaagccagagcggcgctcgttccgtgcctatgccgctgtgctctatattgatccccggatgaggatcttcatccatgggcacaaggtgcagaccaagaggctctcctgctgcctgtacaagcccaggatgtacaagtacacgtcaagccgtttcaagacccgtgcggagcaggaggtgaagaaagcagagcacgtagcaaggattgctgaagagaaggcgcgggaggcagagagcaaagctcggacattagaagtacgcctaggtggagacctcacgcgggactccagggtgatgttgcgacaggtccagaacagagccatcactctgcgcagagaagccgatgtcaagaagaggatcaaggaggccaagcagcgagcacttaaagaacctaaggaactgaattttgtttttggtgtcaacattgaacaccgggatctggatggcatgttcatctacaactgtagccgactgatcaaaatgtatgagaaagtgggcccacagctggaagggggcatggcatgtggcggggttgttggggttgttgatgtgccctacctggtcctggagcctacacacaacaaacaggactttgctgatgccaaggagtaccggcacctgctccgagcaatgggggagcacctggcgcagtattggaaggatattgccatcgcccagaggggaatcatcaagttctgggatgagtttggctacctctctgccaactggaaccagcccccgtccagtgagctgcgttacaaacgccggagagctatggaaatccccaccaccatccagtgcgatttgtgtctgaaatggagaaccctccccttccagctgagttctgtggaaaaagattaccctgacacctgggtttgctccatgaaccctgatcctgaacaggaccggtgtgaggcttctgaacaaaagcagaaggttcccctgggaacattcagaaaggacatgaagacgcaggaagagaagcagaaacaactgacagagaaaattcgccagcagcaggagaagctggaggcccttcagaaaaccacacccatccgctcccaagcagacctgaagaaattgcccttggaagtgaccaccagaccttccactgaggaacctgtgcgtagacctcagcgtcctcggtcgccccctttacctgctgtgatcaggaacgcccccagcagacccccttctttgccaactcctagaccagccagccagccccgaaaggctcctgtcatcagcagtaccccaaagctccctgctttggcagcccgggaggaggccagcacatctaggctgctccagccacctgaggcaccccgaaagcctgccaacactctcgtcaagactgcatcccgacctgcccctctggtgcagcaactgtcaccatctttactgcccaactccaagagccctcgggaggttccttctcccaaagtcatcaagactccagtggtgaagaagacagagtcacccatcaaactctccccggctacccctagtcggaagcggagtgtcgcagtttctgatgaggaagaagttgaggaggaagctgagaggaggaaggagaggtgcaagcggggcagatttgttgtgaaggaggaaaagaaggactcgaatgagctctcagacagtgctggggaagaggactcggctgacctcaagagagctcagaaagataaagggctgcacgtggaggtgcgtgtgaacagggagtggtacacgggccgtgtcacagccgtggaggtgggcaagcatgtggtgcggtggaaggtgaagtttgactacgtgcccacagacacgacaccaagagaccgctgggtggagaaaggcagtgaggatgtgcggctgatgaaacccccttctccggaacatcagagccttgatacacaacaggagggcggggaggaggaggtgggccctgtggcccagcaggccatagctgtcgcagagccctccacttccgaatgcctccgcattgagcctgacaccactgccctgagcaccaatcacgagaccatcgacctgcttgtccagatcctccggaattgtttacggtacttcctgcctccaagtttccccatctccaagaagcagctgagtgctatgaattcagatgagctaatatcttttcctctgaaggagtacttcaagcaatatgaagtagggctccaaaacctgtgcaattcctaccagagccgtgctgactcccgggccaaggcctccgaggaaagcctgcgcacctccgagaggaagctccgcgagacggaggagaagctgcagaagctgaggaccaacatcgtggcactcctgcaaaaggtgcaggaggacatagacatcaacacagatgatgagctggacgcctacattgaggacctcatcaccaagggggactgaaggcaggagagagagcagctcccctgcccacctgcccctcaaccctgtagctgcagggggaggggacttcattcatgggttggtggtcgcaccttggtttgacttacacgggacatttgtgtttttggaggaaaagataccctgattctttgaatcttccttaagtttataaatatttattttttaaaag

SEQ ID NO: 3875 - DNA, 4335 bp, Homo Sapiens
  NM_014945
gcgccccctgcgctgccaacccgcgagcccgcatcatggatgtcgagctcccctatttcgcattgctagccctggaattcgagaccccagacgaggaccaggattcatgaaatcagtcgcaggggccggggcaggggcctctggctcccgacactggccgagaggtgatgagtgaggttcgaagaacggaagatttaaaaagcagccggggcctccgtattgaatgaaagacccagtgcaaagacatcaccatgaacactagcattccttatcagcagaatccttacaatccacggggcagctccaatgtcatccagtgctaccgctgtggagacacctgcaaaggggaagtggtccgcgtgcacaacaaccacttccacatcagatgcttcacctgtcaagtatgtggctgtggcctggcccagtcaggcttcttcttcaagaaccaggagtacatctgcacccaggactaccagcaactctatggcacccgctgtgacagctgccgggacttcatcacaggcgaagtcatctcggccctgggccgcacttaccaccccaagtgcttcgtgtgcagcttgtgcaggaagcctttccccattggagacaaggtgaccttcagcggtaaagaatgtgtgtgccaaacgtgctcccagtccatggccagcagtaagcccatcaagattcgtggaccaagccactgtgccgggtgcaaggaggagatcaagcacggccagtcactcctggctctggacaagcagtggcacgtcagctgcttcaagtgccagacctgcagcgtcatcctcaccggggagtatatcagcaaggatggtgttccatactgtgagtccgactaccatgcccagtttggcattaaatgtgagacttgtgaccgatacatcagtggcagagtcttggaggcaggagggaagcactaccacccaacctgtgccaggtgtgtacgctgccaccagatgttcaccgaaggagaggaaatgtacctcacaggttccgaggtttggcaccccatctgcaaacaggcagcccgggcagagaagaagttaaagcatagacggacatctgaaacctccatctcaccccctggatccagcattgggtcacccaaccgagtcatctgcgctaaagtggataatgagatccttaattacaaagacctggcggctctccccaaggttaagtctatctacgaggtacaacgccccgacctcatttcctatgagcctcattccagatacatgtccgacgagatgctggagagatgtggctatggagagtcgctgggaacattatctccctactcccaggacatctacgagaacctggacctccggcagagacgggcctccagcccggggtacatagactcccccacctacagccggcagggcatgtcccccaccttctcccgctcacctcaccactactaccgctctgggcccgagagtggccggagctctccataccatagccagttagatgtgaggtcctccactccaacctcttaccaggctcccaagcactttcacatcccagctggagacagtaacatctaccggaaacccccgatctacaaacggcatggtgatttgtctacagcaaccaagagcaaaacaagtgaagacatcagccagacctccaagtacagtcccatctactcgccagacccctactatgcttcggagtctgagtactggacctaccatgggtcccccaaagtgccccgagccagaaggttctcgtctggaggagaggaggatgattttgaccgcagcatgcacaagctccaaagtggaattggccggctgattctgaaggaagaaatgaaggcccggtcgagctcctatgcagatccctggacccctccccggagctccaccagcagccgggaagccctgcacacagctggctatgagatgtccctcaatggctcccctcggtcgcactacctggctgacagtgatcctctcatctccaaatctgcctccctgcctgcctaccgaagaaatgggctgcacaggacacccagcgcagacctcttccactacgacagcatgaacgcagtcaactggggcatgcgagagtacaagatctacccttatgaactgctgctggtgactacaagaggaagaaaccgactgcccaaggatgtagacaggacccgtttagagcgccacctgtcccaggaagagttctaccaagtctttggcatgaccatctctgagtttgaccggctggccctctggaagaggaatgaactgaagaagcaagcccggctgttctaggcagaggctctataaatatatatgcatttatataaagatatatgtaaaatctctctactgaagctcggtataatcctctcttgtgtaatgggacacactgcctgccatgagacttgcttttctgtactgtcaggcaagcccacgtcatcgagatatttttatgctccttactttctcttttctaagtgctgtgggatctgggaagggatttgaggggactctgtccttttattggggatcctttttatactgaaacatctgtcctaacttgagtgccccaaggtccaactctctttcctaaagaaggtgcctgaagaagtctctcttctctctgcttcgtggcccctttcttaaatttctagggctgatgctgaccatgtggtttccacaccttattggccccagaggggccctcccatgggaagatctgcagcagtctccccaaatcagtgagcacctttgagcgcccacgaagaactttctcaacacccccaattaggagctcagtgctctcttggggcaatgcagttaaaagggtgagcctcaaatctagtcattacaccagtcaacagaagtggacagggcctaggcctctcctcagctccttaaccctcctccttctgccctggattgtaacctctcccttgtccaaatctaggattcctggtaggaaaaggaaaaggcccttcccttccctccaccacttccaactggcccctttgcctgacctggacttggagaaccagaggaaaagagagggagcggaagtgggagatggagcagggcacctgttagaatcagagctgcaggatttcttgggaccctcctctctccctcactgctcccagcacctcctgacccttccctctttcaaggagaagcccatgattgcagcttgtattctttagccttattacaatctatgtgcctgacaactcaacacaccgcagggctaatgttcccaccagagctccaactgaacaaccagacagacaactctcatcatcctccagagagaaaataggccgtgtctcaaagaaaggttcttggtctatgcctctggtctgtgggctggcagggcaaccataccatacccccgccagtcctcggctcctgctgcaaagttggccatgtttcacagggaaacttttggaagagtggctgcttatgagattccaaaatgaagtgttggccaacaccgctcatggccatcctggattttcccagtggcttcccttcctgctcgcctccctgaacaggggagaaagcttaacctctcttctcctctccaaacctttcaccttgaatgggtaatgtttggtgggggctgttccttcttggagaagccttgagtcggaccattttgagatcatggaggaaggatgaagaagtgaaaatgacaataatgactctcaagaggctggcgatgtgacatggcaaatgtagaactgacttaaattgaacaaaccctcactgagcacctctgatgttgagcacctgctgaatactgagcactgaatgggggagggggaggggagcacggggtgagtcaacctgggactcggtctcagggatatgcctaccaatagcgggtatcgtaaggcatgtacccaaacataacggatgtaaggcagaaagtgatcggagaaggaatgagaaagtgtgcgtgatgttaatgaaaagtcatatgcagctagagcagacccaggaaagctttctggaagagattgcatctgaggaaattcaggaaggatctttgtagattggggggagattctaaattgaaggggtgatggggtgaggggccagagggaagtctgctgtgttctcatgtaggatgtcagccctccctgcaacttctctttttggccaatgtcttttcactttcctgaccctttagaatcatccccagccagacgcaatcatggaagttgccttattgtcactggttaagaacttggcgagattgaagggcttttgttattgttgttggatatttttgtttcccataaaagcacatcatttcaaccct

SEQ ID NO: 3876 - DNA, 5246 bp, Homo Sapiens
  NM_014947
agttccgggtgcgcggccccggatgttggctgctcttgctgccgccgccgctctcggggctgctcggggcctcgaccgctcgcagtaggcaccgttgggacctttcccgggggggcggagacgcacggagcggccgggggctcggccgggccgtcccggcctgcgcagcctgagattctctttgtggccagatgggtttgtatggacaggcttgtccatctgtaacttcattaaggatgacatctgaactggagagcagcctaacgtctatggactggttaccacagctcaccatgagagcagccatccaaaaatctgatgctacacaaaatgcacatggaacaggaatttctaagaagaatgcactccttgacccaaatacaactctggaccaggaagaagtccaacagcacaaagatgggaaacctccatacagttatgccagcctcattacatttgcaattaatagctcacccaaaaagaaaatgactttaagtgaaatttatcagtggatttgtgataacttcccatattatagagaggctggcagtggttggaagaattccatacgacataatctgtcattgaacaaatgtttccttaaagtgcctcgatctaaggatgaccctggaaaggggtcctactgggcaatagacaccaatccgaaggaagatgtgctgcctactcggccaaagaagagggcacgatctgtagaacgggcctcaactccatatagcatagattcagattctttgggaatggagtgtattatttcgggaagtgcctctccaactctggcaatcaacactgtgactaacaaagtaacattgtataacactgatcaggatggtagtgatagcccacgcagtagccttaacaacagtctctcagaccagagtttggcatctgttaatttgaacagtgttggaagtgtgcatagttatacaccggtgacaagccatccagaatcagtctctcaatcattaactcctcagcagcaaccacagtacaaccttccagaaagagacaagcaactacttttctcagaatataattttgaagatcttagtgcctcatttcggagcctttataagtcagtttttgagcagtcacttagtcaacaaggtttgatgaacatcccttctgaatcttcccagcagtcccacacttcatgtacctatcagcactctcccagcagtacagtgagcactcacccacacagcaaccaaagcagcctgtccaacagtcatggcagtggcctcaacaccacaggcagtaattcggttgcacaggtctcactgtctcacccccagatgcacacacagccatctccacatcctccccatcgaccgcatggtttaccgcagcatccgcagcgttccccacacccagcaccacacccacagcaacacagccagctccagtcccctcacccccagcatccctctccacatcaacacatacagcaccatccgaaccatcagcatcagacgttaacacatcaggcacccccacccccacaacaggtatcctgtaattctggtgtttcaaatgattggtatgcgacacttgatatgctaaaagaaagctgtcgaattgccagcagtgttaattggtcagatgtagacctttcacagtttcaaggtctgatggagagtatgagacaggcagatctcaagaactggtctttagaccaggttcagtttgccgatctttgttcttctcttaatcagttctttacacaaactggccttatacattcacagagtaatgttcaacaaaatgtttgtcatggtgccatgcatccaacaaaaccttcccaacacattggaacaggaaatttgtacatagattctaggcaaaatctccctccttcagtgatgccaccccctggttatcctcatatcccacaggcactcagcactccaggaacaacgatggcaggccatcacagagccatgaaccagcagcacatgatgccttcccaagccttccagatgcggcgttccctgcctccagatgacatccaggatgactttgattgggattcaattgtgtagggcttgtttctgcaagacaccagaccctaacgttacctttctgtgcagtgaagggaaaggtttaagagaatccagttgagaaaacaaacttgctaatcactttaccaatgttatcaaaattacttttgaagacaatcagaaggattttagctggataacttactgcttttatctgacccaagcaagtactacatgtttgtctccctgccagctgccctatgtagctcctaactgttgtgtgatttggacggctttttgcatatttgtgtcagtttgatgttaaccacaagtgccagactgatttttcagacggagcctattttgctgcaagcagtttatataaagatacatatgtgtaaatatatgtacaaaaattactgaaaggcttcagttttttctaattggattattatgtcttgaaagttattgtcagtttttattccttgttaggctattttctgcaggatgcttttaactgatgtaggaaactgaaaggaaatagattttttccaaaacccagttccccttatttaatcttttttagaaatgtgggtaatgaattctatctaataagtcaaggaaaccagaatttgacacactccaacaatccgaaggggcatgttgctcctgagcagcatgaagaactgaccaaattggttttgatgcttgggggatcatagagtatttatgtctgcttttctaaatctgcattataatagctctaaaatttgttgattggtaagaaattgggcattgcttggctctttaaacacatcagtgcttccacattcacctatgtatttattattcaaaagtgtcattttaatatttattgctaccttctgtgaatgcttagctcctgtcgggttcattaaggagaaatgtgtctgaaagcacagaactattattatttttttctttttttgagatggagtcttgccctgttgcccaggctggagtgcagtggcacgatctcggctcactgcaacctccgcctcccgggttcaagcaattctcctgcctcagcctcccgagtagctgggagtgcaggtgcacaccgccatgcctggctgattttttgtattttagtagagatggggtttcaccatgttgcctgggctggttgcaaactcttgagctcaggcagtctgcctgcctcagcctcctagagtgctgggattacagacatgagccactgcgcctggcccagcgttacttttcttgataagaatttacagataagacactcagagagacattgtgtcattctctatcatcactccttttaccatgtgaatagatttctctgtcttggcattcttgctgattcagacttattagttaaatcggatttttctggaatttgaatcagatttcatttgggcaacaacagcagggcagggtttctaaagcaggtttccccactcatctaggttgtcttgaaaggaggatagagccacttacagttttatttgcttcagtgtttaatgtagatattatgtggcctgctgtttctgttgtcttgtatgtctgtgtatgcatgacatttggtccctttctttgaaatgcagcccctcttacgggttttttagtggtggtggtttgttttgtttcatatcatatcacagtttgcatggactgattatcttagttttatgataaaactagaagaaatgagggtttttttttaatgaatagattttgaattgattctttagaccccccaaaaagtgtcagttctaatggggaaatatattccatcaagtcaaagagtaataactgctcactagttgctttttagcatctctggtcttatcagccatgctaaatcactttaattagccttagtgattctatggttgagtaatctctacttgaactaaacaaacatcttttgtttctgtgtgtgtgtgctgtgtgtgagagtgtgcgcgcgcgtgtgtgtgtgtgtgttttaatggagtgttgccttgaatgaatcactgggaagccagccatggtaagggctggtgaggttggggagaaaggaagagctttatgtttctctgttgtttggaccctacttggcatgaaaaaggaagctcagttccagccccttggatcaacgaaaatcagaggattctggaaaggcagccaacttgcgcctcttagaaggatcagaggcaagatgagatggcagcctgcagagtaaatgcttgaaaaaagaggggtgattttcaatggtttgcttaagtcactgttttctagacaccaaaatagctgttttgaaactgttttaattgcttgggtagcaatgtgcactttaaacaatttggatattggaatgcagtctcatactgagtgatttgagtagaaccactgatgatgattttataaattgtgtgaagcgaatttcccatttggcaatcatttactgatttgcagtgatgaatatttttatgagaatttaaacttagcaagaatggccatggaggcaaagccttcacccagacccatcccactctcctgtgatccaggtggtccaggagcccaggacaggccttttctgtgggccctggccagacagggttacctggtgaggtgcagagagtccctctagtggccattttgtatggtagttgctaatgcagaacaagttctgtcttgggcttaaattgactgaagactttagggggaaagaatagtaaatgcatgtaaacaaatggggacactctgttcaggagaataatccgactggcatttgtggcagtttttgaaatgtaaatgtattcatgtgtgttcttgtaaatacgtgtcgctcagatgtcctttgaagtgggagggaatcaatccggggataatttcaaatggaatagagtattttgatattgttcattcagagggtgatgtgtacatatctatattgtatatatgtgatgaaaatgcattggctttttgtgcagatacaacctgctctctgtactgctgttggacagtcagtgttttaatgtttctacagttttgctattgcacgatttcatattttgcctctatgatgaacggcaaccattatttgtaactgtttagtgctgtaaagaaatattccaagtgtcattaggattgttgctgccagaactgatatgcatgaatggcacttaaaataaatatattatgttaactctatttacaacaaaaaaaaaaaaaaaa

SEQ ID NO: 3877 - DNA, 2960 bp, Homo Sapiens
  NM_014949
ggtggttgagtggaagcggtcgccatgtccgcggggagcgcgacacatcctggagctggcgggcgccgcagcaaatgggaccaaccagctccagccccacttctcttcctcccgccagcggccccaggtggggaggtcaccagcagtgggggaagtcctgggggcaccacagctgctccttcaggagccttggatgctgctgctgctgtggctgccaagattaatgccatgctcatggcaaaagggaagctgaaaccaactcagaatgcttctgagaagcttcaggctcctggcaaaggcctaactagcaataaaagcaaggatgacctggtggtagctgaagtagaaattaatgatgtgcctctcacatgtaggaacttgctgactcgaggacagactcaagacgagatcagccgacttagtggggctgcagtatcaactcgagggaggttcatgacaactgaggaaaaagccaaagtgggaccaggggatcgtccattatatcttcatgttcagggccagacacgggaattagtggacagagctgtaaaccggatcaaagaaattatcaccaatggagtggtaaaagctgccacaggaacaagtccaacttttaatggtgcaacagtaactgtctatcaccagccagcacccatcgctcagttgtctccagctgttagccagaagcctcccttccagtcagggatgcattatgttcaagataaattatttgtgggtctagaacatgctgtacccacttttaatgtcaaggagaaggtggaaggtccaggctgctcctatttgcagcacattcagattgaaacaggtgccaaagtcttcctgcggggcaaaggttcaggctgcattgagccagcatctggccgagaagcttttgaacctatgtatatttacatcagtcaccccaaaccagaaggcctggctgctgccaagaagctttgtgagaatcttttgcaaacagttcatgctgaatactctagatttgtgaatcagattaatactgctgtacctttaccaggctatacacaaccctctgctataagtagtgtccctcctcaaccaccatattatccatccaatggctatcagtctggttaccctgttgttccccctcctcagcagccagttcaacctccctacggagtaccaagcatagtgccaccagctgtttcattagcacctggagtcttgccggcattacctactggagtcccacctgtgccaacacaatacccgataacacaagtgcagcctccagctagcactggacagagtccgatgggtggtccttttattcctgctgctcctgtcaaaactgccttgcctgctggcccccagccccagccccagccccagcccccactcccaagtcagccccaggcacagaagagacgattcacagaggagctaccagatgaacgggaatctggactgcttggataccagcatggacccattcatatgactaatttaggtacaggcttctccagtcagaatgagattgaaggtgcaggatcgaagccagcaagttcctcaggcaaagagagagagagggacaggcagttgatgcctccaccagcctttccagtgactggaataaaaacagagtccgatgaaaggaatgggtctgggaccttaacagggagccatgattatccagccaagaagatgaaaactacagagaagggatttggcttggtggcttatgctgcagattcatctgatgaagaggaggaacatggaggtcataaaaatgcaagtagttttccacagggctggagtttgggataccaatatccttcatcacaaccacgagctaaacaacagatgccattctggatggctccctaggaaacagtggaacagagttttgaccctcagtgactcttcttagcaataatgcatgcatttgatttaacaagactctggggcctgtgctgggaaccatctggacctttgcagaagttagagattcagtgcccccctttcttaaaggggttccttaacaaccacaaaaatccttatttctgcagtggcatagaatctgttaaaatttaattagaatcacaaatttatctcagaagctttttaacagttggtgaaatgtgcttgtccaacaaagcatcctaacagggtcgttcccatacacatttgacctggtcagccttttccaggtgaatagccccagttctgacataaagaaagttttatttgtattttactactgtttggtcaattttgatatataactggttacaaacagagccttactatttattagtggggaaatgattttaagaccgtccttttcagtatttaattctgacagatctgcatccctgttttgttttggattatttctgttttggaaaatgctgtctcatttaaaactgttggatatagctggatcctggataggaaaatgaaattattttttcattgtgttttttaattggggtgatccaaagctggcaccttcaggcacattggtctcatagccattactgtttttattgcccttctaagatcctgtcttcagctgggtcagagaaaacttcttgactaaaactggtcagaactcatcacagaaatgaaatacagtggtctctctctcccagaactggttgcagctaaaacagagagatctgactgctggctataggattttggacttaatgactgaaattgcaaattgtcctttttcttggcattacagattttgccaaaataactttttgtatcaaatattgatgtgtgaaagtgaaggagctagtctgctgaaccaggaatagtttgagatattgaactgtcatttttgcacatttgaatactttgcaggctggctttgtataaacttatcctctggtttcctatatgttgtaaatatttagaccataatttcattataaataaatctataaatattcaaaaaaaaaaaaaaa

SEQ ID NO: 3878 - DNA, 7667 bp, Homo Sapiens
  NM_014953
aaccaagacaaccatctccgcacccgcaaggaggacagaaccagcactcccacaagccgccggaagtcaactctcccggatgttccgaggagcggaaagcaacacacgttgtgaggtggcgtccagaaggaagccccgcctaggccacgggcggaaatggctcctcgccttgctttgccgcccctccccactctcgcccaatccccgcggccgtcagagagccaaccaatgtttatctcggcattttcccgcgagaagtgttactaatatccgggaatggaaagggaagaacctccggggttaggcgtattctagattgacgccttttgctggaagagcgctgctggggttaggattctgcgcggcgaggcaagatgctcaagtccaagacgttcttaaaaaagacccgggcgggcggcgtgatgaagatcgtgcgcgagcactacctgcgagacgacatcggctgcggtgcgcccgggtgcgcagcgtgtggaggggcgcacgaggggccggccctggagccgcagccccaggacccggcgagcagcgtctgcccgcaaccgcactacttgctgcccgacactaatgtgttactgcaccagattgatgttcttgaggaccctgccatcaggaatgtaattgtgctacaaacagttcttcaagaagtgagaaatcgcagtgcccccgtatataaacgcatccgagatgtgactaataaccaagagaagcatttctatactttcactaatgagcaccatagagaaacctatgtagaacaagaacagggagaaaatgctaatgacaggaatgatagagcgattcgagtagcagcaaaatggtacaatgaacatttgaaaaaaatgtcagcagacaaccagctgcaagttatcttcataacaaatgacaggagaaacaaagagaaagccatagaagaaggaataccagctttcacttgtgaagaatatgtaaagagcctaactgctaaccccgaactcatagatcgtcttgcttgtttgtctgaagaagggaatgaaatagaaagtggaaaaataatattttcagagcatcttcccttaagtaagctacagcaaggcataaaatctggtacataccttcaaggaacatttagagctagcagggaaaattacttggaagctacagtatggattcatggcgacaatgaagaaaataaagagataatcttacagggacttaaacatttaaacagagctgttcacgaagatattgtggctgtggagcttctccccaagagtcagtgggtagcaccatcttctgtggttttacatgatgaaggtcaaaatgaagaagatgtggagaaagaagaagagacagaacgaatgcttaagactgctgtaagcgagaaaatgttgaagcctacaggtagagttgtaggaataataaaaaggaattggagaccatattgtggcatgctttccaagtctgacattaaggagtcaagaagacatctctttacacctgctgataagagaatccctcgaattcgcatagaaaccagacaggcttccacattagaaggacggagaattattgttgctattgatggttggcccagaaattccagatatccaaatggacactttgtgagaaatttaggtgatgttggagagaaagagactgaaacagaagttttgttacttgaacacgatgttccccatcagcctttttcacaggctgttcttagttttctgccaaagatgccctggagcattactgaaaaggacatgaaaaaccgagaagacctgaggcatctgtgtatttgtagtgtagacccaccaggatgtactgatatagacgatgctctacattgtcgagaactcgaaaatggaaatttggaggttggtgttcatattgctgatgtgagccattttattaggccaggaaatgccttggatcaagaatcagccagaagaggaacaactgtgtatctttgtgaaaagaggattgacatggttccagagttgcttagctctaacttgtgttccttaaaatgtgacgtggacaggctggcattttcatgtatttgggaaatgaatcacaatgctgaaatcttaaaaacgaagtttaccaaaagtgttattaattcaaaggcatctctgacgtatgctgaagctcagttgagaattgattcagcaaacatgaatgatgatattaccactagtctccgtggactgaataaactagccaaaattctgaagaaaagaaggattgaaaaaggggctttgactctatcctctcctgaagttcgattccacatggacagtgaaactcacgatcctatagatctgcagaccaaggaacttagggaaacaaattccatggttgaagaatttatgttacttgccaatatttctgttgcaaaaaaaattcatgaggaattttctgaacatgctctgcttcgaaaacatcctgctccacctccatcaaattatgaaattcttgttaaggcagccaggtcaaggaatttggaaattaagactgatacagccaagtctttggctgagtctttggatcaggccgaatctcctacttttccatatctaaacactctgttgagaatattagccactcgctgtatgatgcaagctgtgtacttctgttctggaatggataatgattttcatcactatggcttagcgtctccaatatacacacattttacttcacccattagaagatacgcagatgtcattgttcatcggcttttggctgtggctattggggctgactgtacttatccagagttgacagacaaacacaagcttgcagatatatgtaaaaatctaaatttccggcacaaaatggctcaatatgcccaacgtgcatcagtggcttttcatacccagttattcttcaaaagcaaaggaatagtaagtgaagaagcctatattttatttgtaagaaagaatgccattgtggtattaattccaaagtatggtttagaagggacagtcttttttgaagaaaaggacaaaccaaacccacagcttatttatgatgatgagataccctcacttaaaatagaagatacagtgttccatgtatttgataaagttaaagtgaaaatcatgttagactcatctaatcttcaacatcagaagatccgaatgtccctggtagaaccacagataccaggaataagcattcctactgatacttcaaacatggaccttaatggaccaaagaaaaagaagatgaagcttggaaaatagctatattcaacaaaaatcttcaaagactggtttcttttttaaaagaaaaaacttgaaagaacacttctaagcctaagtgtgtgatacagtttgttacttttaagtacattttaataatttcagacatctgcatttttattgaacagttgactgtatctgacccatcatactactatacttctgggttgaacagaattatttatgcagaataattcaattgaatatccatcacttaaatacagtgacaggacagcaacttcagggatctgtaaagatcatttaaatggagtgctcatctcattgaggagcagattaattttgcgtaagtactttgattatttaatatttgtaagaaaaaactttcattttcctacagaggaaaatagaacaattttagaagcaaggaacaatctcttttctaagtcttggaagctgtcagtgttgaggatgtaatctcctttgccatctttaattcacctaacttacactaggtgttctcttactgtctttaaaagcttcctgtattttattagtggtccttgaaaaactgtgaatgtttgggaattggtagaaaggcaaaaagtaggatattttgacctgactggaaagatggttgtgtttttattgccaggtaataagtgtgatcattgttgaacttcagctccagtgtctctccagaataagacattggcattcaaatgtctatatcttgttacttacaaaataaaaaacagattaattagtggcttttaaattgtagttatatcagtgtatatacacgaggggaactgtataaagacatactaaagggaacagattaaaataagtattattaataaaatttggtgtgccagactgactacttcccttgctaatcacagagattagtaatgattaaattaatatcttcaggaatattttgggatagggttgccttaaaacattttacttggcttattcaatttctaaagcacttacgttgtgccaggttccactcaagtaaattatctctgccttcaaggagcttgcagtatagtgagaaaagcctgccaagtaaatcagcaggtatactaaataggtagtcatttaggcactcaataaatgttgactaatttttccagtttcctattactgaggaaaacctccatacactgaggcagaaacttgtgtcagttggaggaaaatagacttgagtagtctttggtccaggtaaaatgggtcagtgacactgaaacagtagagtaggagtcaaaaaaccttttctgtgaagtgctagaacattttagactttgttggctatggtctgtattgcaactatagtacacaactctgccgttgatagtgtgtaaggagccatatacaatatgtaaacaaatcaacatgactgtgtttcaacaaggcctgatttgttaagtttcatatatagtcatatgtcacttaatgacagggatatgttctgagacatgtcacttggcaatttcatcattgtgtgaaaatcatgatgtagttacacaaacctagatggtataccctatggtatcctatatgggatagcctattgctcctaacctacaaacctgtatggcatattactgtactgattactgtaggcggttgtaacacagtgctaagtatttgtgtatctaaacatatctaaacatagaaaaggtacagtaaaaatatatatatagatatatataagatataaaatggtacacctatttaggacatttaccatgaacaagttggcaggactggaagctggctctgggtgagtcagtaagtggttagtgaatgtgaaggccatgatattactgtgcactactgtagacttttataaacactatatacttaggctacataaagtaatttcactatgatgttaccatggctgtgtccccaggcaataggaatttttcagctccattgtaatcttacgggatcatcatcgtatatttggccattgttgaccaaaagttatgcagcacatcattataattttgatgtgtcacaaaacattactcatttgatttcccccacccccgccaaccatttaaaaaagtttgccggctaggtgcggtggctcatgcctgtaatcctagcattttgggaggacgaggcgggtggatcactcgatgtcaggagtttgagaccagcctggccaacatggtaaaacgccgtctctactaaaaatacaaaaacttagctgggtgtaacggcggatgcctgtaatcccagctacttgggaggctgaggcaggagaatcgcttgaacctgggaggcggaagttgcagtgagccgagattgcaccactgcagttcagcctggatgatgagagtgagactccatcgcaaaaaaaaaaaaaaaaaaagaaaagaaaattagccaggtgtggtggcaagtgcctttaatcccacctcaggaggctgaggcaggagaatcgcttgaacctgggaggcagaggttgcagtgagccaagatcgcgccactgcactccagcctgggtgacagaacaagactgtctcaaaaaaaaaaaaagagaagaaaaactgcctacaggccatagttaacctgcaatagagaagaaagggaagtagggcagtgcatgactggccttaggttttttctttccaagtttattttcttgtgcttcagctactagaaaggtttaattcagggataagtcccaattgagtagttcaagatgatcagagactttgctattttcccctaagttctattccataatctaaaatgttctgtttctagtgccagttcttatgctaagcaggttacgtggaatatatcacttaactcaaaaagccctgttaagccaggactgttatctccatttaacagatgagaaaatggaggtttatggtctgttctcacactgctacgaagaaataccccaaactgggtaattattataaaggaaagaggtttaatggactcagttccgcattgctggtgaggcctcaggacacttacacaatcatggcagaaaaaggagaagcaggcacctttttcacagggcggcaggatgaaaatgactgccagcagtggaaatgccagacgcttataaaaccttcagatctcatgagaccggctcactatcacaggaacagcatggaggaaaccgcccccatgatccagttacctccacctggtcccacccttgacacgtggggattgctacaattcaaggttagatttgggtgaggacacagagccataccatatcagcccagatcaagtagtgacagagtagggatttgaatacaggttatagtcactattgtgttatttcttgacttttgtactattaaaaaactgtagccagtgaggcttctacccttagtacccagaactccttttaggtatagcaattgtttttaggtaaatttatattgagtttaacacctgtgtgattaaagacaactttccaatgtagtatctgtagccatgtcccctaatggctattagtgttcatggttagtgtgttgaagatgagccaggtacataacgcggcacattttctgcaggtcagcagtaaggtttcaaggtacagttatggaggaaagaagaaaatgacacattgataacacaggtctttattcccttttgaatgagacagtttttaaaagttgatttataaatacaaaaatacattctccaaagatagtatttccaaactgttatatacccatctactcccaacatggatataagttttttaaaaaaatagttgtatataacatacatatctgccccagtgttacttcacaggcctatgccctacgggaactccactctcccagccccactttttctcttggttctcccacattcttattctcccacatccctacccacgtttgagctggaaaggatgtccctaccctaggcatgaggtatattttattctgggcaccacacatttgccccatagataacaatacacgtgatgatgtcactagtactacctttctagtatttacatacttaaaagtagtaactagaacagttatcactggaactaagaattttccccacagaggtgaacagaccaagaactaaaatttcaggaaacctgtttaatttcttttgtatctttgaaaagttagttttatatctaagatttcttcacataggttataattcatctgtatgttcaagcttttatgtaaaaatatatagtgccttcagttttaacatagtttcacatgttctcagaactgctaaattcagtgctaccagtaaggcttaataagtagttcattgaccctgtaagataggagcactcagctctgtcacaatttgttgttaaacacatcactcaatgtaagtataaaaatatttattgataaaaaataaacttataattcagcaaaaaaaaaaaaaaaaaaaaaaaaa

SEQ ID NO: 3879 - DNA, 5634 bp, Homo Sapiens
  NM_014956
ttgcgcgctgcagggcaacaccccggcgtccctggaagctgggggagcgggagaaataactttatttggactgagagctggagaatgagaataggacctgagagtatattgggctaaggaggagaggtgtttgagcccagatgagtcatggctggacgacccctccgcataggagatcagctggttctggaagaagattatgatgagacctacattcctagtgagcaagaaattcttgaatttgcccgggagattggtattgatcccatcaaggaaccagaactgatgtggctggcgcgagagggcatcgtggccccactgcctggagagtggaaaccatgccaggacatcacaggtgacatttactatttcaacttcgccaacgggcagtctatgtgggaccatccatgtgacgaacactatcggagcttggtgatccaagagcgggcaaagctgtcaacttctggggccattaagaagaagaaaaaaaaaaaggaaaagaaagacaagaaggacagagacccccccaaaagttcgctggccttgggttcctcattagccccagttcatgttcctcttgggggcctggctcctttacgaggtcttgtggataccccaccctctgctcttcgtggatctcaaagcgtgagcctggggagctcagtggagtctggacgtcagcttggagaactcatgctgccttcacagggtctcaagacctctgcttatacaaagggtctcttgggctccatatatgaggacaagactgctctcagcctcttgggtttaggagaagaaaccaatgaggaggatgaggaggaaagtgacaaccagagtgtccacagctcaagtgagcctcttaggaacctacacctggacattggggcactggggggtgactttgagtatgaggagtctctgagaacaagccagccagaggagaagaaggatgtttctctggattcagatgctgccggtccccctactccctgcaagccctccagcccaggtgcagacagcagtctgagcagtgctgttggcaaagggcgacagggaagtggagcaagacctggtcttccagaaaaagaggaaaatgagaagagtgaacctaagatttgcaggaatctggtgacccccaaggcagaccctacaggcagtgagcctgccaaagcctctgaaaaggaagcaccagaggacacagtagatgcaggagaggagggttccaggagggaagaggcagccaaggagccaaagaagaaggcttctgctctggaagagggcagttcagacgccagccaagaactggaaattagtgaacacatgaaggaaccacagctctcagactccatagcttctgaccccaagtccttccatggcctggacttcggttttcgcagccggatctcggagcacctgctggatgttgatgtgctttccccagtcctgggtggagcttgtcggcaggcccagcaaccactgggaatagaagacaaggatgacagccagtccagccaagatgagctgcagagcaagcagtccaaaggcctggaggagaggttatctcctccacttccacacgaggagcgggcccagagtccccctcgcagcctggccactgaagaagagcctccccagggccccgaggggcagcccgagtggaaggaggcagaggagcttggggaggactctgcagccagcctcagcctgcagctgtccctccagagggagcaggccccaagcccacctgctgcctgtgagaagggcaaggagcagcattcccaggccgaggagctgggccctgggcaggaagaggcagaggatcctgaggagaaggtggcggtcagccccaccccgccagtctctccagaggtgcgatccacagagcctgtggctcccccagagcagctctcagaggctgcactaaaggccatggaagaggcagtggcccaagtactcgagcaagaccagaggcacctgctggaatccaagcaagagaagatgcagcaactgcgggagaagctgtgccaagaggaggaagaggagatcctccggcttcaccagcagaaagagcaatctctcagttccttgagggagcggctgcagaaagccattgaggaggaggaggcccggatgagagaggaggaaagccagaggctatcctggctccgagctcaggtccagtccagcacacaagcagatgaggaccaaatcagggctgagcaagaggcttccctgcagaaactgagagaagagttggagtctcaacagaaggctgagagggccagcttggaacagaaaaataggcaaatgctggagcagctcaaggaagagatagaggcttcggagaagagcgagcaggctgccctgaatgctgcaaaggagaaggctctgcagcagctgagggagcagctggaaggggagaggaaagaagctgtggcaacgctggagaaggagcacagtgctgagctggagcggctctgctcctcattggaggccaagcaccgggaggtggtctccagcctccagaagaagatacaggaagctcaacagaaagaggaggcccagctgcagaagtgccttgggcaagtggagcacagagttcaccagaagtcttatcacgtggctgggtatgagcacgagctcagcagtctcctgcgagagaagcgccaggaagtggaaggggagcatgagaggaggttggacaagatgaaggaggagcaccagcaagtgatggctaaggccagagagcagtatgaagctgaggagaggaagcagcgggctgagcttctggggcacctgaccggagagctggagcgcctgcagagggcccatgaacgagaactggagactgtgaggcaggagcaacacaagcgtcttgaggacttgcggcgccggcacagggagcaggaaaggaagctccaggatttagagttggaccttgaaaccagagctaaagatgtcaaggccagattggctctgctggaggtccaggaggagaccgcccggagggagaagcagcagctgcttgatgtgcagaggcaggttgctctgaagagtgaggaagccacagccacccatcagcagctggaggaggcacagaaggagcacacccacctgttgcagtcaaaccagcagctccgagaaattcttgatgagctgcaggcccgcaagctgaagctggagtcccaagtggatctgctgcaggctcagagccagcaactgcagaaacacttcagcagcctggaggctgaagctcaaaagaagcagcacctgttgagagaagtgacagttgaggaaaataatgcttccccacattttgagccagatctccatattgaggacctgaggaaatcccttggaacaaaccagaccaaagaggtgtcttcttctctctcccagagcaaggaggacttatacttggacagcctgtcctcccacaatgtctggcacctcctctctgctgagggggtagccctccgtagtgccaaggagttccttgtgcagcagacacgctccatgcggaggcggcagacagctctgaaagctgcccagcagcattggcgccatgagctggccagtgcgcaggaggtggccaaagacccaccaggcatcaaggccctggaagatatgcgcaagaacctggagaaggagaccaggcacctggatgagatgaagtcggccatgcggaaaggccacaacctgctgaagaagaaagaggagaagctgaatcagttggagtcctctctttgggaagaggcctcagatgagggcactctgggaggatcccccaccaagaaggcagtaaccttcgacctcagtgacatggacagcctgagcagtgaaagttctgaatctttttccccgcctcaccgtgagtggtggcggcagcagaggatcgactcaaccccgagtctcacctcccgcaagatccacgggcttagccactccctccggcagatcagcagccagctgagcagtgtcctcagcatcctggacagcctcaaccctcagtcgccgccgccgctcctcgcctccatgccagcccagctccctccccgggaccctaagagcacccccacccccacctactatggctccctggccaggttctcagccttatcatctgctacacccacgtccacccaatgggcctgggattcagggcaggggcccaggctcccctcctctgtggctcaaacggtggacgacttcctgttggagaagtggcgcaagtattttccatctggcatcccgctgctcagcaacagccccaccccgctggagagcaggctgggttacatgtctgccagtgagcagctccggctcctacagcactcccattcgcaagtccctgaggcgggcagcaccacctttcagggcataattgaggccaaccggaggtggctggaacgtgtcaagaatgaccccaggttacctctcttctcgtcaacacccaagccaaaagctactttgagcctcctgcagctgggccttgatgagcacaacagagtgaaggtgtatcgcttctgaggccctgagcaggggcttggggcagcccagcctctcctccacccagaccaagtgcctgaggagctgcctgccttcttccatctgagaaagcaccctccttccccctttgacttgcaggagccaccagggaccagggggttgagtggaacagtaaagccacacattctgtgactatataacctatctcaggctaaaatgtgtggactcgtacgagctcttgtcattgacatggcaagctgatggcgtgcggtggctgcggggtatcagggccgggagccctttgggaggaagggaggcgttagaggagctgccttcggaggctcagggagtccctttggagctggttgtttccttggccctgcagcgcactgctcggggctcccaaggaggttgtgtgtatggttcttaattcatcaggacaaagacccccagcatgtgtgtaccctgggacccgatttctctgggcccacatctatctccaatacctcagcctcagatcagaccctttcttttttgtctttcttctcttaatttttaaatgcctcttttcttgagcattccatctctctttttgaccctctcaggactgggcttagctgtccagagccctgccggagggtgctgggggctgtccctctgcaggcactgtgttttcctcaggggctgtcctcagaacacccctcctgctccctggggctcctcagggagccatttcagctggagtctcaggtctcaaaaacaacttctccaggaggccaaaaaaagactgggttggcttctggtcctcatgatggcttttatcctcctgggacactttgggtatattcatgggcattgtttccatctgtcttttctacctgtgccacccctgccctgattccacggctgcctcaggcaggcaggcaaggagctaggccggtgcccggccctggcagcaaggggtctttgtgcagttggagatgctgccgttgtggcagagcgtcctgcagccccgcttccatcagcaggctctggggtgggggctttgcaggggatgctctctgatgtttgttccgttgtttaaataaaatgcacttatttttgtttttttttttgcaaaaaaaa

SEQ ID NO: 3880 - DNA, 5458 bp, Homo Sapiens
  NM_014957
ggcggcgcggctggtccccaggggtctgcgggcgactgcgcggctgaggcgcccgagtgcggtactggcggcgggcggcgggcagccatggcggaggccgcgtcgccgcacttgtcgctgccctcggggctgctggagctctgcgcgctgctgggcgccccccgggacagtctccgaagtctcgagcagaggtcctgtccattttcgtgcctccttttatcagtaaagaggacagtcaaacggccggtgccaactgcggcactctcggtaaaacccggatgcgctccttgagaaagaagagagagaagcccagaccagagcagtggaagggcctcccggggccccccagagcgccagagcctgaggatgtcgccgtcccgggcggcgtggacctcctcaccctgccgcagctgtgcttcccagggggtgtgtgcgtggccactgaacctaaggaggattgcgtccacttcctggtgctgaccgatgtctgcgggaataggacctatggcgtggtggcccagtactaccggcccctgcatgatgagtactgtttctacaatggcaaaacgcaccgggagtgtcctggctgcttcgtgcccttcgcggtgtgcgtggtctccaggtttccctattacaactccctcaaggactgcctttcctgtttattggctcttctgaagccctgtaaagattttgaagtggacagtcatataaaagatttcgctgcgaagctgtctttaatacccagcccgccacctggaccgctccatttggtatttaacatgaagtcgctccagattgtgttacctgcccgagcagaccccgaaagccccatcctggacctggaccttcacctgcccttgctgtgcttcaggcctgagaaggtgctacagatcctgacatgcatcctgacggaacagcggatcgtcttcttctcctcggactgggctctgctgacgctggtcactgagtgcttcatggcctacctgtatccgctgcagtggcagcaccccttcgtgcccatcctgtcggaccagatgctggatttcgtcatggcccccacgtccttcctgatgggctgccatctcgaccacttcgaagaagtcagcaaggaagccgacggtttagttctgataaatattgatcatgggagcatcacctactccaagtccacggacgataacgtggacattcctgatgtccccctcctggcagcccagacgtttattcagagggtgcagagcctccagctccaccatgagctgcacgccgcccacctcctctccagcacagacctgaaggagggccgagcccaccggcggtcctggcagcagaaactcaactgccagatacagcagaccaccctgcagctgctcgtgagcatcttcagggatgtaaagaatcatttaaactatgaacacagagtctttaatagtgaagaatttctcaaaaccagggctccaggggaccatcagttttataagcaggtcttagacacctacatgttccattcttttcttaaagcccggctcaataggaggatggacgcctttgctcagatggacctcgacacccagtcggaggaggacagaataaatggaatgcttctaagtccaaggagaccgaccgttgagaaaagagcctcccggaagtcctcgcacctgcatgtcacccacaggcgcatggtggtcagcatgcccaacctgcaggacattgccatgcctgagctggcacccaggaactcctcgctccggctgacggacaccgcaggctgtaggggcagcagcgcagttctgaatgtcacgccgaagtccccgtatacattcaagattcccgaaatccactttccgctggagagcaagtgcgtgcaggcataccatgcccactttgtctccatgctgagcgaggccatgtgctttctggcccccgataactctctgctcctggcccgctatttgtacctccgagggctcgtttatctgatgcagggacagctgctgaacgccctcttggacttccagaatctgtataaaacagacatacggatctttcccactgatttggtgaagaggacggtggaatccatgtctgcccctgagtgggagggggctgagcaggcgccggagctgatgaggctcatcagcgagatcctggacaagccgcacgaggcctcgaagctggacgaccacgtgaagaagttcaagctgcccaagaagcacatgcagctgggcgacttcatgaagcgggtccaggagtcagggatcgtgaaggacgccagcatcatacaccggctgttcgaggccttgactgtaggacaggagaaacaaatcgacccagaaacattcaaagatttctacaactgctggaaggagacggaagcagaagcccaggaggtcagtctgccgtggctggtgatggaacacctggataaaaacgagtgtgtgtgtaagttgtccagctccgtcaagacaaacctaggcgttggcaagatcgccatgacccagaagcgcctgttcctcctaaccgaaggaaggccaggctacttggagatttccaccttcagaaatatagaggaggtcaggagaaccactactacatttctacttcggagaatacccactttaaaaatcagagtggcgtccaagaaagaagtcttcgaagccaacctgaaaaccgagtgtgacctttggcacctgatggtgaaggagatgtgggctgggaagaagctggccgatgaccacaaggaccctcactacgtccagcaggcgctgaccaacgtcttgctgatggacgccgtcgtgggcacactgcagtcaccaggcgccatctacgctgcctccaagttatcctactttgataagatgagtaacgaaatgcccatgacgcttccggagacaaccctggaaacactgaagcataaaatcaacccctcggcgggggaggcgttcccacaagcggtggacgtgctgctctacactccagggcatcttgacccagccgaaaaagttgaagatgctcaccccaagttatggtgtgctctgagcgaaggcaaggtgaccgtgttcaatgcttcttcatggaccatccaccagcactcctttaaagtgggcactgcaaaagtgaactgcatggtgatggccgaccagaaccaggtgtgggttggctcggaagactccgtcatctacatcatcaacgtccacagcatgtcctgcaacaagcagctcacagcccactgctccagtgtcacggatttgattgtgcaggacggacaggaggcacccagcaacgtgtactcgtgcagcatggacggcatggtgctggtgtggaatgtgagcacactgcaggtgaccagccgcttccagctgccgcgaggtggcctgacgtccatcagactgcacggcggccgcctgtggtgctgcacaggtaacagcatcatggtcatgaaaatgaatggatccctccatcaagaattgaagattgaggagaacttcaaagacaccagtacctccttcctggccttccagctccttcctgaggaggagcagctgtgggcggcctgtgcaggacgcagcgaggtttacatctggagcctgaaggacctggcccagcccccgcagagggtgcccctcgaggactgctctgagatcaactgcatgatccgggtgaagaagcaggtctgggtgggcagccgagggctggggcagggaacacccaaggggaaaatctacgtgattgacgccgagaggaagaccgtggagaaggagctggtggcgcacatggacaccgtgaggacgctgtgctcggctgaggacagatacgtgctgagtgggtcgggcagggaggaggggaaagtcgccatttggaaaggcgaataaacgtggctgagtctgccaagtggaactgtgccctatgtgtggggactggctgccccctagagcctgccaggagcagaagcctggaggggtggcagggcagagcagcccaggctcagcatggagcccacttaccgtgtggccagccgcgagacccatggccacgcaccttctctcaggccttcgggccccctggttaaactgcaccaagggtgtttcctgttggggtgtgtctcaggcaggcagctgcgtcttgttggtgataacctctgctgggaggttactttgttgcctagaaagttctggaatccacaaccaggggctggcactggagccagcagcttggccgagtcacaggtgacccgtggccctcacgtctctggttttacctttccttacttcattcattcactcacccagtccttacgaatcaccgaggaacactgggctgagcacatgacagggagcctggagccccggggcctccagcgaggcctgagaagggtggttcgggtaaccactgtgggctctctcccatcacagaaggtggacagggcctacccaggtggaggggaccaccctgcgatcaggtgtttgcgacaggggttgggccagctgaggcaagctgtcttttttcccttttctttttaatagatgcaacatttttataataatcctagagaccttttttctaccaaagatcacagaccagaaaaagttccatctaaaatatcatgcccaggaaagcacatgggatcaaaagtaaaatagcatcatgtgtgatctcgtcttccagcgtgccgctcagttccccgaatccgtgtgcacacgtgtgatctcgtcttcagtgtgccgctcagttccctgaatccgtgtgcacactgcgtatgtgtacgcgcagcatgctatactgaactcaacaagatcttggctgtacataaatatttgtaaaagagaccctttgcacctttttactgtaatgttgagacttcattacttaaatgttctacggaaggttctggtgtggttgttggagccggagggagcgtgtcagcacgtgctgagggcatggggcctgccccctgggcacccatccacaagctgggccacggagctccagcttctcaggacaaagccccggggctggcgcatcctgagggtctctgggggtgtttgccaggctcctgggatgggccgctttcagaagccctgcagtgcctccagatggaaaggcgggcccggcctccggttgggtctgcattttggagagtccacaccacggaccaggttttcccccaaggcttggctttgtgtagctactaacttcttggggcattctgagagtgtgggcagagagaattatgtggcctcatcctcccccaaggctgtgcttgcagcccgggcaccttcccactttctagctctggagaggttggattttgcttttgtaaacacatgaatccttatgataaaagtctgtcagtcaaaaatacatttataaattatttaatgccagtcctcatgtaacctcaggtatcttcagcttgtggagaataaatctggtttaataaaaaaaaaaaaaaaaa

SEQ ID NO: 3881 - DNA, 4948 bp, Homo Sapiens
  NM_014963
gtgcgcggggcccccaagatggcgcccgaaacccggaagtgagcggcggcagctgcgaggctcggagaaacaggcgccgcgggctccgcgcccggccggacccgggcccgagatcatgatgctgccgccaccgccgccaccacggagcgagaagcccagatagacgccccggcggccccgggtcctggagtcccgccgcctgctgcccggccgaggaccccaccccgcctgccgcccgatgcttgcagtggggcccgccatggacagggattacccgcagcatgaacccccgccggcgggcagcctcctgtacagcccgccgcccctgcagagcgccatgctgcactgcccctactggaacaccttctcgctgccgccataccctgccttctccagcgacagccgcccgttcatgagctccgcctccttcctcggcagccagccctgcccagacaccagctatgcccccgtggccaccgcctccagcttgccaccaaagacctgcgactttgctcaggactcctcctattttgaggacttctccaacatctccatcttctcctcgtccgtggactccctgtcggacatcgtggacacgcccgacttcctgccggctgacagcctcaaccaggtgtccaccatctgggacgataaccctgccccctccacccacgataagctgttccagctcagcaggccgtttgcaggcttcgaggactttctgccctcccacagcaccccgcttctcgtcagctaccaggagcagagtgtgcagagccagccagaggaggaggacgaggctgaggaggaggaggcggaggagctggggcacacagagacctacgccgactacgtgccgtccaagtccaagatcgggaagcagcacccagaccgcgtggtggagaccagcacactgtccagcgtcccacccccagacatcacctacaccctggccctgccctcggacagcggggccctgtctgccctgcagctagaggccatcacctacgcctgccagcaacacgaggtcctgctccccagcgggcagcgcgcgggctttctcatcggcgatggggccggcgtgggcaaaggccggacggtggccggagtcatcctggagaaccacctgcgcggccggaagaaagcattgtggttcagcgtctccaacgacctcaagtacgatgcggagcgcgacctgcgggacatcgaagccacgggcatcgcggtgcacgcgctcagcaagatcaagtacggtgacaccactacctcagagggcgtcctcttcgccacctactccgccctgattggggagagccaggccggcggccagcaccgcactcgcctccggcagatcctggactggtgtggggaggccttcgagggcgtcatcgtgttcgacgagtgtcacaaagccaagaatgccggctccaccaagatgggcaaggctgtgctagacctgcagaacaagctgcccctggcccgcgtggtctacgccagcgccacaggtgcctctgagcctcggaacatgatctacatgagccgcttgggtatctggggcgagggcacacccttccggaactttgaggagttcctgcacgccatcgagaagaggggcgttggcgccatggagatcgtggccatggacatgaaggtcagcggcatgtacatcgcacgccagctcagcttctccggcgtcaccttccgcatcgaggagatcccgctggccccagccttcgagtgcgtctacaaccgcgcggccctgctgtgggccgaggccctgaacgtgttccagcaggcggccgactggatcggcctggagtcgcgcaagtccctgtggggccagttctggtcggcacaccagcgcttcttcaagtatctgtgcatcgcagccaaggtgcgccggctggtggagctggcccgagaggagctggcgcgagacaagtgcgtggtcatcgggctgcagtccacgggcgaggcgcgcacgcgggaggtgctgggggagaacgatgggcacctcaactgcttcgtctcggccgctgaaggcgtgttcctgtcgctaattcagaagcactttccgtccaccaagagaaagcgggacagaggagcgggcagcaagcggaaacggcgacctcggggacgcggggccaaagccccccggctggcgtgcgagacagcgggcgtcatccgcatcagtgacgacagcagcacggagtcggaccctggcctggacagcgacttcaactcctcccccgagtccctggtggatgacgacgttgtcatcgttgatgcagtcgggctccccagtgacgaccggggacccctgtgcctcctgcagagagacccgcatggccccggggtcctggagcgggtggagcggctgaagcaggatctgctggacaaagtgcggcggctgggccgggaactgccagtcaacaccctggacgagctcatcgaccagctgggcggcccccagcgggtggcggagatgaccggcaggaaaggccgcgtggtgtccaggcccgacgggacggtggccttcgagtcgcgggcagagcagggtctgtccatcgaccacgtgaacctcagggagaagcagcgcttcatgagcggcgagaagctcgtggccatcatctcggaggcctccagctcgggtgtctccctccaagccgaccgccgtgtccagaaccagcggcgccgcgtgcacatgaccttggagctgccgtggagcgccgaccgcgccatccagcagttcggccgcacccaccggtccaaccaggtctccgcgccagagtatgtcttcctcatctcggagctggccggggagcgccggttcgcctccatcgtggccaagcgcctggagagtctgggggccctgacccacggagaccgccgcgccacggagtcccgtgacctcagcaagtacaactttgagaacaagtatggcacccgggccctgcactgtgtcctcaccaccatcctgagccagactgagaacaaagtgcctgtgccccagggataccctggaggggtccccaccttcttccgggacatgaagcagggcctgctgtctgtgggcattggtggccgggagtcccggaatggctgcctggacgtggagaaggactgttccatcaccaagttcctgaaccgcatcctggggctggaggtgcacaagcagaacgccctgttccagtacttctcagacaccttcgaccacctcatcgagatggacaagcgggagggcaaatacgacatgggcatcctggaccttgctcccggtatcgaggagatctacgaggagagccagcaggtgttcctggctcccgggcacccgcaggacgggcaggtggtcttctacaagatcagcgtggaccgcggcctgaagtgggaggacgcctttgccaagtcgctggcgctgacgggcccctatgacggcttctacctctcctacaaggtccgcggtaacaagcccagctgcctgctggcggagcagaaccgcggccagttcttcacggtgtacaagcccaacatcggccggcagagccagctggaggccctggacagcctccgccgcaagttccaccgggtcaccgcggaggaggccaaggagccctgggagagtggctacgctttgtcgctgacgcactgcagccacagcgcctggaaccggcactgccggctggcgcaggagggtaaggactgcctgcaggggctgcggctgcggcaccactacatgctgtgcggcgcgctgctgcgcgtgtggggccgcatcgccgccgtcatggccgacgtcagcagcagcagctacctgcagatcgtgcggctgaagaccaaggacaggaagaagcaagtgggcatcaagatccccgagggctgcgtgcgccgggtgctgcaggagctgcggctgatggatgcggacgtgaagcgcaggcaggcgcccgccctgggctgccccgccccgcccgccccgcgcccgctggcgctgccttgcggccccggagaggtgctggacctcacctacagccccccggccgaggccttcccgccgcccccgcacttctctttcccggcgccgctgtccctggacgccggccccggcgtcgtgccgctgggcacccccgacgcccaggccgaccctgcggccctcgcgcaccagggctgcgacatcaacttcaaggaggtgctggaggacatgctgcgctcgctgcacgcggggccgccctccgagggcgcgctgggggagggcgcgggggcggggggcgcggcgggcggtggtcccgagcggcagagcgtgatccagttcagcccacccttccccggcgcccaggctcctctctgacacgcctttaggcgaaacatgccccaagacacagggaccgtttctcccctaggagcagcggtggggagcagggccaaggtcccctgaccactgctcagaggagccctaggccctggccgcagtgccttcagcgcccgacccgggcccccacctggtcagccctggcggggcccactcaggacagctgggggccggggcgtggcagggccctctctgtgcctctcctcccaagtaggaaggggctccgggtggctgctctgggactgggcacccacaagggctcagtgggcccaaacccttgaaatccgtgaaaccgggtggtcccaagagctagaaactcaggaaaccccaggtgctcagggccccgcgtctcgggggctccgtggggcagacccctgctaatatatgcaattctccctcccccagcccttccctgacccctaagttattgcccgctcacctctcccaggccccaggccgcggagctggcagggtggcgcctgcggtttctatgtatttatagcaagttctgatgtacatatgtaaaggacttttttaaatatatgtgccttttgcctacttcccaaaaaaaaaaaaaaaaaaaaaaaa

SEQ ID NO: 3882 - DNA, 4630 bp, Homo Sapiens
  NM_014965
gggtgatgctgggccaggagctttgtgtacacccctccacttcagctgagccagggcatgtctgcggcccaggccagggcgcagtgtgtgccctgggggcccaggcctgcatggctcctctgggtagggggtcgggggcacccccaaggatggtcccttagggtgatgttttggctttggggtgacttcagcaatgtccctgcgagacaagggcggggaagaagaatgttttgaatacgactgccaggatgaagagaggaagccaacccacaggcagcatgacacccaggacctcttggaagaggttttatgtgctgaaagagttggccagatgactaagacatataatgacatagatgctgtcactcggcttcttgaggagaaagagcgggatttagaattggccgctcgcatcggccagtcgttgttgaagaagaacaagaccctaaccgagaggaacgagctgctggaggagcaggtggaacacatcagggaggaggtgtctcagctccggcatgagctgtccatgaaggatgagctgcttcagttctacaccagcgctgcggaggagagtgagcccgagtccgtttgctcaaccccgttgaagaggaatgagtcgtcctcctcagtccagaattactttcatttggattctcttcaaaagaagctgaaagaccttgaagaggagaatgttgtacttcgatccgaggccagccagctgaagacagagaccatcacctatgaggagaaggagcagcagctggtcaatgactgcgtgaaggagctgagggatgccaatgtccagattgctagtatctcagaggaactggccaagaagacggaagatgctgcccgccagcaagaggagatcacacacctgctatcgcaaatagttgatttgcagaaaaaggcaaaagcttgcgcagtggaaaatgaagaacttgtccagcatctgggggctgctaaggatgcccagcggcagctcacagccgagctgcgtgagctggaggacaagtacgcagagtgcatggagatgctgcatgaggcgcaggaggagctgaagaacctccggaacaaaaccatgcccaataccacgtctcggcgctaccactcactgggcctgtttcccatggattccttggcagcagagattgagggaacgatgcgcaaggagctgcagttggaagaggccgagtctccagacatcactcaccagaagcgtgtctttgagacagtaagaaacatcaaccaggttgtcaagcagagatctctgaccccttctcccatgaacatccccggctccaaccagtcctcggccatgaactccctcctgtccagctgcgtcagcaccccccggtccagcttctacggcagcgacataggcaacgtcgtcctcgacaacaagaccaacagcatcattctggaaacagaggcagccgacctgggaaacgatgagcggagtaagaagccggggacgccgggcaccccaggctcccacgacctggagacggcgctgaggcggctgtccctgcgccgggagaactacctctcggagaggaggttctttgaggaggagcaagagaggaagctccaggagctggcggagaagggcgagctgcgcagcggctccctcacacccactgagagcatcatgtccctgggcacgcactcccgcttctccgagttcaccggcttctctggcatgtccttcagcagccgctcctacctgcctgagaagctccagatcgtgaagccgctggaaggttccgccacacttcaccactggcagcagttggcccaacctcaccttgggggcatcctggacccccggcccggtgtggtcaccaagggcttccggacgctggatgttgacctggacgaagtgtactgccttaacgactttgaagaagatgacacaggtgaccacatttctctcccacgcctagctacctccactccagttcagcacccagagacctcaggtgagaggtcccaagcacgtgtgactgtctcaggcagcagaagttacccgagccggcctcaggcttccccagaggagatgcaggagccgccagcggccacggaggaggaggaggaggaggaggaggaggaggggtctggtgagggcaccacgataagtcctgtaaacttggcacctttcccggaggcagagttttgggccattctcacctctgttccaggcaccatccgtagtggttctctgtctgtagcttccgctcgtctgtgtgggtgatgattaaagcattctcattgcacagttctgtttttaaatacagagtctgatgcctcctatttgtaacaatgggtgtagctcccctgcccatcttggaggtgcatggcccatcagggatctttaaagtgggagcaggaaaggctgctaaaaaaaaaaaaaaaaaaaaaagtgggcttttgggtccctgaaaacatcagtgcccttcttcctggtctgggtgtctccctgagtctaaggggaagattctcaagtcccctggtgatttccaagtggagctgagcagttttagggaaattgagtgctgggtcattcagaaggtaaatgagatcatctgttacctgtacgctgtattaaaatagaaccaggaaaggctcaggatttcagacatttcatcagccttttcactttcccagcttcaatggaggtatatatgtcattttcttttcagcttacacatgtgttcaaagtggatttttaaaaagtgttttagcaatactccttaaccaaataaaccttcggagaacgtcactaagcttttccagagagaagaccctagatgaagttggaaaagagctctggctgactccacccactgtccccaagcattaaaggtgtggccatgagtttacagaattacccacattccagttgccactgggatgaaaagctttgtgctcagagctctgggaatcatgggatcacatggttactgtttaccccaacagcatgctctgtctagactggacctcccagccccttgtgttgggaaggcaaagcttttgtggagtcaggggggagactgagaaaaaatgaattaaccctgtgttgtcatcctcatgacattcctgaggattcaccaggttagaagtgaggacgtttatctttgtgattcataattttcatttgtgaaggccacaacactccccttgaaatacagggcaggaaagagctgaggttcttggtggtgtctcccattcccctggctaatttcagacagctgtggtcaagggattttacttgggatcaacttttccttttttccttgacattaattttagagaagtcatcaagtcatgtgatttgtttagcacataggtttatttatggtttgattttttttaggcagttatattactagattaagcttgtgagggaatgaaaatgttttttatttgttatctacacactcgaaaaagagaaaccagctgcggtactgtcccatttttgtcatcagcaccagtgtccgtcaggaaggcaggtggtggtgcagaaacatgatgcctggctgattttcgtggctaaaggggtaggccttatgttgattgggatgctcccctacagccttacaggtagaatagaaggtgagttctggaagtgcaaagaagcaccattaagtgcatcttctagaagttgtacagaaggactaaagcttatcaagtcaacaaagaacttaccttggaggatagagagagagaagggaccaattatgaggactgacatcctggccactctccttaaaataaacactgacatttttcttgcttgttctctctgtactcaaacctgtggcaaattcatcctagcaacgttatttgacgaggggcatgaacatttatagttgaaactgtagaaagggtcaggttggaggtgtgtaataaaaaagaattacctaggttgccaaaggtaatttaggaagggtctgatcatttagatgagagttctttggggcttattttctgggtaaggctcatctttaaaaactggcttcagaggggagaggggagaacaatgaattggctctattttctctattgggaattacaggaccattttgattcttagaatgtaaaaagcatatcgctaagtaaatcatcctggaggtcccaagtagctctatgcctgcaatcatggagacacaggcagacagataagcttcatggggaaggcatggggcatcctctgtcttgggatttgtatccatggtggtctggtccctgccttttaatccgtcctctacgcttgggcttttctgttaccaaacagcactatcccaggaactattgtctgcctgggaacactcagtagggagacactttggagacaggaggtgatgaacctttttatgtgcagctggtatgatagaaggaaattgggaaaacttgtatgctaggcacttttgtccagagcctgctgtcccatggagaaaaagttttaagcactgaaaaaatttgattaatgtatttaaatgtattatttgaagcatcattcacttgttgatttttacaatcccatgtcttaaaaaggatgaatccatgttattgtattgtaaataatttagatgattaaaatggattgtttaaaaaaaaaaaaaaaaaa

SEQ ID NO: 3883 - DNA, 4133 bp, Homo Sapiens
  NM_014966
ccgcctgcaccgccgccgcgccccattgggccgggtgctggggcatcccgggcgctgggtgccccgagcggctacgacgagtcccaggtggggccgggctccaggcccgcgggggagcggagccgtgcgccgcaggcgggctccgtgacgccgggtggggaacgccgggccggtggcgggacttccgccacgggactcggaaggggccgcgccgccgctgctgggagttgtagtccggccgtggttgggggagccgcggctcatgcgcggtgcacagaggcttgtttcacatctgtaacaacaggaggaggcccagcctcgtgatgaggaatagcaaggagagaattcagctccagttcaaaagcctacaaaatctgagactgtcattgcttttataaggattccagctttccctcctggccagaaatgttcagcctggactcattcagaaaagatcgggcccagcacaggcagcgtcagtgcaaacttcccccaccccgccttccacccatgtgtgtcaaccctaccccaggagggaccatctctcgaggctgaacgttaacatttccaacatggcagcttctagggacctattaaaagagttcccacagcccaaaaatcttctcaacagtgtgattggaagagccctcggcatctcacatgcaaaagacaaactagtctacgtgcacacaaatggaccgaagaaaaagaaagtcacactgcacataaaatggcccaagagcgtggaggtagaaggctatggcagcaagaagatcgatgctgagcggcaggctgcagctgcagcctgccagctgttcaagggttggggtctgctaggtccccggaatgagttgtttgacgcagccaaataccgagtgctagctgatcgctttggctcccctgccgacagctggtggcgtccggaacccaccatgccccctacttcctggcggcagctgaatccagagagtattcgaccagggggacctgggggcctatcccgctctttaggccgggaagaagaggaggacgaggaggaagagctagaagaagggaccatagatgttaccgacttcttgtccatgacccagcaggattcccacgctccactcagggactcaagggggagttcctttgagatgacagatgacgacagtgccattagggctctgacccagtttccacttcccaagaaccttctggccaaggtgattcagattgcaacgtcatcctccacagctaagaacctcatgcagttccatactgtgggcaccaagaccaagctgtctacactcaccctgctctggccctgccccatgacctttgttgccaaagggcgccgcaaagcagaggctgagaataaggcggcagccttggcctgcaagaaactgaagagcctgggcctggtggacaggaacaacgaaccgcttacacacgccatgtataacctggcctctttgcgtgagctgggtgagacccagcgccgaccatgcaccatccaggtgcccgagcccatcctccgcaagatagagaccttcctgaaccattaccctgtggagagttcatggatcgccccagaactccggctgcagagtgatgacatcttgcccttgggcaaggactcagggcctctgagtgaccctatcacaggcaagccctatgtgcccctgttggaagcagaggaggtacgtctcagccagagtctgctagaactgtggcggcggcgagggccggtctggcaggaggccccccagctacctgtggacccacatcgggacaccatcctcaacgccattgagcagcacccggtggtggtcatctctggggacacgggctgtgggaagaccacgcgcatcccccagctgttgctggagcgctatgtgaccgagggccgaggtgcccgctgcaatgttatcatcacccaacctcgccgcatctctgctgtgtctgtggcacagcgggtcagccacgaactgggcccctccctgcgccggaatgtgggcttccaggtgcggttggaaagtaagcccccatcccgaggcggggccctgctcttctgcactgtgggtatcctgctgcgtaagctgcagagcaaccccagcctggagggcgtgagccacgtcatcgtggatgaggtgcatgagcgggacgtgaacacagactttctgctgatcctgctcaagggcctgcagcggctcaacccggccctgcggctggtgctcatgagtgccacaggggacaatgagcgcttctcccgatactttggtggctgccccgtcatcaaggtgcctggcttcatgtacccagtcaaggagcactacctagaggacatcctggccaagttgggcaagcaccagtacctgcaccggcaccggcaccatgagtctgaggatgaatgcgcactcgatttggaccttgtgactgatctggttctgcacatcgatgctcgcggggaaccaggtgggatcctgtgcttcctgcctgggtggcaggagatcaaaggagtgcagcagcgcctccaggaggccctgggcatgcacgagagcaagtacctcatcctgccagtgcactccaacatccccatgatggatcagaaggccatattccagcagcctccagttggggtgcgcaagattgtcttggccaccaacattgctgagacttccatcacaatcaatgacatcgtgcatgtggtggacagtgggctgcacaaggaagaacgctatgacctgaagaccaaggtgtcctgcctggagacagtgtgggtatcaagagccaatgtgatccagcgccggggccgggcgggccgctgccagtccggctttgcctaccacttgttccctcgaagccggctggagaaaatggtccctttccaagtgccagagatcctgcgcacacctcttgagaacctggtgctgcaagcgaaaatccacatgcctgagaagacggcggtggagttcctgtccaaggctgtggacagtccaaacatcaaggcagtggacgaggctgtgatcttgctccaggagatcggggtgctggaccagcgggagtacctgactaccctggggcagcgcctggctcacatctccaccgacccccggttggccaaggccattgtgttggctgccatcttccgttgcctgcacccactactggtggtcgtttcctgcctcacccgggaccccttcagcagcagcctacagaaccgggcagaggtggacaaggtgaaagcactgttgagccatgacagcggcagtgaccacctggcctttgtgcgggctgtcgccggctgggaggaggtgctgcgttggcaggaccgcagctcccgggagaattacctggaggaaaacctgctgtacgcacccagcctgcgcttcatccacggactcatcaagcagttctcagagaacatttatgaggccttcctggtggggaagccctcggactgcaccctggcctccgcccagtgcaacgagtacagtgaggaggaggagctggtgaagggcgtgctgatggccggcctctaccccaacctcatccaggtgaggcagggcaaggtcacccggcaggggaagttcaagcccaacagcgtcacatataggaccaaatcaggcaacatcctgctgcacaagtcgaccattaacagggaggccacacggttacggagccgatggctgacgtatttcatggcagtcaagtccaatggcagcgtcttcgtccgggactcctctcaggtgcacccgctagctgtgctgctgctgaccgacggggacgtgcacatccgtgatgacgggcgccgggccaccatctcactgagcgacagtgacctgctgcggctggagggtgactcgcgtaccgtgcggctgctgaaggagctgcggcgggccctgggccgcatggtggagcggagcctgcgcagcgagctggctgcacttccccccagcgtacaggaggagcacgggcagctgcttgcgctactggcagagctgctgcgaggaccctgtggcagctttgatgtgcgcaagacagctgacgactgagccctgcttctgctggggctgtgtacagagtgcaaatgtttatttaaaataaagttctatttatcccttgtgaccaaaaaaaaaaaaaaaaaa

SEQ ID NO: 3884 - DNA, 4901 bp, Homo Sapiens
  NM_014967
ggcgcgcggagccaggtgggaggtgcgaggtggccgcgcggggatcttgggtgacagggcaccgagggaaggaggacgcgagggcagccaggccctagggagcagggagagtggctcgggctcagtcgcgtggccccaggaagaagaaattgtcgagacgaataacatgaggtcatatagaatcccacttttggtgatttcaagtcaagaaagtaaaagtaaaccattgctatctttcaccttaaatatcctgtgttttattgctcagaacatccagtttttctaatactcatgatgtcagaagggaaacctcctgacaaaaaaaggcctcgtagaagcttatcaatcagcaagaataagaaaaaagcatctaattctattatttcgtgttttaacaatgcaccacctgctaaacttgcctgccccgtttgcagtaaaatggtgcctagatatgacttaaaccggcaccttgatgaaatgtgtgctaacaatgacttcgttcaagtggatccagggcaggttggcttaataaattcaaatgtgtctatggtagatttaaccagtgttaccttagaagatgtaacacctaagaagtcaccaccaccaaagacaaatttaacccctggccaaagtgattcagcaaaaagggaagtaaagcagaagatcagtccctactttaaaagtaatgatgtggtgtgcaaaaatcaagatgagctgagaaatcgtagtgtgaaagtcatttgtttgggaagcctagcatctaaattgtccagaaaatacgtaaaggctaaaaaatcaatagataaggatgaagaatttgccggttctagtccacagagttccaaatccacagttgttaagagcctgattgataactcttcagaaattgaggacgaggatcaaattttggagaacagttctcaaaaagaaaacgtgtttaaatgtgattctctaaaggaagagtgcattcctgaacatatggtaagaggaagtaaaataatggaagccgaaagccaaaaggctacccgggaatgtgagaaatcagccctcacccctggattctcagataatgcgatcatgttattctcaccagatttcactcttaggaatacattaaagtctacttcagaagacagtcttgtaaagcaagagtgtatcaaagaagtggttgaaaaacgtgaggcatgtcattgtgaagaagtaaaaatgactgttgcttcagaagctaaaatacagctgtcagattcagaggcaaaatctcatagttctgcagatgatgcttctgcatggagtaacatccaagaggctcctctgcaggatgacagttgcttaaacaatgatatccctcacagcattcctttggagcaggggtcaagctgcaatggtcctggtcaaacaaccggtcatccttactaccttcggagtttccttgtggtgctgaaaaccgtacttgagaatgaagatgatatgttgctctttgatgagcaggagaagggaattgtaactaaattttatcagttatcagctactggtcagaagttatatgtaaggctctttcaacgtaaattaagctggattaagatgaccaaattagagtatgaagagattgccttagacttaacacctgtgattgaagaattgacgaatgcaggctttctacagacagaatctgagttgcaagaactctctgaagtgcttgaactcctttctgctcctgaactaaaatccctagccaagaccttccacttggtgaatcccaatggacagaaacagcagctggtggacgcctttctcaaattggccaaacagcgttcagtctgcacttggggcaagaataagcctggaattggtgcagtgattttaaaaagagccaaagccttggctggacagtcagtacgaatctgtaaaggccccagggctgtgttttcccgcatcttgctactgttttcgttgaccgactcaatggaagatgaagacgccgcttgtggaggtcagggacagctttcaacagtcctgttggtcaacctcggccgaatggagtttcctagttacaccatcaatcggaaaacccacatcttccaagacagagatgatcttatcagatatgcagcagccacgcacatgctgagtgacatttcttccgcaatggccaatgggaactgggaagaagctaaggagctcgctcagtgtgcaaaaagggattggaacagactgaaaaaccacccttctctgagatgccacgaagatttaccactcttcctgcggtgtttcactgttgggtggatttatacaaggattttgtctcggtttgtggaaatactgcagagacttcacatgtatgaggaagccgtcagagaacttgaaagccttttgtctcagagaatttattgtcctgacagcagaggccgatggtgggatcgactggcccttaatttacaccagcacttgaagcgcctggaaccgactatcaagtgcatcacagaggggctggcggatccggaagtcagaacgggacaccgcctttcactgtatcagcgagccgtgcgcctgcgagagtctccgagctgtaaaaagttcaagcacctcttccagcagctcccagaaatggctgtgcaagatgtgaaacacgtgaccatcacaggcaggctgtgcccacagcgtgggatgtgcaagtctgtgtttgtgatggaggccggggaggccgctgaccccaccacggtcctgtgctctgtggaggagctggcactggcccattacagacgcagcggttttgaccaggggattcatggcgaagggtccaccttcagcaccctgtatggcctcctcctgtgggacatcatcttcatggatgggattccggatgtcttcagaaacgcctgtcaggcattccccctggacttgtgcacagacagcttcttcacaagcagacgcccagcccttgaggccaggctgcagctgattcatgatgcccccgaggagagcctgcgggcctgggtggcagccacgtggcatgagcaggaaggcagagtggcttcccttgtcagctgggatcgcttcacgtctcttcagcaagctcaggatcttgtctcctgcctggggggccctgtgctcagtggtgtgtgcaggcacctggctgctgactttcgacactgtcgagggggcctccccgacctggtggtgtggaactcccagagccgtcactttaagctggtggaagttaaaggccccaatgatcgtctttcacataagcagatgatctggctggctgaactgcagaagctgggggctgaagtagaagtctgccatgtggttgcagttggagctaagagccaaagccttagctaaaagattccctacaggagaaaatggaaatgaggaggagagaaactccggtgtccccgaggtgtcggtgtggtgagggccgctggcgttgaagtacatcctgctctggcccagctccccatagcaggcctccagggggccactgcgctgttgccgcagcatcctgctcagtacgtcgacttcatcagccaggagggagagcttgtgaaaggctgtgatggagccacccaggctgatctgggcctcgggaacccagcggaagtagcacagtttccacagttttatgtgtgttccagagacacgtggcagaataacaccgtgcaggttggcgggtttggaaaaccattctctaaaatactgctccgtatcactgttctggctgtcggtttgctgagctggatctggctttggttttaatatcaatgaatttctccttggaagtaattcttggtcactgatgattccattctttaaggcagacggcattcctcttagtgtggagctgtagcttttctatacagaagagattttattatgttccggggattccctttttagaaagattgaaggatgcaatggcaaatataaactcaatactatgaaaaattaatggaatttcagcctcaaagaacattttcctcccttcctttgtgtccttattctaatcctcctcccctggaattacacttttttatgtgttgactctacctaggctgttactatcagcctgaatgggggcgggatgagagtacctcctatccactaatttgcttaaggataagttctaagacgggctagaaaaaacactagacctggccgattctatcaagaacaatggcaaactgaacagaggcagtcaggaggccaaatgtctgattctttgttctgtacctttcagtagtctgcaaattttctaccaaaaaaaatcccaagaatttatttgggaattattaaaaaggcaaacaatgaatgttattaggacaagaatatagcagtcaggaggccatgactacatcacagccaggcggcattccctgccacagtggcggcttgaatcatcaagaaatggataaatggggctttagtaaatcaggcttgcaggctcaaagctgcaatctgcccactctcaggtactgagactttgtgggcctcagacaccaggaagaaagctgggatacagtcatttgagttaaaaagggaatgacccctcagaaacccgcattagcagtgttactcttggaagtgcctttacttttaacgctctctgttctgaaaaagaggtgtttggttacgtgtgagccaacatcacgttttgttagctgtgatttacctttgtccgtttaaaagacttcacggagccattctgtatacaaggtgtgctctttccaatgtagaaggggttatggaaaagggtgcgatcctttgctgtaaactggagagaccagtcccaaacagaggggaattttaagcccttctcatcacccaattggatgtttttgcttatagcaaattcctgcaaaataaataaataaatatttgcaaaactaaaaaaaaaaaaa

SEQ ID NO: 3885 - DNA, 4373 bp, Homo Sapiens
  NM_014969
gactcgcccttcggctcaggcacctgcctggccgccccgcgcggcggggtcctgaggcgcctcggggaagcgcggcgattggctgccgctcgcgggtagagctcggctccccggcacttgacaaccgcagtctgcaagaggctgagctgaggagtcgctgggccgggaggggcggacgtgagaaggacggattgacgaactgatggattgacgcgcgggcggtaggagggaggaccgacgccaaacccagaccgccgccgtcgtgctcctgccgcagcccggagccggccgcttcggggccctggccgccggcctcccagccgcgttctcctccgccgctcctccgggcttgccctggagccctcaggctatcaatatgacggctgaagaaacagtgaatgtaaaagaggttgaaatcattaagctaattttggacttcctgaattcaaagaagcttcacattagtatgctggccctggagaaggaaagtggagtcataaatggcctgttttcagatgatatgcttttcctgaggcagctaatacttgatggtcaatgggatgaagttcttcagttcattcagcctctagaatgtatggaaaaatttgacaaaaaaaggtttcgttatattatcctgaagcagaagtttttagaagctttatgtgttaacaacgcgatgtcagcagaagatgagccccagcatctggaatttaccatgcaagaagctgtgcaatgtttacatgctctagaagaatactgtccttctaaagatgactatagtaagctctgtttgcttttgactttgcctcgtctgaccaatcatgccgagtttaaggactggaatcccagcaccgcacgagttcactgttttgaagaggcttgtgtcatggttgcagaattcatccctgctgataggaagctaagtgaagctggttttaaggctagtaacaatcgtttatttcagcttgtaatgaaaggcctgctttatgaatgctgtgtagaattttgtcagagtaaagcaactggagaagaaattacagaaagcgaagtgcttcttggcatcgacctcttatgtggtaatggttgtgatgatttggatctgagtttactgtcatggcttcagaatcttccatcttctgtcttctcttgtgcttttgaacagaaaatgcttaatattcatgttgacaaacttctgaaacctacaaaagctgcatatgctgatcttttgactcctcttatcagcaaactctctccctatccatcatccccaatgagaagacctcaatcagctgatgcctatatgacccgctctctgaatcctgctttagatggcctcacctgtggactaaccagtcatgataagagaatttcagaccttggaaacaaaacttctccaatgtcacactcctttgctaacttccattatccaggggtacaaaacctcagtagaagtctcatgcttgagaatacagaatgtcacagtatttacgaagaatcccctgagcgaagtgatacacctgttgatgcacagaggcctatcggcagtgaaatcttgggccagagttcagtttcagaaaaagagcctgcaaatggagcacagaatccaggaccagctaaacaagaaaaaaatgagcttcgagattcaacagaacaatttcaagaatattataggcaaagattacgctatcaacagcatttagaacagaaggagcaacagcggcagatataccaacagatgttgcttgaaggaggcgtgaatcaggaggatggtcctgatcagcagcagaatcttactgaacagttccttaataggtccattcaaaagcttggtgaattaaatattggaatggatggccttggtaatgaggtatcagcactcaaccagcaatgtaatgggagcaaaggcaatggatctaatggttcttctgtgactagttttactacaccaccccaagactctagtcagagattaacacatgatgcttcaaatattcatacaagcactcctcgtaatcctggatcaacaaatcacataccttttctggaggaatcaccttgtggaagccaaatctcttcagaacattcggtcattaagccacctcttggagattctccagggagtctttcaaggtcgaaaggggaagaggatgacaaatcaaaaaagcagtttgtttgtattaatatcctagaagacacacaagctgttagagcagtggcttttcatccagctggaggtttatatgctgttggttcaaattcaaaaactctgagagtatgtgcctatccagatgtaattgatccaagtgcacatgagactcctaagcagccggtggtacgttttaaaaggaataaacatcataaaggatccatttactgtgtggcctggagtccttgtgggcagttattagcaacaggatcaaatgacaaatacgtcaaagtgctgcccttcaatgcagagacttgtaacgcaacaggaccagatctggaatttagtatgcatgatggaacaattagagacttggcatttatggaaggcccagaaagcggaggagctattttaataagtgctggagcaggggattgtaacatttatacaaccgattgtcaaagaggacagggcctccatgctttgagtggacatactgggcatattttagcactttatacctggagtggctggatgattgcatctggttcccaagataagactgttagattttgggatcttcgagtaccaagttgtgttcgtgttgttggcacaacatttcatggaactggcagtgcagtggcatctgtagctgtagatcccagtggtcgtctcttagccacaggtcaagaagattctagctgcatgttgtatgacataagaggaggaagaatggtacaaagttatcatcctcattccagtgatgttcgctctgttcgattctcccctggagctcactacttgctaacaggctcttatgatatgaaaataaaggtgacagacctacaaggggacctcaccaagcagcttcctatcatggtggtgggggagcacaaggacaaagtgattcagtgcagatggcacacccaggatctttccttcctgtcatcctctgcagatagaactgtcaccctctggacttacaatgggtagagcacaccgcatgtcagtctatgcagcaaaagcacagagacttaagactactgagttgtgaaaattacaaatctgaagaacatagtgtccaggaaagtggtttagcacgaagaggccccttattaccatgtatcccactgataggaggtgttgggtggtgttattccgcagtgctttcagtcttccatgtgagctcgtgctgctgtgacctgctatatgtagtctcgttgccaaagtctgcagaagagctcttcagttgttggtgtgcactccaagtcaggatggacaatgtgtttacggtttagtattcaatgcattccttggtctttgcctaaataacagttttatatgcacattgaaatggaattatacttcaactatattattaaatgtaatgcaaccaagttcctcccagattaaacttcccaggtgttcagaattacttttgctcttctcacgatcccatattgtattatcacttgtcttctagaggtcagaattccataatatatgtcactcaaaagttacatggttgctttcacttaaggatcattgtggagtttaaagatgaatgaaaaactgcttcttagtttactacatggtataggcccttttttcttaaacccagggatatgattattttgtcatataattttgtttcaggctaaaaggtaaatgtgtttgcttcagaaacttgttaacttcagttttttgaatgcaacaggatacctcccttccaaactgaactgtagaagcagagcagcagcagttatgtgatgcaacacttgatggtacagtaaatttactggcatttttctccttaaaaattaaaatccttgacatagaccatagcatggcttgaaatgctatgtctgcatgataatttaaaatggaagatttaaactttgcactccaaaagcttatttggatttttttcttgcactgttttgtgtaatgcagaataatgattttatttctacagctttgtagattctaacatttatgtatctttattttcatattgtacagtaattttactttaaattatttaaataggctattttatttatttcaaatgcagttgtattagttctcattattgaactgtctgtgcactgtatgtagcaagcatttttcatctgttgtatacaagtggaaagggtattagaagtgtaactgtgctattatttcaataaagacctcttgacatttaaaaaaaaaaaaaaaaaaaaaa

SEQ ID NO: 3886 - DNA, 2997 bp, Homo Sapiens
  NM_014970
caagaggtgcagagcaagcgcatgcgtcgtgacggcccggcttaggcgactctgggcgggtctgggccgctccagtgttttggggcacagaagctgtgggaggagctggaggcttcaccgtggtaaccacagcgccgctgctgccccgccttgcaggcctcaggactgtcatcgcctctgggtgtgagggtactttggccaccgtccccggaaataaccgcgcctgcctctcaagataccccatcctctccacgccgctgccgctgccgccatgcaaggggaggacgccagatacctcaaaaggaaagttaaaggagggaatatagatgtacatccatcagaaaaagcactcattgttcactatgaagtggaagctaccattcttggagaaatgggggaccccatgttgggagaacgaaaagaatgtcaaaaaatcattcgacttaagagtctcaatgccaacacagatataacttccctggcaaggaaggtggttgaagaatgtaaactcattcatccttcaaaactaaatgaggtagaacagctgttgtactatctacagaaccgccgtgattcattgtcaggaaaagagaaaaaagaaaaatcaagcaagcctaaagatccacctccttttgaaggaatggagattgatgaagttgctaacattaatgacatggatgaatatattgagttattatatgaagatattcctgacaaagttcggggttctgctttgatcctgcagcttgctcgaaatcctgataacttggaagaactactattgaatgaaactgcccttggtgcattagcaagggtcctgagagaagactggaagcaaagtgtcgagttagctacaaacataatttacatctttttttgtttctccagcttttctcaatttcatggacttattactcactataaaattggagctctgtgtatgaatattattgatcatgagttaaaaagacatgagctttggcaagaagaactctcaaagaagaagaaagctgttgatgaagaccctgaaaaccaaaccttgagaaaggattatgaaaaaacctttaaaaagtaccaggggcttgtggtaaaacaggaacagctattacgagttgctctttatttgcttctgaatcttgctgaggatactcgtaccgaactgaaaatgaggaacaagaacatagttcacatgttggtgaaagcccttgatcgggacaattttgagctgctaattttagttgtgtcattcttgaagaaactcagcatttttatggagaataaaaatgatatggtggaaatggatattgttgaaaaactggtgaaaatgataccttgtgagcatgaagacctgctgaatatcaccctccgacttttactaaacctatcctttgacacaggactgaggaataagatggtacaagttggactgcttcccaagctcactgcactcctaggcaatgacaactacaaacaaatagcaatgtgtgttctttaccacataagcatggatgaccgctttaaatcaatgtttgcatacactgactgtataccacagttaatgaagatgctgtttgaatgttcagatgaacgaattgacttggaactcatttctttctgcattaatcttgctgctaacaaaagaaatgtacagcttatctgtgaaggaaatgggctgaagatgctcatgaagagggctctgaagtttaaggatccattgctgatgaaaatgattagaaacatttctcagcatgatggaccaactaaaaatctgtttattgattatgttggggaccttgcagcccagatctctaatgatgaagaagaggagtttgtgattgaatgtttgggaactcttgcaaacttgaccattccagacttagactgggaattggttcttaaagaatataagttggttccatacctcaaggataaactaaaaccaggtgctgcagaagatgatcttgttttagaagtggttataatgattggaactgtatccatggatgactcttgtgctgcattgctagccaaatctggcataatccctgcactcattgaattgctaaatgctcaacaagaagatgatgaatttgtgtgtcagataatttatgtcttctaccagatggttttccaccaagccacaagagacgtcataatcaaggaaacacaggctccagcatatctcatagacctaatgcatgataagaataatgaaatccgaaaggtctgtgataatacattagatattatagcggaatatgatgaagaatgggctaagaaaattcagagtgaaaagtttcgctggcataactctcagtggctggagatggtagagagtcgtcagatggatgagagtgagcagtacttgtatggtgatgatcgaattgagccatacattcatgaaggagatattctcgaaagacctgaccttttctacaactcagatggattaattgcctctgaaggagccataagtcccgatttcttcaatgattaccaccttcaaaatggagatgttgttgggcagcattcatttcctggcagccttggaatggatggctttggccaaccagttggcattcttggacgccctgccacagcatatggattccgccctgatgaaccttactactatggctatggatcttgataaagtatctgtttccatgtgtaatctcagcttagaagaaatctgtgtgggttgggttaattttggatctttgcctaataatgcatgttgatgttattgtgggtctgtgtttgtttttatttttatatgttgttagctgcagattaaccccagcccctctgtcttctgttaagtacagttgatactgacattgttcactcatcaaaccacatcttgatgctaagtaacatttcccatgagcctcaaaactgaatgctgaaaagctactagactggaaaacaaacactgcattatgtatgttaagtgactaatttaatttcaattaaaaagcgtaaagtgaaaatgaa

SEQ ID NO: 3887 - DNA, 2286 bp, Homo Sapiens
  NM_014972
cgaagagtgcgcaggcgcgccgacagccgagttttctgcgcttccttctccctctctccagacgtcgtggtcgttcggtcctatgtcgcgccgggccctccggaggctgaggggggaacagcgcggccaggagcccctcgggcccggcgccttgcatttcgatctccgtgatgacgatgacgcggaagaagaagggcccaagcgggagcttggtgtccggcgtcccgggggcgcagggaaggagggcgtccgagtcaacaaccgcttcgagctgataaacattgacgatcttgaggatgaccctgtggtgaacggggagaggtctggctgtgcgctcacagacgctgtggcaccagggaacaaaggaaggggtcagcgtggaaacacagagagcaagacggatggagatgacaccgagacagtgccctcagagcagtctcatgcaagtggcaaactccggaagaagaaaaaaaaacagaaaaacaagaaaagcagcacgggagaagcatcggaaaacggactagaagatatcgatcgcatcctagagaggattgaggacagcactgggttgaaccgtcccggcccagctcccctgagctccaggaagcacgttctctacgtggagcacagacacttgaatccagacacagaactgaaaaggtattttggtgcccgggcaatcctgggggagcaaaggccacggcagagacaacgtgtgtaccccaagtgcacatggctgaccacccctaaaagcacctggccccgctacagcaaaccaggtctgtccatgcggctgctggaatcaaaaaaaggcctctccttctttgcgtttgagcacagtgaggagtaccagcaggctcagcacaagttcctggtggccgtggagtctatggagccgaacaacatcgtggttctgctccagacgagcccttaccacgttgactcactcctgcagctcagcgatgcctgccgctttcaagaggatcaggagatggctcgagacctcgtagagagagcgctgtacagcatggaatgtgcgttccaccccctgttcagtctcaccagtggggcctgccggctggattaccgcagacccgagaacaggagcttctacctggccctctacaagcagatgagcttcctggagaagcgaggctgcccgcgcacggcgctggagtactgcaagctcatcctgagtctcgagccggatgaggaccccctctgcatgctgctgctcatcgaccacctggccttgcgggcccggaactacgagtacctgatccgcctcttccaggagtgggaggctcatcggaacctgtcccagctccctaattttgccttctctgttccactggcgtatttcctgctgagccagcagacagacctccctgagtgtgagcagagctctgccaggcagaaggcctctctcctgatacagcaggcgctcaccatgttccctggagtcctcctgcccctgctcgagtcttgcagtgtgcggcccgacgccagcgtttccagtcaccgcttctttggacccaatgctgaaataagccagccccctgccctgagccagctggtgaacctgtaccttgggaggtcacactttctctggaaagagcccgccaccatgagctggctggaggagaacgtccacgaggttctgcaagcagtggacgccggggacccagccgtggaagcctgtgagaaccggcggaaggtgctctaccagcgtgcacccaggaatatccaccgccatgtgatcctctctgagatcaaggaagccgtcgctgccctgcccccggacgtgaccacgcagtctgtgatggggtttgatcctctgcctccttcggacacaatctactcctacgtcaggccagagaggctaagtcctatcagccatggaaacaccattgctctcttcttccggtcactgttgccaaactataccatggagggggagaggcccgaggaaggagtggctgggggtctgaaccgcaaccagggcctgaacaggctgatgctggctgtgcgcgacatgatggccaacttccacctcaacgacctggaggcgccgcacgaggacgacgctgagggggagggggagtgggactgagcgtccgcagaggtgaccgaaaagccgtatgatgatgttcccgatttctctgttggtcggagtcggccagttgcctgaagtagggaagctgagtgtgtcgctccctggtccactgtttctcctataaatgtaaatgggtcacgctcaaaaaaaaaaaaaaaaaaaaaaaaaaa

SEQ ID NO: 3888 - DNA, 7896 bp, Homo Sapiens
  NM_014974
ctcggtgcggttccgccgggcgcgaggagccgccgagacctccgcctgcgaacaaagaggaggccgtgcggggcgcggcgcccgcggagcatggcggaccgcagcctggagggcatggcgctgcccctggaggtgcgggcgcgcctggccgagctggagctggagctgtcggaaggtgacatcacacaaaaaggatatgaaaagaagaggtcaaagttaattggagcctaccttccgcagcctccgagggtggaccaagctttgccgcaagaacgccgggctcctgtcactccttcctccgcctctcgctaccaccgccgacggtcttcagggtcacgagatgagcgctatcggtcagacgtccacacggaagctgtccaggcggctctggccaaacacaaagagcggaagatggcagtgcctatgccttccaaacgcaggtccctggtcgtgcagacctcgatggacgcctacacccctccagatacctcttctggctcagaagatgaaggctcagtgcagggggactcccagggcacccccacctccagccagggcagcatcaatatggagcactggatcagccaggccatccacggctccaccacgtccaccacctcctcgtcctctacgcagagcgggggcagcggggctgcccacaggctggcggacgtcatggctcagacccacatagaaaatcattctgcacctcctgacgtaaccacgtacacctcagagcactcgatacaggtggagagaccgcagggttccacggggtcccggacagcgcccaagtacggcaacgccgagctcatggagaccggggatggagtaccagtaagtagccgggtgtcagcaaaaatccagcagcttgtcaataccctcaaacgaccgaaacgaccacctttacgagaattctttgtcgatgactttgaagaattattagaagttcaacaaccggatccgaaccaaccaaagccggagggggcccagatgctggccatgcgcggagagcagctgggcgtggtcacgaactggccgccgtcgctggaggccgcactgcagaggtggggcaccatctcgcccaaggcgccctgcctgaccaccatggacaccaacgggaagcccctctacatcctcacttacggcaagctgtggacaagaagtatgaaggtcgcttacagcattctacacaaattaggcacaaagcaggaacccatggtccggcctggagatagggtggcactggtgttccccaacaatgatccggctgccttcatggcggctttctacggctgcctgctggccgaggtggtccccgtgcccatcgaggtgccgctcaccaggaaggacgcagggagccagcagataggtttcttgcttggaagctgtggagttactgtagccttgactagtgacgcctgccataaaggacttccaaaaagcccaacgggagagatcccacagtttaaaggttggccaaagctgctgtggtttgtcacagagtctaaacatctctccaaaccgccccgagactggttcccacacattaaagatgccaataacgacactgcgtatattgagtacaagacgtgtaaggatggcagtgtgctgggtgtgacggtgacgaggactgcgctgctgacacactgccaggccctgacgcaggcgtgtggctacacggaagctgaaaccattgtgaatgtgctggatttcaagaaggacgtcgggctctggcatggcatcctgacaagcgtcatgaacatgatgcatgtgatcagcatcccgtactcgctgatgaaggtgaaccctctctcctggatccagaaggtctgccagtacaaagcaaaagtggcgtgtgtgaaatcgagggatatgcattgggcattagtagcacacagagatcagagagacatcaacctctcctctctgcgaatgctgatagtggcggacggcgcgaacccctggtctatttcttcttgcgatgcatttctcaatgtcttccaaagtaaaggccttcgacaggaggtcatctgtccttgtgccagctcgccagaggccctcactgtggccatccggaggcccacggatgacagtaaccagcccccgggccggggtgtcctctccatgcatggactgacctatggggtcattcgtgtggactcggaagagaagctgtccgtgctcaccgtgcaggatgtcggcctcgtgatgcctggagccatcatgtgttcagtgaagccagacggggttcctcagctgtgcagaacggatgagatcggggagctgtgtgtgtgtgcagttgcgacgggcacgtcctactatggcctctctggcatgaccaagaacacctttgaggtgtttcccatgacaagctccggggctccgatcagtgaatacccattcataaggacaggcttgctggggttcgtgggtcccggaggcctcgtcttcgtggtgggcaagatggatggcctcatggtggtcagcgggcgcaggcacaacgccgacgacatcgtggccactgcgctggccgtagaacccatgaagtttgtctaccggggaaggatagccgtgttctcggtgaccgtgctgcacgacgagaggatcgtgatcgtggctgagcagaggcctgactccacggaagaggacagtttccagtggatgagccgtgtgctgcaggcgattgacagtatacatcaagttggagtttattgcctggccttggtgccagcaaacaccctccccaaaaccccgcttggtgggatccatttatcagaaacaaaacagctttttctggagggctctctgcacccctgcaatgtcctaatgtgcccccacacctgcgtcacaaacttgcctaagcctcgacagaagcagccagaaatcggccctgcctctgtgatggtggggaacctggtctctgggaagagaatcgcccaggccagtggcagagacctgggtcagatcgaagataacgaccaggcacgcaagttcctgttcctctcagaggtcttgcagtggagagcacagaccaccccggaccacatcctctacacgctgctcaactgtcggggtgcgatagcgaactcgctgacctgcgtgcagctgcacaagagagctgagaagatcgccgtgatgctgatggagaggggccaccttcaggacggcgaccacgtggccttggtctaccccccaggaatagacctgatagcagcgttttatggttgcctgtacgcaggctgtgtgccaataaccgtccgtcccccgcacccacagaacatcgcgacgacgttgcctaccgtcaagatgattgtggaggtgagtcgctctgcctgtctgatgacgacacagctgatctgtaagttgctgcggtccagggaggcggcggcggctgtggacgtcaggacgtggcccctcatcctggacacagatgatttgccaaagaagcggcctgcccagatctgcaaaccttgcaacccagacactcttgcatatctcgacttcagcgtgtccacaactgggatgctagctggcgtaaagatgtctcacgcagccaccagtgccttctgccgttccattaagctgcagtgtgaactttacccctctagagaagtggccatctgcctggacccttactgtggactgggatttgtcctctggtgcctctgcagtgtgtattctgggcaccagtccatcctgatcccgccctctgagctggaaaccaaccccgccttgtggcttcttgccgtgagtcagtacaaagtccgagacacgttttgctcctactccgtgatggagctgtgcaccaaggggctgggctcgcaaacagagtccctcaaggcgcgagggctggacttgtcccgagtgaggacctgcgtggttgtggcggaagagaggcctcggatcgcactcacacagtcgttctcaaagctgtttaaggacctgggccttcacccgcgggccgtcagcacctcgttcggttgcagggtgaacctggcgatttgcttgcagggaacctcaggacctgacccaaccactgtctacgtggacatgagagccctgagacacgacagagtccgcttagtggaaagaggatcccctcatagtctgcccctgatggaatcgggaaagatacttccaggggttcggattataattgccaacccagaaacaaaaggaccgctgggggactcacaccttggagagatttgggttcacagtgcccacaatgccagcggttatttcactatttacggagacgaatccctccagtcagatcacttcaactcaagactaagttttggagacacccagaccatctgggcacgcacaggctacttggggttcctgcggagaactgagctcacagatgcaaatggagagcgccatgatgccctctacgtggtaggggcactggacgaagccatggagctgcggggcatgcggtaccacccaatcgacattgagacctcggtcatcagagcccataaaagcgttacggaatgtgctgtgtttacctggacaaatttgttggtggttgtggttgagctggatgggtcggaacaagaagccttggacctggttcccttggtgaccaacgtggtcctggaggagcactacctgatcgtcggagtggtggtcgtggtggacatcggcgtcatccccatcaactcccgtggggagaagcagcgcatgcacctgcgagacgggtttttggcagaccagctagaccccatctatgtggcctacaacatgtagtctcgtctcttggcttccatggacttttctagagatgtagacattgttctccgtgtccactgaagcgtgcagacacagggcaacactcaccagaatacagccatttgtggtgagagtggaggaggaagaggaggaggaagaggacttctcacagcagccacgattggcatgggggtgaaatgtgaatttaccactgaatttcgctcagaaggactttggattactgccttcagtttgttggaaaagcccatttcaaaactttcttttcttttctttcttttttaattattggataataagtgctttcttcgtaaatgtggtattttgttaagccgaaatagcaattaaaaaaatatcctgccctccagatgggttcttttaaacaatttatgtagtgtgacaaagaattgttttctctgttttaatgtgtcatgaaatcttaatgacatggatctgttactaatttaagccattgctagatctcatccttttaggaaagtttgaggtacgagaaaaccttccaaatagcaccttccaattagataatagcagctttctttgtcagaaatgtgctgaagaaacaaaggctggtatacggccttcgaagttagtatagaatgagaagaaattataaataaggtgtatttcggcaattatcttgcaaatatctttgtactaaactaaaaagataaaataagttaacttcctcaatatgtaattatgtacaaaacgtttaatttattttgatctctttagaactataaaagagaaaaacattcaagaatattaaagtcttgtaatgtttgctaatataaaaaagtgttgtattatcttgcgtggatagtatcacaacaaatatatatatatgaaatataaattcactaatgaacaaaggagattttaaagtttaagatgcagaacttgtcacttgcatggtgtgccccccgtactcacatacactctgctgttgccagcagtcgcagaccgcaggagccctgtctaaaagtttcttctagaaccagagaccagcaagtgaaattattgccatctcaaggatggcaaaagaattcaaagctcaatgtgcactatttttttctttgctgtgggacaacagtgaatgtgtttatgccagcgtgtgctgatgatactgaggggctttaggttggcaaatagcactgttttcttagctgcaagaattcattgcacaatgtttttcatcatttttgttaatgtcatctttttttggtccttgctacgaaaaggaatgcgattctgtggtcattcgcactgggttgcattgattccccctctgatggccaatgtggagtggacaaagtgtccggaactcacatcggtgatcgtcccctcgtcttaagacccagcccgctctgtgtgagcctctggggctccctcgctcagtgagcacagttccccgggggttcatgccagagctccggctgaagcaagaagtcctccagctgcgtcgtttgccgcctgtggacgagtgcgccccagtttctgccctggcagctcctggccacaccttctcagagctcacctgtgcacttctaaattgaattggcccacggtgtccaaccaagaaggagcatctgcactccgagaaagatgtgttctgtaactgccccagtgtgaccccgcagtggctctcggtgctagatatgcatgactaagattgatgctgggcaaaatgtagatgatctttcattatgttgtgggcagcgtctttctctgcctttgctatatgcagtcagcagtaagccttttgctaaaagagttttgtttgacttctgagatccaaggctgattgttgttaaaaaaaaaaaaaaaaaaaaagtggcacatttaaaaaaatgtgtctgcatatgtggtgcatccttccatctccacaaaccatttgattcttgaaatattgtttgacctcattgctgtgtgtgaatatttctccacatgcttcagatgcacattcctagtctctgcttcctaaggggggaaccaccacacattggggggaaaaaagacattttcctacacccacccaccttgttgaaagggaggtaggtttggggcttcaggccaggcactgactatgaaacattagctgcagtgtgcaggacagctttgaggtccagctgaagtcaggaagcaaaacaaatgtagatgtcacttcaaacataatttcaactgtcaccagatcaactctacattcaaggagtgtggacgctgcagtgcagttgtgagggcagttagcagccgcctcttctgcatcctgtcaactctgattagttagagtttaggctcaaaagagttggtggactgagattgaaatttggttgtgcaagagaaaggaaaggagacacttagtaccaccagtttcagcaataaagaagggtcattctgtattcaaaattgtactgtagataaatcattcatgagattgtaaaaaatgtttgtcttgtgaccttgtgcttttgaagtcagacaaaaccgtgtaatcaacttgcacaaaaagagggtacacagtgaacatataaacacagacctaatcaaacaggagcagattcctcatggtgcttgtttattatatatatttaatcctgcttgacactttacccaagggagatggtcccttttatcagttgaatgttagcagcgttatttcagagtgtggtgactggttagagaaactcatgtactcaaccagccacagtttcaaacaaaatttttatgtgcaaaggacagcaaccttcttgtatgttaaaccaccagtacgctttgtacatctgtgataacgcctgttttatattcaaatgaacaaataaaagcttttatttttgttgctctgaaaatagcagtttcttaattggtcccctggaaagatgtctgggacagctttaatcccgggaaggaagtgactcctacagggaaatgtatctgactctgtttacataatttgttgcattacttagtacagataatcatactttgaaaaatgtttaaattttgatgtgggcatttattgctaaaaataattcctatggcaacaaatgttttgtgaaatgttttttttaattcttttaaatatatctaaatatatttgttcacattttgctgcaa

SEQ ID NO: 3889 - DNA, 12936 bp, Homo Sapiens
  NM_014982
gaggaggagctggagggggcgcggcttcctctcggtcgctccctggcgccgggcctctttctctgcctggcccagggctggcggccggcgggggtcgcggcggcggcagtgggggcgctggcgggccgcgggtggcgggggccgggccgcggctccgggtgttaggagacaagatggcggcggctctcagaaggccggtctcctcctctccgccgtcctccgccccgccgctcgccgcctcctcctctcgggtctcctcctcctcgtttgctgcctcctcctcctcctgcagcagcaccagcgaccgccgaagcgccggctcgctcacccggagctccggaggtggatagacggggcagctgcaggctccggcgaccgaggccgagctggggccggggcggggacggcggcggcggcggcggcgacggcggcggcgccgggtggggatggggtcgcagacgctgcagatcctccgacagggggtgtgggccgcgctcagcgggggctggtactacgacccgcaccaggccaccttcgtgaacgcgctgcacctctacctgtggctctttctgctgggcctgcccttcaccctctacatggcccttccttctaccatgattatagtagcagtttattgtcctgtgatagctgctgttttcattgttctgaagatggtcaactatcgactacacagagcacttgatgctggagaagttgtagataggactgcaaatgagttcacggatcagcgaaccaaagctgaacaaggcaactgttcaaccaggagaaaagacagcaatggaccgagtgatcctggtggagggattgaaatgtctgagttcatccgagaggccacacccccagttggttgcagttccagaaattcttatgccggtctagatccaagcaaccagattggatctggttcctcgcgtcttggaacagcagcaactattaaaggagatacagacactgctaagacttctgatgatatcagtttaagtctgggccaaagttctagtctttgtaaggaaggaagtgaagaacaagatttggcagctgatcggaagctctttcgtcttgtctccaatgactccttcatctctattcagccttccttatcctcttgtggacaggacttgccaagggacttcagtgacaaagtgaacctgccaagtcataaccaccaccaccatgttgatcagtctctgtccagcgcctgtgacacagaagtagcttctcttgtacctttacactcacactcttatagaaaagaccaccggccgcgaggtgtaccacggacttctagctctgctgtggcttttccagacacttcactgaatgattttcccctttatcagcaaagacgtggattagatccagttagtgagttagaatcttccaagcctctttctggatccaaagaatccttggtggaaaattctggtttatctggggaatttcagcttgctggtgacttgaaaatcaatacttctcagccacccacaaaaagtgggaagagcaaacctttgaaagcagagaaaagcatggacagcttgaggagcctgagcacacggagtagtgggtcaacagaaagctactgcagtggaacggaccgggacactaacagtactgtcagcagctataaaagtgagcagaccagctcaactcacatagagagcatcctgtcagagcatgaggagtctcctaaagcaggaacaaaaagtgggaggaagaaagagtgctgtgcaggcccagaggagaagaatagctgtgccagtgacaaaaggactagcagtgaaaagattgctatggaagcgagtaccaacagtggggttcacgaggccaaggaccccaccccctctgatgagatgcacaaccagagaggtctcagcacctctgcatctgaagaagccaataaaaatccccatgcaaatgaatttacttcccaaggggacagaccacctgggaacactgcagaaaacaaagaagagaagagtgataagtcagctgtttctgtggattccaaagtgcgtaaagatgttggtggaaagcaaaaggaaggggatgttcgacctaaatcttctagcgtaatccatcggacagcttctgcccacaagtcaggcaggagacgcacaggaaaaaaacgggctagcagttttgattcaagccggcatagggactatgtttgctttcgaggtgtttctggtaccaagccacacagtgctatattttgtcatgacgaagactctagtgatcagagtgacttgagtagagcatcaagtgttcagtctgctcaccagttcagcagtgatagctcttctagcaccacttctcattcctgtcagtctcctgagggcagatacagtgctctaaagaccaaacacactcataaagaaaggggcacagactctgaacacacacacaaagctcatttggttcctgaaggaaccagcaaaaagcgtgcaacacgacggacttctagcacaaatagtgccaagactcgtgcccgagtgttgagcctggacagtggcacagtagcatgtttgaatgactcaaacaggttaatggcacctgaaagtataaagcccttaaccacttcaaaatcagatcttgaggccaaagagggagaggtgctagatgagctatctttattaggacgggcttcccagttagagacagtcactcgatctaggaatagcttgccaaaccaggttgcatttcctgaaggggaagagcaagatgcagtcagtggagcagcacaagccagcgaggaggcagtgtcatttcgccgtgaacgcagcacatttaggcgccaggcagtacggcgccggcacaatgcagggagtaaccctacccctcctacattgctcatcggatcacccctaagccttcaagatggtcagcaaggccagcagtccacagcccaggtcaaagtccagtcccgccccccttcccaggctgcagtgctcagtgctagtgcctccttgctggtgagaaatgggagtgtccacttagaagcatcacatgacaatgcatctgctgtaggcggtagcagtttgcacgatgaacttggtaagttctcttctacgctgtatgagactggtggctgtgatatgtcacttgtgaattttgaaccagcagcaagaagagcatccaatatctgtgacacagattctcatgtatccagttctacctcagttcgattttatccacatgatgtgctctctctcccacagattcgattgaatagactattgaccattgatacagatttgttggagcaacaggacattgatctaagccctgacttggcagctacttacggcccaacagaagaagctgcccaaaaggttaaacactattatcgcttttggatcctaccccagctgtggattggcattaactttgacagactcacacttttggccctgtttgatagaaatcgtgagatcctggaaaatgtgttagctgtcatcctggctattctcgtggcctttttgggatctattcttctcatacaaggattcttcagagatatctgggtcttccagttctgcctcgtcatagccagctgtcaatactcactgcttaagagtgttcaaccagattcttcttctcccagacatggtcataatcgtatcattgcctacagtagaccagtttatttctgcatatgttgcggtcttatttggctcttggattatggtagcagaaacctgactgcaaccaagttcaaattatatggaataactttcaccaatccactggtgtttatatcagccagggatttagttatagtgtttacactctgtttcccaatagtgtttttcattggtctcctgcctcaggtgaatacatttgtaatgtacctttgtgaacaattggatattcatatttttggtggtaatgccactacaagcctgcttgcagcactttacagttttatctgtagcattgttgcagtagccttattgtatggattatgttatggggctttaaaggattcttgggatggccagcatattccagtacttttctccattttttgtggtttattagtggcagtgtcttaccatctcagccgacaaagcagtgatccatctgtacttttctctttagtgcaatccaagatttttccaaaaacggaagagaaaaatccagaagaccctctatctgaagtaaaagatccactgcctgaaaaacttagaaattctgttagtgagcgattacagtctgacctggtagtatgcattgtaattggtgtgctgtattttgctattcatgtaagcacagtcttcacagtattgcagcctgccctcaagtatgtgttgtatacattggttggctttgtgggttttgtaacccattatgtgctgcctcaagttagaaaacagctaccatggcactgtttctctcatcctctgctaaagacactagagtataatcagtatgaagttcgaaatgcagccactatgatgtggtttgagaaacttcatgtgtggcttctttttgtggagaagaatataatctatccattgattgttctcaatgaactgagcagcagtgcagagacaattgctagtccaaagaaactgaatacagaattaggtgctttaatgatcactgttgctggtttgaagttgctacgatcctcttttagcagccctacatatcagtatgttacagtcatctttactgtgctgtttttcaaatttgactatgaagctttttcagagaccatgctgttggatctcttctttatgtccatactcttcaacaagctttgggaactactttataaattgcagtttgtgtatacctatattgccccatggcagatcacatggggttctgctttccatgcttttgctcagccttttgcagtgcctcattcagccatgctgtttattcaggctgctgtctcggccttcttctctactccactgaacccctttctgggaagtgcaatattcatcacttcatatgtccgacctgtgaaattctgggagagagactataacacaaaacgagtggatcattcaaataccagattggcttcccagcttgatagaaatccaggatcagatgacaacaatctgaattccatcttttatgagcatttaactagatccctacagcacagcctctgtggtgatttgctactaggacggtggggaaactacagtacaggggactgtttcatccttgcctctgactatctcaatgcattagtacaccttatagagataggcaatggtctggtcacttttcagctgcggggacttgaattcagaggtacctactgtcaacaacgggaagtggaggccattactgaaggtgtagaggaagatgaaggattttgctgttgtgaacctggccatattcctcacatgctttcatttaatgctgcatttagccagcgatggctagcttgggaagtgatagtcacaaagtacattctggagggttatagcatcactgataacagtgctgcttctatgcttcaagtctttgatcttcggaaagtactcaccacttactatgtcaagggtatcatttattatgttacgacctcgtctaagctagaggagtggctagctaatgagacaatgcaggaaggacttcgtctgtgtgctgatcgcaattatgtcgatgtggacccgacctttaatccaaacattgatgaagactatgaccaccgactggcaggcatatctagggagagtttctgtgtgatttacctcaactggatagagtactgctcttcccgaagagcaaagcctgtggatgtggacaaagattcatccctagtgactctctgttatggactctgtgttctgggacggagagctttggggactgcatcccatcatatgtccagtaatttagagtcattcctctatggattgcatgccctatttaaaggagatttccgtatttcttcaattcgagatgaatggatctttgctgacatggaattgctaagaaaagtagtagtccctgggatccgtatgtccattaaacttcatcaggatcattttacttctccagatgaatatgatgaccctactgtgctctatgaagccatagtatctcatgagaagaacctcgtaatagcccatgaaggggaccctgcatggcggagtgcagtacttgccaactctccctccttgcttgctctgcggcatgtcatggatgatggcaccaatgaatataaaatcatcatgctcaacagacgctacctgagcttcagggtcattaaagtgaataaggaatgtgtccgaggtctttgggcagggcaacagcaggagcttgtttttctacgtaaccgtaacccagagagaggtagcatccaaaatgcaaagcaagccctgagaaacatgataaactcatcttgtgatcaacctattggctacccaatctttgtctcacccctgacaacttcttactctgacagccacgaacagcttaaagacattcttgggggtcctatcagcttgggaaatatcaggaacttcatagtgtcaacctggcacaggcttaggaaaggttgcggagctggatgtaacagtggtggcaatattgaagattctgatactggaggtgggacttcctgcactggtaacaatgcaacaactgccaacaatccccacagcaacgtgacccagggaagcattggaaatcctgggcagggatcaggaactggactccacccacctgtcacatcttatcctccaacactaggcactagccacagctctcactctgtgcagtcgggcctggtcagacagtctcctgcccgggcctcagtagccagccagtcttcctactgctatagcagccggcattcatccctccggatgtccaccactgggtttgtgccttgtcggcgctcttctactagtcagatatcgcttcgaaacttgccatcatccatccaatcccgactgtcgatggtgaaccaaatggaaccctcaggtcagagcggcctggcctgtgtgcagcacggcctgccttcctccagcagctccagccaaagcatcccagcctgcaaacatcacactctcgtgggctttcttgcgacagagggaggtcagagcagtgccactgatgcacagccaggcaacaccttaagtcctgccaacaattcacactccagaaaggcagaagtgatttacagagtccaaattgtggatcccagtcaaattctggaagggatcaacctgtctaaaaggaaagagctacagtggcctgatgaaggaatccggttaaaagctgggagaaatagctggaaagactggagtccgcaggagggcatggaaggccatgtgattcaccgatgggtgccttgcagcagagatccaggtaccagatcccacatcgacaaggcagtgcttctggtccagattgatgataaatatgtgactgtaattgaaactggggtactagaacttggggctgaagtgtgagccagtgtttattataaagacatttctttttccctctcaattccaaggcattggaaaaagagaggaacaagcagaagatgcctgcaggtatcactttgatcctatgtgggagcgactgaaaatagaatgagcttggttaagcacctctcctttgcccttcaccctgactcctgtcactgtctccatccccaaataaagctgaaatatttttttaagttagctgccgagaaaacattttgcatgaaggataaagttctgttaaaatacatccttaaaaaaagtttttcctatgcattgcctatgctttaaatcaacaaactcttcatttctaaactatgatctcatatttttctaatttctttgccaaaaataattgccatgttttgtcatagaacatgaaattcatttaccttgatttttaagaacagaccagtgtagaaatgttccttttgacttatagcagtataaaagtttaatgtacagtgaaagagactatgaacagacatagatttatcttattccttgagcgctaaaaactttaataaaaaaaactgcactaattttttacagcaatgcactaaagtctgagatttctcagaacatttatttatatataaaaataaaataccattatttaaattgcctttgggattagccccttccctttccttataaacacaggtagcaggaactgtgctgctcatttttctgttagtagtgtgtacttcatgccaggacattgggtattttctttaaagtgaatatagaatctcaagatatacgtagcttcatcattgacatttcccagagccaatagtcagcggatcggtcttgtgaacaccactgccagctcctgtgtctacatctcagaggagcccatgtgctctgcttctctccaccagagcaagctctgctgggcgtgcttctgggaagaaaacaattttctttaagaagaagatgaatgtccaggaatttaaagaaaggatcgattgccttttatttatgagtttctagctcttgaagttattcacatgcagttcagttagtcaagtaaaattttttttcaaataaaagtatccaagtggtgcagttattattatatccctctttaataattttgctttttatttttcccctcttctttttctgttacttgaattttatttcctgtaatttatagtgtgtagctgtaaattgaaatatttataactgtgaaattgacttaattcatatgttgtctcataactttattttttttaaatgcatattcagggaaatatattactcatatttacaattgggcgatataggaacttcaatttagatttaatttgcaactcttagcattttttaaatccttgataaaattttcccttttggtgtgaaactccaaagaaaattgtacatctcctctgagcatttaggagcagccatctttctaccccttgtgaataaatcattgaaagaaacaggtaaaattaattttaatgatacattttgtttcacccagtatagtcaaagtattactatttcatcatatgtcactagccatatttcaagtactcaatagctacatgtacctagtggctactgtattagacagtacagatttaaagtatcttttgttgaggtgacagaagagagaagctgtttttcctaccaattctgatgtagatctcacattatagcataacattacagtagaaggaatgaaaactaagaaagtaaatagtgaacatacagaacttactgcatttccactttaaaacctatttattttccctttttctaattttaaacttttgtggtcattcagaacctaatgtgccttgtgttgacatttccatagacttcacactttacaaaatttactgtttaaaaatacttgtcaaatgatttactgaacctttatacaaaagtaccctttctaaattgaccatttaaaaatgtatttttgtgataccgtcattatgttctgcatttgcctcattttggcagatctacagtatgccattaaagtttagtgttgtttttggttttggagggtttttttctgaaactgaatttataatctatttctctgtatacgtatatttttaaaatcttctgaaaggaactatgttccctgctgcttcttccctttctgaagtgaatatgatcttttcatggtcattgcctagataaaagtagagccttttcaatcttagatggaagataattcattttcccacacagaaaaaaaatctgacctttacatgatttaatctgaagggctagaattttttaatttctagcccctcctccaaaaaaattttaaacacatcacatactctgaaaagtcagatttcaaatgcaagactagactttatatggaacatatatgttgggttttgattttgggtagcaattgacatatatttttctcaaaacaagttgaattttgttaacatatataattctttagtgaatttataaattaggaaccctgagaagaagccctgttgtttttcttaagagtctaaaactgacaatcttttaaaaatcataatacttttctagtaattgcatcagggaattggtgataattgaagaaagatccatttcttaagaataatttgatctaaattattatatggaaataaacatacttgtgttaactaaattgatcataaattcttgttcctgcctcacccctcaccccccagagaatagtgagtgactcgtttagattctctgctttttttcagttatgtacaagacttcagcatacattaatgtctttagtttataaatttgccaatgctttaatttccataatttgaaagttaaaagatgtaactaaaatactagcttttttattcatttccttttggtggagttgtatgattgaaaactttgctttttcttgtttaattcttccgccaccccctcttttgagagaaaggtaatcgtggaatgagttataaattattgcctttttttcctttatttctttcattcagtggcaaaaaacattttataactcctaagtttttggttaatcttccaacttataccttggtgtgaactctctttttacaccattttcaacactggataaaactttaatgttgactttttgctaaagaactttaatttttccaagaatctagattaacataagatgttgatatttaaggaacttggaagagtaagtggtgaggctgtatgtatattttttaagagattaccttttaggaaattagtgaacaaacttaaccagtgttctgccttctttgactttgttactggaggatgataatctatttctattagattcgaagtattttggaaaatatttcaagtatatctgaactacttataattcttaaaacagaagtagtcagacaatatttgtatcctaagtgagatatggaaaattactctgtatactaaatgtcaggcaatgaaaatgtaagtttttgtgtagaaaacccattaagaagatgtgtttttctttctgaattagtttatttttccatcacataccaaaatataaaaatcagcctcacatttttcagcaagtttagcttatagccttgataaattcctctgtgcttctgagcagcatccttctgcctctgcttagcagctctgcatttggtggattgctgttgtgagtcattcatccagcactgggccttttaagctgaagattcacccagtgtctaaagttgtccttttcttatagctagctttcaagcatctttcctcctaaataaatatgtgacttgagaaaaaggtaataatgattttgtcagaattctttgaatttatatttactagctacttaaccataaactgctgtccagattgttaatttcatttatatttattttaattaatttgtcatgaatatggacaaagccttttctggggtgtgtgtgtgtgtgtatgtttgttttttaagtcgtcattattcattcgtattctttttctgtgtaatgtaatcatataaagttactttggacagagacccagttaattttctcttttgataggatacatggtttagataaggtataaagtgtccctttttattctagaggcttttcctttaattcagagattagtggagataataacgtcagtcaaggctaatgtggtacatggaacttgctaatggaggttggacattctgtttcagtcttacatggatattgtttcattggtgttgaggaagaaaaaaattagatactaccatgcattgggacagcataattctaatattacattgaatatggctttttaaaaataagtattaaaaagccaatcgttttctccatttatctatcttttttgtttgtttttaatttggttgattgatatgcacccaggccgtcttatttttacttgttaaatgtctgtctaggaagaactgtgattggaaaggaattaattattatacaaataaatctggtaggatatgagtggagtaagtttgcttgaaacagaagtatattttctactttgaatcacctcaccagagtcatctgtcaagaattatgtataacaatttatctttattgcctacatacaacatactttttctgaattaagataacttctatttgtgagttgaacttcattatctgccattttgtggaatcaaccttacattctttggtggaactagagctgattgtcaccacaaggttatatgacaactctgttctaagacttatacctattatatagggttataccttttttcttatgcctcagctctgtacctgacaatttatgattcagtggagccaagctagaaggaacaaaggtcatctaacactgtgatggggatgaattcctgagttttacctgcacaatgaggtggtgccccggaattcacaacagagtagtgatagagcataagatggctgctccagatgactcttgggtttagtgtacttgtgattgaacaagattttttatctatgaagcttgattctacaaccaaaataatagaaatgggggggggggggggaatcatgtctgcttatgctttttaaaagcttatagtttaagtaaaagtaaaatgtaaaaactgattaaacctatacaagtctggcaatgagctctgcatgaggaaatggaaggaggaatattgaaaatgattctaggaaagtgaacgtaagaaaggaaaatgggttttccttttctgatcatgggctctggaaagtattcatggcctttaccagcattcagtataaaccagagataaggacatatgtacttacgtgtgtctgtgagtgtgtgtgtgtctgagtgttattctgaacagcttgtaaatattgtagttgtttaaaatggaaaataaaagctgagttcttttggcaaatatattgcatcaaaaatacagtattgacagtggataaaacactgaggaaataaattttttttcattttgcaaaaaaaaaaaaaaaaa

SEQ ID NO: 3890 - DNA, 3630 bp, Homo Sapiens
  NM_014984
ctcaccccggccgtccggccgcttcattgtcaccgggcctcggggcagtgttgggggtggcggggcgccaggtcgccgacccgaggtttgggcgcgactggttccgcatcccctccccgccggccgaatctgcaggccccgcgcgccaggcaggcttcgcggctgcgcccccggcccgcgcaggacctgccttgtccaccatgaaaggcacccgggccatcggcagcgtcccggagcgcagcccagcaggtgtggacctgagtctgacaggtctccctccgcctgtgtcccggcgtcctggcagtgccgccaccaccaagcccatcgtccgctctgtctccgtggtcacaggcagcgagcagaagaggaaggtgctggaggccacagggcctgggggctcccaggccatcaacaaccttagaagatccaacagcaccacgcaggtcagccagcctcggagcggctcccccaggccaacggagcccacagacttcctgatgctcttcgagggcagccccagtgggaaaaagaggcctgccagcctgagcacagcccccagcgagaagggagccacctggaacgtcctggatgaccagccccggggcttcaccttgccatccaatgcccggagttccagtgcccttgactcaccagcgggcccgcggaggaaagaatgcaccgtggccctggcccccaacttcactgctaacaacaggagcaacaagggagcagtgggcaactgcgtcaccaccatggtgcacaaccgctacaccccctcggagagggcgcctccgctcaagagctccaaccagactgccccctccctcaacaacatcatcaaggcagccacctgtgagggcagtgagagcagcggctttgggaagctgccgaagaatgtctccagtgccacccactcagcccggaacaatactgggggcagcacgggcttgcccaggcggaaggaggtgacggaggaggaggctgagaggtttatccaccaggtgaaccaggccactgtcaccatccagcgctggtaccggcaccaggtgcagcggcgcggagcaggagctgcccgcctggagcacttgcttcaggccaagcgggaggagcagcggcagcggtcaggcgaggggaccctcttggacctgcaccagcagaaagaggcagccaggaggaaggcccgggaggagaaggcacgccaagccaggcgagcagccattcaggagctgcaacagaaacgagccctgagagcccagaaggcgagcactgccgagcgtgggccacctgagaatcccagggagaccagagtgccaggaatgcggcagcctgctcaggagctgtcccccacaccaggcggcactgcccaccaggccctcaaggccaacaatactggtggtggcctccctgctgcaggccccggagaccgctgcctgcccacctccgactcatccccagaaccacagcagcctccagaggacaggacgcaggacgttcttgcccaggatgcagctggggacaacctggagatgatggccccgagcagggggagcgccaagtccagggggccactggaggagctgctgcacacactgcagctgctggagaaggagccggacgtgctgccccgccccaggacccatcacaggggcagatacgcctgggccagcgaggaggatgacgccagctctctgacagctgacaacttggagaaatttggaaaactcagtgcgttccccgaacctcctgaggatgggacgctgctatcggaggccaagctacaaagcatcatgagcttcttggacgagatggagaagtctgggcaggaccagctggactcccagcaggaggggtgggtgccggaggcggggccggggcccctggagctggggtccgaggtgagcacgtctgtgatgcggctgaagctggaggtggaggagaagaagcaggccatgctgctgctgcagagagcgctggcgcagcagcgagacctcacggcccggcgggtcaaggagacagagaaggcgctgagccggcagctgcagcggcagagggagcactacgaggccaccatccagcggcacttggccttcattgaccagctgattgaggacaagaaggtcctgagtgaaaagtgcgaggctgtggtggccgagctgaagcaggaggaccagagatgcaccgagcgtgtggcccaggcacaggcgcagcacgagctggagattaaaaaactcaaagaattaatgagcgccaccgagaaagcccgccgggagaagtggatcagtgagaaaaccaagaagatcaaggaggtcactgtccgaggtctggagcccgagatccagaagctgattgcaaggcacaagcaggaagtgcggaggctcaagagcctgcacgaggcggagctgctgcagtcggatgagcgggcctcgcagcgctgcctgcgccaggccgaggagctgcgggagcagctggagcgggagaaggaggcgctgggccagcaggagcgcgaacgtgctcggcagcggttccagcagcacctggagcaggagcagtgggcgctgcagcagcaacggcagcggctgtacagtgaggtggctgaggagagggagcggctgggccagcaggcagccaggcagcgggcggagctggaagagctgaggcagcagctggaggagagcagctctgcactgacccgagccctgagggctgagtttgagaagggcagggaggagcaggagcgccggcaccagatggagctgaataccctgaagcagcagctggagctggagaggcaggcgtgggaggccggccgcaccaggaaggaggaggcgtggctgctgaaccgggaacaggagctgagggaagaaatccggaaaggccgggacaaggagattgagctggtcattcaccggctggaggccgacatggcgctggccaaggaggagagtgagaaggctgccgagagccgcatcaagcgcttacgggacaagtacgaggccgagctctccgagctggagcagtcggagcggaagcttcaggagcggtgctcggagctgaagggccagcttggggaggccgagggcgagaatctgcgtctgcagggccttgtgcggcagaaggagcgggcgctggaggatgcgcaggcggtgaacgagcagctttctagcgagcgcagcaacctggcccaggtgatccgccaggagttcgaggaccggctggcagcctctgaggaggagacgcggcaggccaaggccgagctggccacgctgcaggcccgccagcagctggagctggaggaggtgcaccggagggtgaagacagccctcgcgaggaaggaggaggccgtgagcagcctccggacacaacatgaggctgcggtgaagcgggccgaccacctggaggagctgctggagcagcacaggaggcccacgccaagtaccaagtgaccagggatgccgggaacactgtcgaagaacggaaggcagaggacagaggctggacgtgggcccagaggcccacagggacgcccacctgccccccacagaggctggtggttgagatgcccacggctaagcacctgtggctgcattttaacagtaaaggaggccgttgttttcagcgcaaaaaaaaaaa

SEQ ID NO: 3891 - DNA, 7309 bp, Homo Sapiens
  NM_014987
gctccgcccgggcgagtagtgcaggtgccgctgcgccggggccggggaggcgcgcgccgagccgagcggagcctaggagggatggagagctggccacccgggctgcaggagcaccggcgcggggcgtaggcggcgcgaggcgggcgcgaggcgggcgctcgggcgcgaggcgcgtgcgggcgcgggagcactttgcgataggatgaggctccgggctggcgcggtagtactatgatttggtatgtggccactttcatagcaagtgtgatcggcacccgagggcttgcggctgaaggcgcccacggcctgcgagaggagcccgagtttgtgacggcaagagctggggagagcgtggtcctgcgatgcgacgtgatccacccagtgacgggacagcccccaccctatgtcgtagagtggttcaagttcggggtccccatccctatcttcatcaagtttggctactacccgccgcacgtggaccctgagtatgcaggccgggccagtcttcatgataaggcatctctgcggctggaacaagttcgctctgaggaccagggctggtatgagtgcaaagtgctcatgctggaccagcagtatgacaccttccacaatggcagctgggtccacctcaccatcaacgcccctcccacctttacagaaacacccccccagtacatcgaggccaaggagggtggtagtatcaccatgacctgcacagcttttgggaaccccaagcccattgtcacctggctcaaggaggggacgctcctcggtgctagtgggaaataccaggtgagtgacggcagcctgacagtgacatcggtcagtcgggaggacagaggtgcctacacctgccgagcgtacagcattcagggggaggctgtccacacgactcacctgcttgtccaagggccccctttcatcgtctcccctcctgagaacatcaccgtcaacatctcccaggatgctctgctcacctgccgggcagaggcgtatccgggcaacctcacctacacctggtactggcaggacgagaacgtctactttcagaacgacctgaagctgagggtgcgcatcctaatcgatgggaccctgatcatcttccgggtgaagccggaggactcggggaagtacacctgtgtgcccagcaacagcctggggcgctccccctccgcctcggcgtacctgaccgtgcagtacccagcgcgtgtcctcaacatgccccctgtgatttacgtgcccgtggggatccatggctacatccgctgccctgtggacgcagaaccaccggccaccgtggtcaagtggaacaaggacggccgtcccctgcaggttgagaagaacctcggttggaccctgatggaggatggctccattcgaattgaggaggccacagaggaggctcttggcacttatacctgtgtgccttacaacactctggggaccatgggccagtctgcccctgcgaggcttgtcctgaaggaccccccctatttcacggtgctaccaggctgggagtacaggcaggaggccggccgggagctacttatcccctgtgctgccgcaggggacccctttcctgtcatcacttggagaaaggtagggaagcccagcagaagcaagcacagtgccctgcccagtgggagcctgcagttccgtgccctgagtaaggaggaccacggggagtgggaatgtgtcgccaccaacgtggtcacgagcatcactgccagcacccacctcaccgtcatcggcaccagcccccatgccccgggcagtgtccgggtccaggtctccatgacaactgccaacgtgtcctgggaaccaggctatgatggaggctacgagcagacattctcagtttggatgaagcgggcacagtttgggccccatgactggctgtccttgccagtgccgccaggacccagctggctgctggtggacaccctggagcctgagacagcgtaccagttcagcgtcctggcccagaacaagctgggaaccagcgccttcagtgaggtggtcactgtgaacactttagcattccctattacaactccagaacccctggtgctggtcaccccaccgaggtgcctcatagccaatcggactcagcagggtgtgctcctgtcctggcttccgcctgccaaccacagctttcccatcgaccgctacatcatggagttccgtgtcgcagagcgctgggagttgctcgacgatggcatccccggcaccgaaggagagttctttgccaaggatctgtcacaggacacgtggtatgagttccgggttctggccgtcatgcaggatctgatcagcgagcccagcaacatcgccggcgtctccagcacagacatcttcccgcagccggacctgaccgaggatgggctggcgcggcctgtgctggcgggaatcgtagctaccatctgcttcttggcagctgccatcctgttcagcaccctggctgcctgctttgtcaacaagcagcgcaagcgtaagctcaagcgcaaaaaagaccctccactctccatcacccactgcaggaagagcctggagtctcccttgtcctctggcaaggtgagccccgagagcatccgcacgctccgagcgccgtcagaatcctccgacgaccagggccagcccgcggccaagaggatgctgagccccacccgtgagaaggagctgtcgctgtacaagaagaccaagcgggccatcagcagcaagaagtacagcgtggccaaggcagaggccgaggcagaggccaccacgcccatcgagctcatcagcagaggccctgacggccgcttcgtgatggaccctgccgagatggagccctcgctgaagagcaggcgcatcgagggcttccccttcgccgaggagacggacatgtaccccgagttccgccagtcggacgaggagaacgaggacccactggtgcccacatctgtggccgccctgaagtcccagctcacccctctgtcatccagccaggagtcctacctgccaccaccagcatacagccctcggttccagccccgcgggctggagggccccggtggcctggaaggtcggcttcaggccacaggccaggcccggccccctgccccccggcccttccaccatggccagtattatgggtacctcagcagcagcagccctggggaggtggagccgcccccgttctacgtgccagaagtgggcagccccctgagctccgtcatgtcgtccccgcccctgcccaccgaggggccctttggccaccccaccatccccgaggagaatggagagaatgcatccaacagcacgctgcccttgactcagacacctacaggagggcgctcccctgagccctggggccggccagaattccccttcggggggctggagaccccagcgatgatgttcccccaccagctgccaccctgtgatgtgcccgagagtctgcagcccaaggccggcctcccccgaggactgccccccacctccctgcaggtgcccgcggcctacccgggcatcctgtctctggaggcaccgaagggttgggcaggcaagtcgcccggcaggggccctgtcccagcgccccccgccgccaagtggcaggacagacctatgcaacctctggtaagccaagggcagctgcgacatacaagccaaggcatgggcatacctgtgctgccttaccccgagccggctgagccgggggcgcacggcggccccagcacatttggcctggacacccggtggtatgagccccagccccggccccggcctagccctcggcaggccaggcgcgccgagcccagtttacatcaagtggtgctacagccctcccggctctcacctctgacccaaagccccctcagctcccgcaccggctcccctgagctcgccgcccgtgcccggcctcgcccgggcctcctgcagcaggcagagatgtcagagatcaccctgcagccgccggctgcagtcagcttttctcgaaagtctacgccgtccacaggctccccctcccagagcagccgcagtgggagtcccagctaccggcccgccatgggcttcaccactctggccaccggctacccttcccctccacccggccccgcccctgctgggcctggggacagcttggacgtgtttggacagacgccttcccctcgaaggacgggggaggaattgctccgaccggagaccccaccacccacgttacctacttcagggaagctgcagagagacagaccagctcccgcgaccagcccgcctgagagagcactctctaaactgtagcagctggtattccagctatctgggcagtgttgtcgagacaagcctctcctcagctcaataggtaagggagctcctcggctgggcgggcgggggcgggcaggcggacggggcttcggccgggccattgcttcctggacaggggatccaaaccatgtcccctcaccgccccgtggggtggccgctgccgctcctcgatccccacggcttctgggttccccacatcgagccacgctcggcaccgcctagctgcagcttctgccccccaccccccgtccccatgtccggcccctctagagccccctgcggctctcctcactcctcgccagcctcgccagcctgctgccagtacacccagggcctcccacagaagccctggggccctgcatgcaccccgaaggggcccagaacacccgagatctgctttgcatctctgcacccttggggacctctctggggcccctctggtatccaggaagagcccccccgcaccctattctcccagcagccccaggcatagcatcccttctcctggggtggctggcccctcaccagcttcttgagatcttcgtggtattaggctctctcgaggagtacaaggttgggatgagccccacttcttccttgacagtggggtcctctgcagggtcaggtccctgcagtcctatggggctttgtagcgaaatgtcatcactcccctgtgctccttgccttctgcagcctgaccttggtagtcacaggactgaaatgtgacctagcccttgggtccacattgctttcaaggtccctgttgtagccttgtcgtcctccctgggtcatgctgtagggaaagggtcttaggaggacctccccgaggggagggggcaggcttcccctgggcagacaggcattgagctggcaggaagtgaaacccccagggaccagcactgtgtccctccccctgcccccgcagtcagcctctccttgagtgtccttccaggtggaagctaaaggaacttgggcattcagggagcctctgagtccctcacagagactcagggccacccgaagctcgctccctctcacagtagcctgacaaggtgctgccgctcgccacggaccctctgccctgtgcctgggcacacacaggcatcgggcacctgcatgggagacggcgagcctcccgtccaggtgcttctggctttccaggcgagaaggagacaggtgccttccccccctagagatgtcaagggaggttcactttcctaaccagggctataaatctcattcattcctaagagtggcctccataaagaggactgccctgacatttctttaccatctgtagctataaaattgtcagcagcccagaggccctggaattgtgggtgaggctgtctggcatagggtgagtgtgagggctgtcaggcagcgtttatgagctcacctgctctggggccctcctgcgcccagagacccactggtcttccaccttccccagctccctccctgtcccagctgtgactcctccacagcccccggaggtgtgggagccctagactagctctcaccccagctcctggaaattcctagactctgctctcatgtgttattcctcaccccttcactcaactccattgaccctctcctttcccagtgtccccactgtgccagatccaagagaagcccgctctcctttcactgctgtggcaaacccagaaaccaggggcagcgatgagggaccatcgtttctctcccgggcctggccagcatccccagcctaggagaaggagaccctccccatcctgagtcagcccctcggtgctggcctctcctgcctgctgggagcctccccggtacggctgctgggtcctggggagatgcaggctctgttcagatgctgtctccatgctgcacctttgcatgtgtgccctcttggtcttgcttggagaagttgtgacagctcttgtccacgtgcgttctcactgtttcttttcccttcagttcctctcctgttcctttggtccatatgtagttgttgcccctgcctctcctcctttctctctccctttttttctcctcttcccaactcccttctcaacatggggagttgtattgcgtggacctgtcctttctgtggactgtggggaggccgagccaattcttagctcctgtctgagcctagtgatgccctgtcctcacctctgcttccactccctttcccattcaggctgactgtcaccgcagggaggcaggtgggtctggagcatggagtggcccctgtcctgggtcagctgtaggaaggggcccctttgtaaacaagcttctgccaggttctgaggcagagcactggtctgagtccggccccacagaagggttccatcttgtggtcagcggggtgggctcagacctgcagactcccgcagtgggcccaccctttcccttgctatggcccgtctatgagtggctttcccctgcctccatcggtgtataatcaggcaggtggtgtttgctcttaggtgattagaagaggaggaaaatgcccatcaagccactgcttcagcctgttggccagggaacacctgaacagggtcaaaatggtcagctcctgggcgctgagctaaggaaatatgcagggggttttgactttccctgtcctgaggcttgcctccactttgacctggctgcatctttcctcagctcttctgggtaagctgagagctaagcaaataagacctcctgggctacctggtcatgatttgggttttgtatggattttttgaaaagagagaaaaagagtgtgggctgggtgccgtggcccagagggcagatctcttgagtccaggagttcaaggccagcctgggcaacatagtgaagccccatctctgcaaaaaaatacaaaaaaatagctgggcatggtggcacatgcctatagtcccagctccttggggggctgaggtgggaagatcatctgagctggggaggtcgaggcagcagtgagccgagattgcgccacttcactccagcctgggtgacagagaccctgtctca

SEQ ID NO: 3892 - DNA, 7882 bp, Homo Sapiens
  NM_014990
agggagagagttgtgctcctgccgccgagagctccaccttcgtggctctgggtccggggccccggcctgtggcggcgagcggcggccgctggagacgagcggcggcggcaggcggccagcccgggtctgcctcgctccgtgcagggccgggagagggatccgccatattggagctggggccgaaggtgccttggagccgcggcgcgaggcgggtggaggtggcggccctggcctggatcgggaaggagtcggctctgccctggcccgcaaggctggggagctaatgagcctctctggctagtctcctccccgtccactccctccactttctgccgccgggacccggctgggagccggctgtggcagtggcagtggcagtggcagcgacaggatgttctccaagaagccgcacggggacgtgaagaagtccacccagaaggtgctagacaccaagaaggacgcactgactcgcctcaagcacctgcgcatcgtcatcgagaatgcagaatctattgatcttaaacagtttttcgaccaacatttttcacatatatactatgtgttctttgaaaattttgtgactattgaagctagtcttaaacagaaaggtcacaagtctcaaagagaggaattggatgctatactttttatttttgagaaaattttacaacttcttccagaaagaattcatcagcgatggcagtttcatagtattggattgattttaaagaagctacttcacacaggaaactccttaaagattaggcgggaaggtgttcgtcttttcttactatggttgcaagctcttcagaataactgtagcaaagaacagctctggatgttttcatgcttaatccctggattttcagcaccacagtctgaacatggacctcgaactttagataatctcattaatcctccactcaaccttcaagaaactcaagtcactatagaagaaatcactcctcttgtccccccacaatcaggagataaagggcaagaagatctcacaagctattttcttgaagcacttctaaaatacatagtcattcaggtaaaaagtttagaatggaagaacaaagaaaaccaagaaaggggattttcatttttgttttcacattttaagaaatattacttgccttatatttttccaaacatctgtaaggaaaacagtttatatcatcctatacttgacatcccgcagatgagaccaaagccacattatgtcgtgataaagaaagatgctgaaaccaatgaagcaatctattgtacaaaggagcctttcattaaggctcgtgttattgtcattcgttggctggtttctttctggctggagccaaaaccacatacaggacctcatattcctgggatggaaggtgaagtcttgccaaagaatattcagagagcagctgctagtttagtatccagagaagaaagcaaaaatgataatgctgataaaacagacagaactacagaacccgaacagtctcattccaatacaagcactctcacggagcgagaacctagctcatctagtctctgtagtattgatgaagaacatctcacagacattgaaatagttcgcagagttttttcttctaaaaggagtaatgtaaactttgtgacagagatatttcgtcaggcatttttattaccaatttgtgaagcagcagctatgagaaaagtggtaaaagtatatcaagaatggatccaacaagaggaaaaacctttgttcatgcaagagcctgaagaaattgtgatcacttcttcagacctcccttgcattgaaaatgtcacagaccatgatatttcaatggaagaaggagaaaaaagagaagaggaaaatgggaccaatactgctgatcatgttcgaaattccagttgggcaaaaaacggctcctaccaaggtgctcttcataacgcctctgaagaagccacagaacaaaacatacgagctggtacccaggcagttttgcaggtgtttattataaactcatcaaatatatttcttcttgaacctgcaaatgaaataaaaaatcttctggatgaacacacagatatgtgtaaacgcattcttaacatttatcggtacatggttgtacaagtatcaatggacaaaaagacttgggaacagatgctgcttgtgttgctcagagtcacggaatctgtactgaagatgccatcacaagcttttctacagttccaagggaaaaaaaatatgaccttggcaggtcgacttgcaggaccacttttccagacccttatagttgcctggatcaaagcaaacctaaatgtgtacatctcccgagaactttgggatgacttactgtcagtattgtcatcgctgacctattgggaagagttggccactgagtggtcactgactatggagacattaactaaagttttagctaggaatttatatagtttggatctcagtgatttaccattggataagctgagtgaacagaaacaaaaaaagcacaaagggaaaggagttggacatgaatttcagaaagtttcagttgacaagtcattttctagaggatggagtcgtgatcagcctggccaagccccaatgagacagaggagtgcaacaaccactggttctccaggaaccgaaaaggcgaggagtatagtacggcaaaaaactgtcgatattgatgatgctcaaatacttccccgctcaactagagtcagacatttttcacaaagtgaagaaactggaaatgaagtttttggtgctttgaatgaggagcagccattgcctcgaagtagcagcacttctgacatcttggaaccattcactgttgaacgagccaaagtcaataaagaggacatgagccaaaaactgcctcctcttaatagtgatattggcggcagcagtgctaatgttcctgatctgatggatgagtttatagcagaacgacttcgaagtggtaatgcctcgactatgacaagaagaggaagtagtccaggcagcctggaaattcccaaagacctccctgatattctaaacaagcagaaccagatgcgccctattgatgacccaggtgtgccctcagaatggacttctcctgccagtgcagggagcagtgatcttatcagctcagatagtcattcggattctttcagcgctttccaatatgatggccgaaaatttgacaattttggctttggaaccgacactggggttacgtcctctgctgatgtggattcaggttctggccatcatcagagtgctgaagagcaggaagtggctagtctaactactcttcatatagattctgaaacaagcagtcttaatcagcaagctttctctgctgaagttgcaactattactggttcagaaagtgcttccccagtccactcacctctgggctccaggtcacagactccttccccttctacattgaatatagatcacatggaacagaaggatctgcagctcgacgagaagctccaccactctgttcttcagacaccagatgatctagaaattagtgaatttccatcagaatgttgtagtgtgatggcaggaggtactctgactggatggcatgctgatgttgctactgtaatgtggcgaagaatgctaggcattttgggagatgtaaattcaatcatggatcctgaaatacatgctcaagtttttgattacctctgtgaactttggcagaatctagctaagattagagataaccttggcatttcaactgataacctgacctccccttctccaccagttttaattcctccactgagaattcttacaccttggctttttaaggcaaccatgttgactgataaatataaacaaggtaaattacatgcatataaacttatttgtaatacaatgaaaagaagacaagatgtttctccaaatagagattttctaacacatttctacaatataatgcattgtggattacttcatattgaccaggatattgtcaatacaatcatcaaacactgctcacctcaatttttttcacttggtttgcctggtgccacaatgcttattatggattttattgtagcagctggtagagtggcttcttcagcttttctcaatgcaccaagagtagaagcacaagttcttctgggatctttggtttgctttcccaacttatattgtgaactgccttctcttcatcccaacattcctgatgttgctgtgtctcagtttacagatgttaaggaacttataatcaaaactgtattaagctcggcaagagatgagccctctggtcctgcacgatgtgtagcactttgtagtttaggtatttggatttgtgaagaactagtccatgagtctcatcatcctcaaattaaggaagctctgaatgtgatttgtgtttccttaaagtttactaataaaacagtagcccacgtagcttgtaacatgcttcacatgctggttcattatgtacctagacttcagatttaccagcctgattctcccttgaaaattattcaaatcctaatagctaccatcacccatcttttaccaagtacagaggcttcatcttatgaaatggacaagaggttggtagtatctttacttctctgccttctggactggatcatggccttacctctaaagacactgctccaaccatttcatgctacgggagcagaaagcgataaaacagaaaaatctgttctcaattgcatttataaggttttacatgggtgtgtttatggagctcagtgttttagcaatccaaggtattttcccatgagcctctctgatttggcatctgtagattatgatccttttatgcatttggaaagtctgaaagagcctgagcctctgcactctcctgactcagaacgatcttctaaactccagccagtaacagaagtgaaaactcaaatgcagcatggattaatctctatagcagcccgcactgttattacacatctggtaaatcacctgggccattatccaatgagcggtggtcctgctatgctaacaagtcaggtgtgtgaaaatcacgacaatcattacagtgaaagtactgaactttctcctgaactctttgagagtccaaatatccagttctttgtgttaaataatacaaccttagtgtcctgtatccagatcagatcagaagagaatatgcctggaggaggtttatctgctggccttgcatcagccaattcaaatgtcagaatcatagtacgtgatctctctggaaaatattcatgggattctgctatactgtatggcccacctcctgtaagtggcttgtcagaacctacatctttcatgctttcattgtctcaccaagagaagccagaagagcctccgacatctaatgaatgcttagaagatataaccgtaaaagatggactttctctccagtttaaaagatttagagaaactgtaccaacttgggatacaataagagatgaagaagatgttcttgatgagctcttgcagtatttgggtgttactagtcctgaatgcttacagagaactggaatctcacttaatattcctgctccacaacctgtgtgcatttctgaaaaacaagaaaatgatgttattaatgctatccttaagcaacatacagaagaaaaagaatttgttgagaagcactttaatgacttaaacatgaaagctgtggaacaagatgaaccaatacctcaaaaacctcagtcagcattttattattgcagattgcttcttagtatattgggaatgaattcctgggacaaacggaggagctttcatctcctgaagaaaaatgaaaagctacttagagaacttaggaacttggattcaaggcagtgccgagagacacacaagattgcagtattttatgttgctgaaggacaagaagacaaacactccattctcaccaatacaggaggaagtcaagcatatgaagattttgtagctggtcttggttgggaggtaaatcttacaaaccattgtggttttatgggaggactacaaaaaaacaaaagcactggattgaccactccatattttgctacctctacagtagaggtaatatttcacgtgtcaacaagaatgccttctgattctgatgattctttgaccaaaaaattgagacatttgggaaatgatgaagtgcacattgtttggtcagagcatactagagactacaggagaggaattattcccacagaatttggtgatgtccttattgtaatatatccaatgaaaaatcacatgttcagtattcagataatgaaaaaaccagaggttcccttctttggtcccctttttgatggtgctattgtgaatggaaaggttctacccattatggttagagcaacagctataaatgcaagccgtgctctgaaatctctgattccattgtatcaaaacttctatgaggagagagcacgatacctgcaaacaattgtccagcaccacttagaaccaacaacatttgaagattttgcagcacaggttttttctccagctccctaccaccatttaccatctgatgccgatcattaaatatcagttctgtttatctgaaggctcctacccagagattctacccagtgaaactcccacagcaacgcaggtagatggggctgacctggcctctccaatgtctcctcgaactagcaaaagccgcatgtccatgaagctgcgtcgttcctctggctcagccaataaatcctaaggagacaagcagcccagcagtgatcagcagtagccaccttagcacgaacatagggttaaccctttcaggccttcatgtctgccataacatgcatgtttcttcctgtacatttatttgagaaaacactggatttaaataattttaaataatttgtagcttaatattaaagatttaagttatttattgtttcattttttttcccacaatccaagctgccatattttgagggcagggggagttttattctacaccctttaccttcctagataattatgtctaagtagttttatctttaatttcatggttaactgtgagccaaaatacaattggacaattagtctcattatttattgtgccccattgcaactttatggttcaataaatatataattttttacaaatgtaaaattttacatttaagcatttgtaaagttacagcaaaagatgtacctgttaatacacagaatgtgtacagattatttgttatgacaataaaacactcaaaataaatggtctttagcatctcaaattccaactgaaatcattttagtattaactcttcttcccaaagcaatgtctcatttcttggctgtgcaggtgatgccatgttatatccaataactagaaaaatcactgtgctgaacttttatgtttagcttccaagtatttttctaatgttttgcatttcaagtggtatcactgttaaatgccatttgttttcagattgtggccttttattattggctgctagatcctggtgtttctatgttcttttttaagcaccaaaaagaagatggggaagaaaagaaggaaaattttctgatataaatatgttgttcaaattatgagtattatttaaaaaagaaaaaggaacataacccaggagtctaagttaaatctaatattgttaatactgaacttgcaggtccaggttggtatacattccaccctctagaagtattttcttacagtagataagctgctcacattttgttttgaatgggcatctcctgaggaaatgtagcatgacattggtactaactgcatgtgtaaatacatcatactggcaaaccgtaaaatataaattatgtatcatcattcatgtagtatctataatttgtaacagtgggggggaaagatgacatggtatttaataatacaataaaaatattcttatcacttcctatccaaaaaaaaaaaaaaaaaaa

SEQ ID NO: 3893 - DNA, 14329 bp, Homo Sapiens
  NM_014991
gcggccgcagaatcgagctcgggccccggcccccggcccgcggcgcggggctcccgggccccgccgcggacgtcgcgccggtcgccccttccccgtagcccgtgcgccctcggcgcggagccccggcccgccgcggtcccgtctcctgggcctgtcccgcccgcgccctccgccggccctcaggtataatacttctccacgtctgcttcaggaagaaagtgcctgccattcttatcatttctaagcaggttcatgccagcccagaacagagaatcagctggagcccagatttcaagttttgagtaaaataccttcaagcgaatgggccctattgtgctcacacattcagaacctgttacccaaggaattccctaaagaattagaagtgcgtctcaccaaccagccaagatgaacatggtgaagaggatcatggggcggccgaggcaggaggagtgcagcccacaagacaacgccttaggactgatgcacctccgccggctcttcacggagttgtgccatcctccccggcacatgactcagaaggaacaagaagagaaactgtatatgatgctgccagtgtttaacagggtttttggaaatgctccgccgaatacaatgacagaaaaattttctgatcttctgcagttcacaacacaagtctcacgactaatggtgacagaaattcgaaggagagcatcaaacaaatccacagaggctgcaagtcgggccatagttcagttcctagagattaatcagagtgaagaagccagtagaggctggatgcttctaacgacaattaatttgttagcttcctctggtcagaaaaccgtggactgcatgacaacaatgtcagtgccttccaccctggttaaatgtttatatctgttttttgaccttccacatgtgcctgaggcagttggaggtgcacagaatgagctacctctagcagaacgtcgaggactactccagaaagtttttgtacagatcttagtgaaactgtgcagttttgtttcccctgcggaggagctggctcagaaagatgatctccagcttctattcagtgcaataacctcttggtgccctccctataacctgccttggagaaagagtgctggagaagtcctcatgaccatatctcgtcatggtcttagtgtcaatgtagtgaagtatattcatgagaaagagtgtttatctacatgtgttcagaatatgcagcaatcagatgacctgtctcccctagaaattgtcgaaatgtttgctgggctttcttgtttcctcaaagattccagcgatgtttcccaaacacttctggatgattttcggatatggcaaggatataattttctttgtgatctcttgcttagattggaacaagcaaaagaggcagaatccaaagatgccttgaaagatctggttaatctgataacttccctaacaacatatggtgtcagtgaactaaaaccagctggtattaccacaggggcaccctttttattgcctggatttgcagtacctcagcctgcaggcaaaggtcacagtgtgagaaacgtccaggcctttgcagttcttcagaatgcatttttaaaagcaaaaaccagcttccttgcccaaatcatccttgatgctatcacaaatatttacatggctgacaatgccaattacttcatcctagagtcacagcacacattgtcacagtttgcagagaagatttctaaactcccagaagtacaaaacaaatactttgagatgctggagtttgttgtttttagcttaaattatataccttgtaaagaacttattagtgtcagtatcctcttaaaatctagctcttcttatcactgtagcattattgcaatgaaaacacttcttaagtttacaagacatgactacatatttaaagacgtgttcagggaggttggccttttggaggtcatggtaaaccttttgcataaatatgctgccctgttgaaggatccaactcaggcactaaatgaacaaggggactcaagaaataatagttcagttgaagaccaaaaacacctggctttattggttatggagaccttgacagtgcttcttcaaggatcaaacacaaatgcaggaatttttcgagaatttggaggtgcaagatgtgcacataatatagtaaagtaccctcaatgccggcagcatgccttgatgactatccaacagctggtgctctccccaaatggggacgatgacatgggcactctcctggggctaatgcattcagccccaccgacggaattgcagttgaagactgatattttaagggccctcctgtcggtccttcgagaaagccatcgttcaagaacagtttttaggaaagttggaggatttgtgtacattacatccttgctcgttgctatggaaagatctttgagctgtccacccaagaatggctgggagaaagtgaaccagaatcaagtgtttgaacttcttcacactgtgttctgcacgttgactgcagcaatgcgctatgagccagccaactctcatttcttcaaaacagagattcagtatgagaagttggcagatgctgttcgatttcttggctgcttctcagacctaagaaaaataagcgccatgaatgtcttcccctcaaatacacagccatttcaaagacttttagaggaagatgtaatctcaatagaatcagtgtcacccacgttacggcactgcagtaaactttttatttatctttacaaagtagccacagattcttttgacagtcgtgcagaacagatccctccttgcctgacaagtgagtcttctctcccctctccttggggtacaccagctttgtccaggaaaaggcatgcatatcattctgtttcaactccccctgtttaccctcctaaaaatgttgccgacctgaaactacatgtgacaacttcatctctgcagagttctgatgcagtcatcattcatcctggagccatgcttgccatgctggacctactggcctctgttgggtcagtgacacagccagaacatgctttggatcttcaacttgccgtggcaaatattttacaatccctggtgcacacagaaaggaaccagcaagtcatgtgtgaagctggtcttcatgcacgactgctgcagaggtgcagtgctgcattggctgatgaggaccactcactgcacccgcccctgcagcggatgtttgaacgattagcctctcaggctctggaacccatggtgttgagggagtttttacgtttggcaagtcctttaaattgtggtgcctgggacaaaaaactgctaaaacaatatagggtccacaaaccaagttcactgagttatgaaccagaaatgagaagtagtatgatcacatctctggaaggtctgggtactgataatgtttttagcttacatgaagataaccattaccggataagcaagagcctggtaaaatctgcggaaggaagtactgtacccctgaccagggtgaagtgtctggtctccatgacaaccccacatgacatcagacttcatgggtcatcagttactccagcttttgttgaatttgacacatcacttgaagggtttggatgtctttttttgcccagtttggcccctcataatgctcctacaaataataccgtcacaacaggtcttattgatggggctgtggtcagtggcattggttctggtgaaagattcttccctcctccctccggcttaagttactctagctggttttgtattgaacattttagttctcctccaaataaccaccctgtcagacttcttactgttgtgcgccgagcaaattcttctgagcaacattacgtgtgccttgcaatagttctatcagcaaaagaccgatctctgattgtttccaccaaagaggaactcctccaaaattatgttgatgattttagtgaagagtcctcattttatgaaattctcccatgctgtgctcgctttcgatgtggagagcttatcattgagggacagtggcatcatttggtcctggtaatgagcaaaggcatgttgaaaaacagtactgcagccctttatattgatggacagcttgttaacactgtaaagcttcattatgtccacagtactccagggggttcaggttcggcaaatccaccagtggtgagcacggtctatgcctacattggtactccacctgcccaacgccaaattgcctcattggtttggcgcctgggacccacacattttctagaagaagttttaccttcttcaaatgttactaccatttatgaacttggaccaaattatgttggaagctttcaggctgtatgtatgccatgtaaagatgcaaaatccgaaggggtggtgccatcccctgtgtcattagtaccagaggagaaagtgtcatttggcctctatgcactctctgtgtcgtctctaacagtggcaagaatccggaaagtgtataacaaattggatagcaaagccattgctaagcagttaggcatttcctcacatgagaatgccactcctgtgaagttgatacacaattcagcaggacatcttaatggatctgcacggacaattggggccgctctgattggatacttgggagtaagaacatttgtccctaagcctgttgccactactttgcagtacgttggtggagctgcagccatcctgggcctggtggccatggcctctgatgtggaagggttatatgcagcagtcaaggccctggtttgtgtggtcaagagtaacccactagccagcaaagaaatggaaagaatcaagggctaccagttgctggcaatgttgcttaagaagaaacgttcccttcttaacagccacatcctccatctaactttttctttggtgggaactgttgatagtggacatgagacctccattattccaaattcaactgctttccaggacctcctctgtgattttgaagtctggctccatgcaccatatgaacttcatctttccttatttgaacactttattgaactgctcacagagtccagtgaagcctcaaagaatgccaaattaatgagagaattccagttaatcccaaagctgctcctgactcttcgagatatgtctttatcccagcctactattgctgctattagtaatgtcctgagcttcttactgcaaggttttcctagcagcaatgatctgctcagatttgggcagtttatttcttctactttgccaacctttgcggtttgtgagaaatttgtagtaatggaaataaataatgaagagaagcttgacactggaactgaagaggagtttggaggtcttgtatcagctaatcttatacttttgaggaacagacttctggatatcttgctaaaactaatttatacatctaaagaaaagacaagcattaatttgcaagcttgtgaagaactggtgaagacactgggttttgactggatcatgatgtttatggaggaacacttacattccaccacagttacagcagccatgaggattcttgttgtcctactaagtaatcagtctattctcatcaagtttaaagaaggactcagtggtggaggatggcttgaacagacagattctgtcttaactaataagattggaactgtattaggattcaacgtgggcagaagtgctggtgggagatcgacggtcagggagattaaccgagatgcttgtcattttcctggttttccagtccttcagtcattccttcctaaacacactaatgtccctgccctctattttctcctcatggccttgtttctgcagcagccagttagtgagctgcctgagaacctgcaggtcagtgtgcctgtcatcagctgccggagtaagcagggttgccagtttgatttggattccatttggacattcatctttggagttcctgcctccagcggaactgtggtctcttctatccataacgtatgcacagaagctgtttttttattattgggaatgctccgcagcatgctgacttcaccttggcaatcagaagaagagggatcttggctccgagaatatcctgtgaccctgatgcagttcttcagatatttgtatcacaacgtgccagaccttgcctccatgtggatgagccctgacttcctgtgtgcattagcagccaccgtcttccccttcaatattcgcccttactcagagatggtgactgaccttgatgatgaagttggatctccagcagaagagtttaaagcgtttgcagcagacacagggatgaacaggagccaatcagagtactgcaatgtgggcaccaagacatatctgaccaatcacccggctaaaaagttcgtttttgacttcatgcgggtcttaatcatagacaacctctgtctcactcctgccagcaagcaaactccactaattgatcttttgttggaggcttcccctgaaaggtctacaagaactcagcaaaaagaatttcaaacttacattttggatagcgtgatggaccatttgcttgcagctgatgtgttattaggggaagatgcatctctgcctattaccagtggaggaagctaccaggtattggtgaacaatgtgttttatttcacacagcgtgtggtggacaagctttggcaaggcatgttcaacaaagaatctaaacttcttatagattttataattcaactaattgcacagtcaaagagaagatcacagggattgtcactggatgcagtgtatcattgcctcaataggaccatcttgtaccagttctcacgggcacacaaaaccgttcctcagcaagtagctctgcttgattcactcagggtcctcactgtaaacagaaacttgatcctgggacctgggaaccatgaccaagaattcattagctgtctggcccactgcttgataaatctacatgttggaagcaacgtggatggatttggactggaagcagaagcccgcatgaccacatggcacattatgatcccctcggacattgaaccagatggtagttacagccaagatattagtgaagggcgtcagcttctcataaaagctgtcaacagagtttggactgaactgatacatagtaagaaacaagtcttagaggaacttttcaaagtaactctacctgtgaatgaaaggggccacgtggacatagctacagcaaggccactcattgaagaagctgccctgaagtgctggcagaatcatttggcccatgaaaagaaatgcataagtcgaggagaagctttagcgcccaccacacagtccaaattatcccgtgtcagcagtggctttggtctttccaagttaacaggatcaagaaggaatcgaaaagaaagtggtcttaataaacacagtctttccacccaggagatttcgcagtggatgtttactcacattgctgttgttcgtgacttagtagatacacaatataaagaatatcaggagcgtcagcagaatgccctgaagtacgtgacagaagagtggtgtcagatcgagtgcgagctgttgagggagcgggggctgtggggccctcccatcggctcccacctcgacaagtggatgctggagatgacagaagggccctgcaggatgaggaaaaagatggtgcgaaatgatatgttttataaccattacccttacgtgccagaaactgagcaagagacaaatgtggcgtctgagatcccaagtaaacagcctgagacacccgatgatattcctcaaaagaaacctgctcgatatagaagagccgtaagttatgacagtaaagagtactacatgcgactggcctctggcaatcccgccattgtccaagacgccattgtggagagttcagaaggtgaagctgctcagcaagaaccagagcatggggaagacactattgctaaagtcaaaggtttggtcaagcctcctctaaaacgctcccgatctgcacctgatggaggagatgaggagaaccaggagcagctacaagaccagattgctgagggcagctccatagaagaggaggagaaaacagataatgctaccttactgcgcctgttagaggaaggagaaaagatccaacacatgtaccgctgtgctcgagtccagggcctagataccagtgaggggctccttctttttggtaaagagcatttttatgtgattgatggatttaccatgacagcaaccagggaaataagagatattgaaaccttacctccaaatatgcatgagcctattattcctagaggagccaggcaaggccctagtcaactcaagagaacatgcagcatttttgcatatgaagatatcaaggaagttcataaaaggagatatctcctgcagcctattgctgtggaagttttctctggagatggacggaattacctccttgcttttcagaaaggaatcagaaacaaagtctatcaaaggtttttggctgtagtgccatctctaacggacagttcagaatctgtatctgggcaacgaccaaacacgagtgtggagcagggatctgggttacttagcactttggttggagagaagtctgtgactcagagatgggagagaggtgaaatcagcaacttccaatatttgatgcatttgaacactttggctggcagatcatataatgatctcatgcagtatcctgtcttcccctggatccttgcagattatgactcagaggaggtggatcttactaatcccaagacgtttagaaacctggctaagccaatgggagcacaaacagatgaacgattagctcagtataagaagcggtataaagactgggaggatcctaatggagaaactcctgcataccactatgggacccactattcatctgcaatgattgtggcctcataccttgtaaggatggagcctttcacacagatattcttaaggctacagggtggccactttgacctggctgaccggatgtttcacagtgtgcgcgaggcctggtattcagcgtcaaagcacaatatggcagatgtaaaagaacttatcccagagttcttttatttaccagaattcctgttcaattccaacaactttgatctaggctgtaaacaaaatggcaccaagcttggagatgttatccttccaccctgggcaaaaggggacccacgagaattcatcagagtccatcgtgaggctttggagtgtgattacgtgagtgcccatctacatgagtggattgacttaatcttcggttataaacagcaaggccctgctgcagtagaagctgtaaatgtcttccatcatcttttttatgagggtcaagtggatatctacaacatcaatgacccactaaaggagacagccacaattgggttcattaataacttcggtcagatccctaaacagttatttaaaaaacctcatccaccaaagcgagtgagaagtcgactcaatggagacaatgcaggaatctctgtcctaccaggatctacaagtgacaagatcttttttcatcatctagacaacttgaggccttctctaacacctgtaaaagaactcaaagaacctgtaggacaaatcgtatgtacagataaaggtattcttgcggtggaacagaataaggttcttatcccaccaacctggaataaaacttttgcttggggctatgcagacctcagttgcagactgggaacctatgagtcagacaaggccatgactgtttatgaatgcttgtctgagtggggccagattctctgtgcaatctgccccaaccccaagctggtcatcacgggtggaacaagcacggttgtgtgtgtgtgggagatgggcacctccaaagaaaaggccaagaccgtcaccctcaaacaggccttactgggccacactgataccgtcacctgcgccacagcatcattagcctatcacataattgtcagtgggtcccgtgatcgaacctgtatcatttgggatttgaacaaactgtcatttctaacccagcttcgagggcatcgagctccagtttctgctctttgtatcaatgaattaacaggggacattgtgtcctgcgctggcacatatatccatgtgtggagcatcaatgggaaccctatcgtgagtgtcaacacgttcacaggtaggagccagcagatcatctgctgctgcatgtcggagatgaacgaatgggacacgcagaacgtcatagtgacaggacactcagatggagtggttcggttttggagaatggaatttttgcaagttcctgaaacaccagctcctgagcctgctgaagtcctagaaatgcaggaagactgtccagaagcacaaatagggcaggaagcccaagacgaggacagcagtgattcagaagcagatgagcagagcatcagccaggaccctaaggacactccaagccaacccagcagcaccagccacaggccccgggcagcctcctgccgcgcaacagccgcctggtgtactgacagtggctctgacgactccagacgctggtccgaccagctcagtctagatgagaaagacggcttcatatttgtgaactattcagagggccagaccagagcccatctgcagggcccccttagccacccccaccccaatcccattgaggtgcggaattacagcagattgaaacctgggtaccgatgggaacggcagctggtgttcaggagtaagctgactatgcacacagcctttgatcgaaaggacaatgcacacccagctgaggtcactgccttgggcatctccaaggatcacagtaggatcctcgttggtgacagtcgaggccgagttttcagctggtctgtgagtgaccagccaggccgttctgctgctgatcactgggtgaaggatgaaggtggtgacagctgctcaggctgctcggtgaggttttcactcacagaaagacgacaccattgcaggaactgtggtcagctcttctgccagaagtgcagtcgctttcaatctgaaatcaaacgcttgaaaatctcatccccggtgcgtgtttgtcagaactgttattataacttacagcatgagagaggttcagaagatgggcctcgaaattgttgaagattcaacaagctgagtggagaccatggtctgtagaccccttcccgattctcctgtcccagcttggaaggcattgaaaacagtctccgtttacacatctcttcataccacgtgtttgaagtgttaaaattcaaagggatcattgaataaaacgggtgtagagtacaggaatggggcagacgcgattcaggtgaacagcacaagaagaatatgaggtggttcctaggagcaacactttcgacctccagttctccctgatgacagtagctgtctccaagagaaaaatcctcacttattaactctcttttcttgcatctcatttttatagagctactcatccttatttggaaaaaccaacaacaaaaaaggcttttagaaaatggttgtaaatctgacttctttgcaagtaactatgtatattgtaaatagatataaaaggccttttttctaaataaggacttaactgcctgtaacatgaaacttcaaactaaaccactaactcaatgaactacttatggtttgtctgacatccctcacttaccaattaattataaatatgtttttttaaatccccaaagacattatctgtggtctttttttcctttcaagctcagcctgtgtgcctgatgtcatttctttcaagttgcccacagtatctccacttaaactaggctagtaaccaaaataatgtggaccttctttaggaaacagtgtgggagaataggagtccagccgtaagataaactggaaatatttgggcgtcttgtacctggctacgcaccacctcagtgttgttcctacataaacagggccccttttaaacttgtatgtggactgctgtttggtcaaagaataccttcttagcattgcagaaaggtggtcagatgaccagtgtagtgcaggaaacagccctgtctcaactaatggaaatatatttgcatgtaacccaaaattagcttatcttgcatagaacataataagtatgtgtctttggtgacactaatgttctactatagcttattttcaaacaaggggtaaaaaaaggaaagaaagaagtgtacagaattaacatataaactttgttgtaaaactgaatcatgtcagaactgcttaaaattaacctttaccatttaatgtcatctacctgaaaacagtgagatttatactgtatcaatgtctatttttttgtttttgctatgaatataattacagtattttaatatttagttatttaatttgttctactagttggatacagaacacacaaatccagggggattaaagctggaaggggctaagagattagtttacagagaaaaggcttggtggtgggatttttttaaatgtgtgttatgtacatatatatatatatataatatatattaaaaatgaaacaattaatctagattttaacattttcagaaacttagtgataacattatgaacaattctaaaagccctgtgatttgaaaaatatagaatcattaatggcccaagataggccttcacaccttcacaggtgcgaaaggaaaggccttcacaccctcacagaggcatcatgcaaaggacagcggctttggcttttccaattttccatctttaggccctggtgagaggcacacttatgcactaaaatgcacatatatgcacatgcattcaaaaataggcatttggtacaatggtgatcttgtacctgatgggctgaaaccagcttaagaacaaatttgttcttcctgatatgataactaggtctccaagagaaaatagaaaggctgctttagtgccttacgcttactaaatttaaatctttatttacctgggtttgagcctacagtctatttatgattacatatcaaaattgattaaaacacttccatttctaaaagttcaaatatacttgttaataaaaggattatcggcattaatactttaatttaaagaaaagttgtgttctgttttcctttctgtgtcttactccccccacactctccctcccccatcaccatcttcaattctaataaataatgctgatgttcaacagttgcagaaattgtgctattatgtaactgtgggccttgcccctgtctggccctctagatgatttgtagcagtgttattctacactttttaaaagaagcgtcctccttttgtccatgaatcatgtttaccccatacccagtggcagaggtgttctttaaagacttgaatatatgaatgtgtgtgtgtagttacttaaaggttattcctctttgtaataggaaactatatgggatgaacacttttaaactttccgacacaacttccattactaactttctaacagaacttccataactagaaggtggaaaccaaaaccctcatggtagtatttcctctggcagctggtgctgtgggcaactgttttgttcaatcgggtttcttttctttttgcctctaatgcagaaatcaacagaatcactcacacatacaagtacactcacatacataaactaattatttctctggatatctttctgtgttccatgtaaatttatttaccaacatctattgtcaacatgtacatctaccttagtatggtctgcattctttttctgagagtacctcatagggctcctgcctgatctttgtagtttgttcattcatccatccacctgttcatttgttcatccatgtattctaacatttctatgtagtgtgcaactctaatgtcatgcttttgaagaagagaatagctgcccatagcagccatccgtctggataatagcaaaacactctagataagttattttgcactttcttatgtataaagttggtagaaacttatttttgctttgtatcatttaaatacattttgttttggtaaatgaactgtgtataaaatatttatgccgttaaaactgtttttagaaagtatttttaatttcagcaagtttggttacttgttgcatgactcttaacacagctgactttttgtgtcagtgcaatgtatattttttgtcctgttattaacttgtaagccctagtaatggccaattatttgtacagcaacagaagtaaattgaagatactggctaagactggattgattgtggacttttatactatattgcagaaaccaatatctgtttcttggtggttatgtaaaagacctgaagaattactatctagtgtgcagtctgtgatatctgaatgttcattgtatatttgtctctgatgcaaaaaggtagagtaacacaattacaatacatgattaaatgcaatagtccaggtacttaagtaatttttttttcatttcaaataaatacctatttaccaccaaaagaaagaaaaaaaaaaaaaa

SEQ ID NO: 3894 - DNA, 4256 bp, Homo Sapiens
  NM_014992
tacgagcggctgtgaaggaaactgtttaaccggatcccattgtacccagagtgcagagccgcctttccagcatgcaggggctgctcagcgtttagtcacatcaagaaatagaacagaattcagccatggccccaagaaagagaggtggacgaggtatttcattcatcttttgctgtttccgaaataatgatcacccagaaatcacgtatcggctgcgaaatgatagcaactttgcgcttcagaccatggaaccagcattgcccatgccccctgtggaggagctggatgtcatgttcagtgaactggtggatgaactggacctcacagacaaacacagagaagccatgtttgcacttccagctgagaaaaaatggcaaatatactgtagcaagaaaaaggaccaggaagaaaacaagggagctacaagttggcctgaattctacattgatcagctcaattccatggctgctagaaaatctctgctggctttagagaaggaagaagaagaagaaagaagtaaaactatagagagtttaaagacagcactgaggacaaaaccaatgaggtttgtaaccagattcatcgacttggatggcctatcatgtatcctcaactttctaaagaccatggactacgagacctcagagtctcgaatacatacttctctcattggctgtataaaggcgttaatgaacaactctcaaggccgggctcacgtcctggctcattctgagagtattaatgtaattgctcagagtctgagcacagagaacattaaaacgaaggtggccgtgctggaaatcttgggcgccgtgtgcctggttcccgggggccacaagaaggttctgcaggccatgctgcactaccagaagtatgccagcgaaaggacccgctttcagacattaattaacgacttggataaaagcactgggcggtatcgagatgaagtgagtctcaagactgccatcatgtccttcattaatgcagtgctcagccaaggtgcaggagtggagagtttggactttagacttcatcttcgctatgaatttctgatgttaggaattcaacctgtaatagataaattaagggaacacgaaaattcaacattagataggcatttagacttttttgaaatgctccgaaatgaagatgaactagaatttgccaaaagatttgaactggttcacatagacacaaaaagtgcaactcagatgtttgagctgaccaggaagaggctgacacatagtgaagcttacccgcatttcatgtccatcctgcaccactgcctccaaatgccttacaagaggagtggcaacactgttcagtactggctactactagatagaattatacagcagatagttatccagaatgacaaaggacaggaccctgactccacacctttggaaaactttaatattaagaatgtcgtacgaatgttggttaatgaaaatgaagttaagcagtggaaagaacaagcggaaaaaatgagaaaagagcacaatgagctacaacagaaactggaaaagaaagaacgagaatgtgatgctaagactcaagagaaggaagagatgatgcagaccttaaataaaatgaaagagaaacttgaaaaggagactactgagcataagcaagtcaagcagcaggtggcggacctcacagcacagctccatgagctcagcaggagggccgtctgtgcttcaatcccaggtggaccctcgcctggagcaccaggagggccctttccttcctctgtgcctggatctctccttcctcccccaccacccccacctctaccaggtgggatgcttccccctccaccgcctcccctccctccaggtggccctcctcctcccccagggcctcctcccttaggggcaatcatgccacctcctggtgctccaatgggcctagcactgaagaagaaaagcattcctcagcccacaaatgccctgaaatccttcaactggtctaaactgcccgagaacaaactggaaggaacagtatggaccgaaattgatgatacaaaagtcttcaaaattctagatcttgaagacctggaaagaaccttctctgcctatcaaagacagcaggatttctttgtgaacagtaactccaagcagaaagaagcagatgccattgatgacactctgagttccaaacttaaagttaaagagctttcggtgattgatggtcggagagctcagaattgcaacatccttctatcgaggttgaaattatccaatgacgaaatcaaacgggcaattctaacaatggacgaacaggaagatctgcccaaggacatgttggaacagctcttgaaatttgttcctgaaaaaagtgacattgacctattggaggaacataaacacgaactggatcggatggccaaggctgataggttcctttttgagatgagccgaattaatcactatcagcaaaggttgcaatcgctgtacttcaaaaagaagtttgcagagcgtgtggcagaagtgaaacctaaagtggaagcaattcgttctggctcagaagaggtgtttaggagtggtgccctcaagcagttgctggaggtggttttggcatttggaaattatatgaataaaggtcaaagagggaatgcatatggattcaagatatctagcctaaacaaaattgctgacacaaaatccagcatcgacaaaaacattacccttttgcactatctcatcactattgtggaaaataagtaccccagtgttctcaatctaaatgaagaattgcgagatattcctcaagctgcgaaagtaaacatgactgagctggacaaagaaataagtaccttgagaagtggcttgaaagcagtagagacagagctggaatatcagaagtctcagcccccacagcccggagataagtttgtgtctgttgtcagccagttcatcacagtagccagcttcagcttctctgatgttgaagaccttctagcagaagctaaagacctgtttactaaagcagtgaagcactttggggaagaggctggcaaaatacaaccagatgagttctttggcatttttgatcaatttcttcaagctgtgtcagaagccaaacaagaaaacgaaaatatgagaaagaaaaaggaggaagaagaacgtcgagctcgcatggaagctcagctcaaagaacaacgtgaaagggaacgtaaaatgagaaaagctaaagagaatagtgaagaaagcggagagtttgatgaccttgtttcagctttacgctcaggagaagtgtttgacaaagacctttctaaattgaaacggaatcgcaaacgtattaccaaccagatgactgacagcagcagagagagaccaatcacaaaacttaatttctaattttccatgaatacttttttttagaaagctcattagcagccctctaaagtgactagaacgtttcattacactgccttgcaatccaaacagtggcaattttttccttcatctgtgagtgaatgtgtgaacgtgtgtatgtaaatgtatgtgtgtatatattaaaaaatgtatatagatgtctgagtgttgtctggagacctatacgtatggttaaaaagatttatgttaatgtatgtgctccaaaacctttcgtgtatgcattcacattgagtgtggctcattttctttccccgaacgccatgactgttcagaagcacaatactatctcctgaaagagataagagacattccctagattcaaaggcaaaacagaagaaacaaacaaacaaacaaacaaagcttgcaaaatattttatggtttccaagcttgatatcctttaaaattattttcattgatggaactggagttgttggaaaaacatagatttaaaatgatttttgatagctgacattgtgatgttgatgtatcacatcagtaataggaccagctttgaatttctgacattggtgtggggatacagtctgtaaatgtttattgagaacatcttgcacacaatttgaattatgtagaatgtcaatcaagtttttgtatatttaaaagttggacatcaattttttcccctgatttcatcaagttatctctgccaagtgctcttgataatttcttcagatttttggaaaaaaacactatataaatgcaatccatgctttttttaaagaacaacattgccagagtatgcttgttctaacaatatagatatataaaccttaaaaataataaaatatctcacccaagacttaaaggaagaattctctgaagggataaagattact

SEQ ID NO: 3895 - DNA, 7247 bp, Homo Sapiens
  NM_014994
ggctccgcccacccagcccgcggcttggcccaggcggtagttcgcgttttgagccgatcgtgccaccatagctcctgctgctgcctctaccgctgcggctaccgcggcggagctgaaattgccgaacgcgatgcccgagggcgctgtgagcggggtggccttagctcgccgaggctggtcagtgagagggcatactgggaagccctctggagtgggaagacagtgccgctgttgagacaagacccaggactgggccggggactgtcccaaagggtttctcgtcataatggctgtggaagggtcaaccattaccagccggatcaagaatctgttgagatctccatccatcaaactgcgcaggagtaaggcaggaaaccgacgagaggacctcagctccaaggtgaccttggagaaggtgctgggaattacagtgtctggaggcagaggacttgcctgtgacccccgatcaggtttagttgcttacccagcagggtgtgtggttgtgttgttcaatccccggaaacacaaacagcaccacatcctcaacagttccaggaaaaccatcactgcccttgccttctcccctgatggcaagtacttggtcactggagagagtgggcacatgcctgccgtgcgggtttgggacgtggcagagcacagccaggtggccgagctgcaggagcacaagtatggtgtggcttgtgtggccttctctcctagcgccaagtacattgtctctgtgggctaccagcatgacatgatcgtcaacgtgtgggcctggaagaaaaacattgtggtggcctccaacaaggtgtccagtcgggtgacagcagtgtccttctctgaggattgcagctactttgtcactgcaggcaaccgacacatcaaattctggtatctcgatgacagcaagacctcaaaggtgaatgccactgtgcccttgctgggccgctcagggctgctgggagagctacggaacaacctattcactgatgtggcctgtggcagaggaaaaaaggcggacagtaccttctgcatcacgtcctcagggctgctgtgcgagttcagtgatcgaaggcttttggacaagtgggtggagctgaggaccacagtggcccactgcatctctgtgagccaagactacatcttctgtggctgtgctgatggcaccgtgcgccttttcaacccctctaacctgcacttccttagcaccttgccccgaccccatgctctggggacagacattgctagcgtcaccgaggccagtcgcctcttctctggagtggcgaatgccaggtatccagacaccattgccttgacctttgatcctactaatcagtggctgtcttgtgtgtacaacgatcatagcatttatgtttgggatgtgagggaccccaagaaagtgggcaaggtgtactcggctctgtatcattcttcctgcgtctggagtgtggaggtctaccccgaggtgaaggatagtaaccaggcctgcctgccccccagttcctttattacctgctcctcagacaacaccatccgcctgtggaacacagagagctccggggtgcatggctccaccctccaccgaaacatcctcagcagtgacctcattaaaatcatctatgtggatgggaacacccaggccctgctggacacagagctgcctggaggagacaaagctgatgcatccctgttggatccccgcgtgggcatccgctcggtgtgtgtcagccccaatggacagcatctagcatcaggggaccgtatgggcacacttagggtgcacgaacttcagtccctgagtgagatgctgaaggtggaggcccatgactctgagattctgtgcctggagtattctaagccagacacaggtctgaaactgctagcatcggcgagccgggaccggctgatccatgtgctggatgccgggcgggagtacagcctacagcagacgctggacgaacactcatcctccatcactgctgttaagtttgcagccagtgatgggcaagtccgcatgatcagctgtggagcagacaagagcatctacttccgcactgcgcagaagtctggagatggagtgcagttcacacggacacaccacgtggtgcggaagacgaccctctatgacatggatgtggagcccagctggaagtacacggctatcggctgccaggaccgaaatattcggatatttaacatcagcagtggaaagcagaagaagctgtttaaagggtcacagggtgaggacggcacactcattaaggtgcagacagacccctcagggatctacattgccaccagctgttctgacaagaatctctccatttttgacttctcctcaggcgagtgcgtggccaccatgtttggccactcagagattgtcactggcatgaaatttagtaatgattgtaaacatctcatctctgtgtctggggacagctgcatatttgtgtggcgcctgagctctgagatgaccatcagcatgaggcagcgtctggccgagttgcgccagcgtcagcggggcggcaagcagcaaggaccatcctctccccaaagggcttctggacccaaccggcaccaggccccatcaatgctgtctcctggaccggctctctcatcagacagtgacaaggagggagaagatgaggggactgaagaagaacttccagcactgcccgtccttgccaagagtaccaagaaggcactggcctcggtccccagcccagctttgccccgaagcctgtcccactgggagatgagtcgggcacaggagtccgtggggttcctggacccagctcctgcagccaacccaggacccagaagaagagggcgctgggttcagccaggtgtggaactgagcgttagatccatgctggatctgcggcagctggaaacactggccccaagcctgcaggaccctagccaggactcgctggccatcatcccatctggtcccaggaagcatgggcaggaggcccttgagacttcactcactagccagaatgaaaagccccctcggcctcaggcttcccaaccttgttcctatccccatattatccgattattgtcacaagaggaaggggtctttgcccaagatctggaacctgcacccattgaagatggtattgtctacccggagccgagtgacaaccccaccatggataccagtgagttccaagtgcaggctccagcccggggaactctgggaagagtgtacccaggcagcaggagctcagaaaagcacagccctgacagtgcctgctctgtggattacagcagcagctgcctttccagcccggagcaccccactgaagactctgagagcacggagcccctcagtgtggatggcatctcctcagaccttgaagagccagctgagggtgatgaagaagaggaagaagaggagggaggcatgggcccctatgggctacaggagggcagcccccagactccagaccaggagcagtttctaaaacagcactttgagactctggccagtggagctgctccaggggccccagtgcaggtcccagagaggtcagagtctcggagtatctcttcacgattcctgttgcaagtacagacccgcccactcagggaaccatccccatcctcctcaagcctggcactgatgtcgagaccagcccaggtgccacaggcatctggtgagcagccgagaggcaatggtgccaatccccctggagcacccccggaggtggaaccgtcctctggcaaccccagcccccagcaggcagcctctgtgctgttgccacgatgccgtctcaaccctgacagcagctgggctcccaagagagtggccacagccagccccttttctggactccagaaggcccagtctgtgcacagtctggtgccacaggaaagacatgaggccagtctgcaggccccttcaccaggcgcactgctgtctcgggagatcgaagctcaggatggtctgggctccctgcccccagctgatggccgtccgtctcggcctcactcctatcagaaccccaccaccagttccatggccaagatatcccgcagtatctctgttggggagaacctgggcctggtggctgaacctcaagctcatgcccccatccgagtctcaccactcagcaagctggccctgcccagccgggctcacctggtcctggacatccccaaaccactgcctgaccgtcctaccctggctgcattctctcctgtcaccaaaggccgggcccctggcgaggcagaaaagcctggcttcccggtgggcctaggaaaagctcacagtacaactgagagatgggcctgtttgggggagggcaccactcccaagcctaggacagagtgccaggctcatcctgggcccagcagcccctgtgcccagcaactgccagtcagcagcctcttccaaggccctgaaaacttgcagcccccaccccctgagaagactcccaaccccatggaatgcaccaagccaggggcagccctgagccaggactcagagccagcggtgagcctggagcagtgtgagcagctggtggcagagctccgcggcagcgtgcgccaggcagtgcggctctaccactcggtggctggctgcaagatgccctcagcagagcaaagtcggattgcccagctcctcagagacaccttctcttcagtgcgacaggagctggaagctgtggctggggcagtgctgtccagcccaggcagcagccctggggctgtgggagccgagcagacacaggccctgctggagcaatactcagaactgttgcttcgagccgtggaacggcgtatggaacgcaaactctgagttctggaagcctgtcccaagtgaatgaatgctccagcgattccaaactgcagcccctctgcccctcaccaaaacctgcggggctgcttggagtggaaagcagggagcagtgttcagaggcaaagcagccttcccagccgctcctcgtggggggcctgtatttattaatttatttccctgactgttgcctcacttccttggaactcctgcctccacagcccctccagtggcagggacaggtcttgggtctttgtcatcttggtgctgtgagaggtaggagggcagcctgccccatctaggaatctgggaagggctggccctctcttagaagccatttgaaattactgcagggattagctccctgtggtggagcatacacagggtactctggggtcgaggtgagaggtgatgtggtattcagtgcccgtcagccaactgtgggccttcacctctacctgcacttcccctctcacaccagctgcactcccgtggctgccagagcagggtggttttccccaatacctggagctcagaaaggcagagccatctggccctccagggtgtccccagccatcaggagacttgagttggtatttggacctgagcccgcacattccactcccattctccctccaagaggggcccagcattgtatttccctgtgaccccttactctcctggccagaacttgagccagctgtgggatgttgctgcaggacagtaagccctcacctgggcaaacatgaagctctggcctcctttcctcagccccttgttcttccctgtcctccaccctggaccccagccggctgctggagcccagaggccaccttctccctgcatcctgaatgatgcttagtcagaagcctgtgttggaacatccctcgtttacggggcgctggcctacctcctgaggacctcagccacagatgagatcacacgcatgcacgtgcacacatgtacacacacacacctacctgcacagcacgctgttgagtgttggttgctagagtatctggctggctgctgtgtgcctggtttcctcacatcctgcctcagcttcaccaccctggcttatgtggaacacctatcagggagcagaaaaggggtgcagtacactaagtgaacccagattctggattcttggtgtccacagcctagctgatacgagatagcccataggacacctggtttaggtagaaggagcctcctcaaaggcagtgctgggcacccacgggtgtgctggatactggagtttgagaggagggaggtgctggggccaaaggagacactagaaaagtggtagatgggacaggtaagtggcagaggtgaggggataagttagaatgtaaaagggcagtaattaggggtgagggaaaggagataggggaccctaggaggtagagtgggaccatgtcgtgaggcagttgaagagttgaggaaaggtttttctgggccctactgctcccctctgctgcaggtaagtcagagcagctttaccacagcttcaggccacgagagccccttcacccgccctgctgcgccataggcagaggcttataaagaaatgggttctgggccaggtgtggtggctcaagcctgtaatcccagcactttgggaggccgaggcgggtggatcacctgaggttaggagttcgagatcagcctggccaacatggtgaaaccctgtctactaaaaataaaaaaattagctgggcgtggtggtgggcgcctgtaatcccagctactcgggaggtttaggcaggagaatcgcttgaaccctggaggtggaggtggaggttgcagtgagccgagatcgcgccattgcactccaacctaggtgacaaagctacacgccatctcaaaaaaaaaaaagaaaaagggttacaaaaggttcccagctccggggcatcagcctgagtgcgcttgagctgctccaaacctggcccttccccactcctctagcatcgccacccgcatggccctggaactcccgcggcggcgggggcgggcccgtgcctgctgtgccccgacttcccacaccagccgcgcccaccgcaggtgggactcaggttcgccctctgggccaggtccttcacgaggagggagctacccttcgccagaagtttgtgagaatgtggccgcccttttcctgccctctgccccatgtgggtggggggcctcgtggcccggccggcgccccgtccccttctgcatgtctgaggccaccggcaaccgccgccccactccagatttgcccccgccttgttttgaaagccccttatttataacttttatactttgtgcaggtcgcggcgcttcctgcctcatcctcggctgcatggggcgggggcgctgtttttaacgtgcccgtttgtactgatgtatgaacttgtcaataaacacaattgtttgttaaaaaaaaaaaaaaaaa

SEQ ID NO: 3896 - DNA, 4227 bp, Homo Sapiens
  NM_015002
cgcacgcgcgcgcgcggcggccccaggtacgcggacaagatggcggcggcagcagtcgacagcgcgatggaggtggtgccggcgctggcggaggaggccgcgccggaggtagcgggcctcagctgcctcgtcaacctgccgggtgaggtgctggagtacatcctgtgctgcggctcgctgacggccgccgacatcggccgtgtctccagcacctgccggcggctgcgcgagctgtgccagagcagcgggaaggtgtggaaggagcagttccgggtgaggtggccttcccttatgaaacactacagccccaccgactacgtcaattggttggaagagtataaagttcggcaaaaagctgggttagaagcgcggaagattgtagcctcgttctcaaagaggttcttttcagagcacgttccttgtaatggcttcagtgacattgagaaccttgaaggaccagagattttttttgaggatgaactggtgtgtatcctaaatatggaaggaagaaaagctttgacctggaaatactacgcaaaaaaaattctttactacctgcggcaacagaagatcttaaataatcttaaggcctttcttcagcagccagatgactatgagtcgtatcttgaaggtgctgtatatattgaccagtactgcaatcctctctccgacatcagcctcaaagacatccaggcccaaattgacagcatcgtggagcttgtttgcaaaacccttcggggcataaacagtcgccaccccagcttggccttcaaggcaggtgaatcatccatgataatggaaatagaactccagagccaggtgctggatgccatgaactatgtcctttacgaccaactgaagttcaaggggaatcgaatggattactataatgccctcaacttatatatgcatcaggttttgattcgcagaacaggaatcccaatcagcatgtctctgctctatttgacaattgctcggcagttgggagtcccactggagcctgtcaacttcccaagtcacttcttattaaggtggtgccaaggcgcagaaggggcgaccctggacatctttgactacatctacatagatgcttttgggaaaggcaagcagctgacagtgaaagaatgcgagtacttgatcggccagcacgtgactgcagcactgtatggggtggtcaatgtcaagaaggtgttacagagaatggtgggaaacctgttaagcctggggaagcgggaaggcatcgaccagtcataccagctcctgagagactcgctggatctctatctggcaatgtacccggaccaggtgcagcttctcctcctccaagccaggctttacttccacctgggaatctggccagagaaggtgcttgacatcctccagcacatccaaaccctagacccggggcagcacggggcggtgggctacctggtgcagcacactctagagcacattgagcgcaaaaaggaggaggtgggcgtagaggtgaagctgcgctccgatgagaagcacagagatgtctgctactccatcgggctcattatgaagcataagaggtatggctataactgtgtgatctacggctgggaccccacctgcatgatgggacacgagtggatccggaacatgaacgtccacagcctgccgcacggccaccaccagcctttctataacgtgctggtggaggacggctcctgtcgatacgcagcccaagaaaacttggaatataacgtggagcctcaagaaatctcacaccctgacgtgggacgctatttctcagagtttactggcactcactacatcccaaacgcagagctggagatccggtatccagaagatctggagtttgtctatgaaacggtgcagaatatttacagtgcaaagaaagagaacatagatgagtaaagtctagagaggacattgcacctttgctgctgctgctatcttccaagagaacgggactccggaagaagacgtctccacggagccctcgggacctgctgcaccaggaaagccactccaccagtagtgctggttgcctcctactaagtttaaataccgtgtgctcttccccagctgcaaagacaatgttgctctccgcctacactagtgaattaatctgaaaggcactgtgtcagtggcatggcttgtatgcttgtcctgtggtgacagtttgtgacattctgtcttcatgaggtctcacagtcgacgctcctgtaatcattctttgtattcactccattcccctgtctgtctgcatttgtctcagaacatttccttggctggacagatggggttatgcatttgcaataatttccttctgatttctctgtggaacgtgttcggtcccgagtgaggactgtgtgtctttttaccctgaagttagttgcatattcagaggtaaagttgtgtgctatcttggcagcatcttagagatggagacattaacaagctaatggtaattagaatcatttgaatttatttttttctaatatgtgaaacacagatttcaagtgttttatcttttttttttaaatttaaatgggaatataacacagttttcccttccatattcctctcttgagtttatgcacatctctataaatcattagttttctattttattacataaaattcttttagaaaatgcaaatagtgaactttgtgaatggatttttccatactcatctacaattcctccattttaaatgactacttttattttttaatttaaaaaatctacttcagtatcatgagtaggtcttacatcagtgatgggttctttttgtagtgagacatacaaatctgatgttaatgtttgctcttagaagtcatactccatggtcttcaaagaccaaaaaatgaggttttgcttttgtaatcaggaaaaaaaaaaattaatgaaccttaaaaaaaaaaaaaaaggttttgaagggaaaaaaagtggtttcacacctcttgttattccttagagtcacttcaaggcctgtttgaatgtggcaggttagaaagagagagaatgtctttcatttgaagagtgttggacttgtgtgaaaggagatgtgcgtgttggaatctgcttttccaagccgccagggtcctgacggcagcaggacgaagcctgttgtggcgtcttctgggaaagcctgaccgtgtgttcggacggcactggctcctttccgaagttctcagtaactgagcccagagtaactgcacgcctttgtgcagctctggagctccaccaactctcggcctgccagttctcaagcgagctaatcttgtcattaatcgatagaagctaacttccgaagttaggacctagttactttgctctcaacatttaaaataatgcagttgctctagtgaatggggcgttaggggcctgtctctgcacctgtctgtccatctgcatgcagtattctcacccatgttgaatgcctgctgcttgtttaccctttggaaaccctggggtgaccaaggtttggaaagccacctgagaccacttcatagcaagggaaggctttaagcagttactagaaagagatggggatttggcccctggctcctccagcctgaatgagctatttaatccactgtccatgttcctcatcagtcaaatccaaagtcaaaggatttgaacctgcatctggaaacgtaaccactcacagcacctggcccgccaaggttgggaggattgtacactactttcatttaaaggggaaagtttgataatacggaattaattaatatgaatgagatgcattaataagaacctgagcatgctgagagttgcaattgttggttttctggtttgattgatttccttttttcttagacacatcaaagtcaagaaagatggttttacctttactgacccagctgtacatatgtatctagactgtttttaaatgtctttcttcatgaatgcttcatggggctccaggaagcctgtatcacctgtgtaagttggtatttgggcactttatatttttctaaaaacgtgttttggatcctgtactctaataaatcataagtttctttttaaaaattttccaaaacttttctccattttaaaaagccctgttataaacgttgaactttcacaatgttaaaatgttaaatatttggatatagcaacttcttttctcttcaaatgaatgccaagatttttttgtacaatgattaataaatggaacttatccagagaaaccaaaaaaaaaaaaaaaa

SEQ ID NO: 3897 - DNA, 1059 bp, Homo Sapiens
  NM_015004
acgtgcggctcgtggggcagctcggcagcatggcgtccgtgacgctgagcgaggcggagaaggtgtacatcgtgcatggcgtccaggaagacctccgtgtggatggccgtggctgtgaggactaccgatgtgtcgaagtggaaactgatgtggtgtccaacactagtgggtccgccagggtcaagctgggtcacacagacatcttggtgggagtgaaagcagaaatggggacgccgaagctggagaaaccaaatgaaggctacttggagttctttgttgactgttcagccagtgctacccctgaatttgaaggtagaggaggtgatgaccttggcaccgagatcgctaacaccctctatcggatatttaacaataaaagcagtgtcgacttaaagaccctctgcattagtcctcgggagcactgctgggttctctatgtggatgtgctgcttctggaatgtggtggaaatttgtttgatgccatttccattgctgtaaaggctgctctcttcaatacaaggataccaagggttcgagttttggaggatgaagaggggtcgaaggacattgaattgtcagatgacccttatgactgcatacgactaagtgtggagaatgtcccctgcattgtcactctgtgcaagattggctatcggcatgtggtggatgctactcttcaggaggaggcctgctcgctggccagcttgctggtgtcggtgaccagcaagggagttgtgacgtgcatgaggaaagtggggaagggcagcctggacccagagagcatcttcgagatgatggagactggcaagcgtgtgggcaaggtactgcatgcctccttgcagagtgttgtgcacaaggaagaaagcctggggcccaagagacagaaagttggattcctgggatgatttgcacatcaactgctcaactgtggattgttttttacttttccttttaaaccggttcgtatatatttttcttcgctgttacgaatttacagcagcatttgtacatgtaaaattaaaggctattttctggtaaaaaaaaaaaaaaaaaaaaaaa

SEQ ID NO: 3898 - DNA, 3053 bp, Homo Sapiens
  NM_015013
ggcgcggcgggagcgcgcttggcgcgtgcgtacgcgacggcggttggcggcgcgcgggcagcgtgaagcgaggcgaggcaaggcttttcggacccacggagcgacagagcgagcggcccctacggccgtcggcggcccggcggcccgagatgttatctgggaagaaggcggcagccgcggcggcggcggctgcagcggcagcaaccgggacggaggctggccctgggacagcaggcggctccgagaacgggtctgaggtggccgcgcagcccgcgggcctgtcgggcccagccgaggtcgggccgggggcggtgggggagcgcacaccccgcaagaaagagcctccgcgggcctcgccccccgggggcctggcggaaccgccggggtccgcagggcctcaggccggccctactgtcgtgcctgggtctgcgacccccatggaaactggaatagcagagactccggaggggcgtcggaccagccggcgcaagcgggcgaaggtagagtacagagagatggatgaaagcttggccaacctctcagaagatgagtattattcagaagaagagagaaatgccaaagcagagaaggaaaagaagcttcccccaccaccccctcaagccccacctgaggaagaaaatgaaagtgagcctgaagaaccatcgggtgtggagggcgcagctttccagagccgacttcctcatgaccggatgacttctcaagaagcagcctgttttccagatattatcagtggaccacaacagacccagaaggtttttcttttcattagaaaccgcacactgcagttgtggttggataatccaaagattcagctgacatttgaggctactctccaacaattagaagcaccttataacagtgatactgtgcttgtccaccgagttcacagttatttagagcgtcatggtcttatcaacttcggcatctataagaggataaaacccctaccaactaaaaagacaggaaaggtaattattataggctctggggtctcaggcttggcagcagctcgacagttacaaagttttggaatggatgtcacacttttggaagccagggatcgtgtgggtggacgagttgccacatttcgcaaaggaaactatgtagctgatcttggagccatggtggtaacaggtcttggagggaatcctatggctgtggtcagcaaacaagtaaatatggaactggccaagatcaagcaaaaatgcccactttatgaagccaacggacaagctgttcctaaagagaaagatgaaatggtagagcaagagtttaaccggttgctagaagctacatcttaccttagtcatcaactagacttcaatgtcctcaataataagcctgtgtcccttggccaggcattggaagttgtcattcagttacaagagaagcatgtcaaagatgagcagattgaacattggaagaagatagtgaaaactcaggaagaattgaaagaacttcttaataagatggtaaatttgaaagagaaaattaaagaactccatcagcaatacaaagaagcatctgaagtaaagccacccagagatattactgccgagttcttagtgaaaagcaaacacagggatctgaccgccctatgcaaggaatatgatgaattagctgaaacacaaggaaagctagaagaaaaacttcaggagttggaagcgaatcccccaagtgatgtatatctctcatcaagagacagacaaatacttgattggcattttgcaaatcttgaatttgctaatgccacacctctctcaactctctcccttaagcactgggatcaggatgatgactttgagttcactggcagccacctgacagtaaggaatggctactcgtgtgtgcctgtggctttagcagaaggcctagacattaaactgaatacagcagtgcgacaggttcgctacacggcttcaggatgtgaagtgatagctgtgaatacccgctccacgagtcaaacctttatttataaatgcgacgcagttctctgtacccttcccctgggtgtgctgaagcagcagccaccagccgttcagtttgtgccacctctccctgagtggaaaacatctgcagtccaaaggatgggatttggcaaccttaacaaggtggtgttgtgttttgatcgggtgttctgggatccaagtgtcaatttgttcgggcatgttggcagtacgactgccagcaggggtgagctcttcctcttctggaacctctataaagctccaatactgttggcactagtggcaggagaagctgctggtatcatggaaaacataagtgacgatgtgattgttggccgatgcctggccattctcaaagggatttttggtagcagtgcagtacctcagcccaaagaaactgtggtgtctcgttggcgtgctgatccctgggctcggggctcttattcctatgttgctgcaggatcatctggaaatgactatgatttaatggctcagccaatcactcctggcccctcgattccaggtgccccacagccgattccacgactcttctttgcgggagaacatacgatccgtaactacccagccacagtgcatggtgctctgctgagtgggctgcgagaagcgggaagaattgcagaccagtttttgggggccatgtatacgctgcctcgccaggccacaccaggtgttcctgcacagcagtccccaagcatgtgagacagatgcattctaagggaagaggcccatgtgcctgtttctgccatgtaaggaaggctcttctagcaatactagatcccactgagaaaatccaccctggcatctgggctcctgatcagctgatggagctcctgatttgacaaaggagcttgcctcctttgaatgacctagagcacagggaggaacttgtccattagtttggaattgtgttcttcgtaaagactgaggcaagcaagtgctgtgaaataacatcatcttagtcccttggtgtgtggggtttttgttttttttttatattttgagaataaaacttcatataaaattggcaaaaaaaaaaaaaaaaaa

SEQ ID NO: 3899 - DNA, 1870 bp, Homo Sapiens
  NM_015014
agctgcagtctgggagtctttggagtaagaatggccttggaagggatgagcaaacggaagagaaagagaagtgtccaggagggagagaatcctgacgacggcgttcgcgggagtccgccggaagactacaggcttggacaggtcgccagtagcttatttcgcggcgaacaccattccagaggtggcaccggtcggctggcgtccctcttcagttctctggagccccagattcaacccgtgtacgtgcctgtgcctaaacaaaccatcaaaaaaacgaaacggaatgaggaggaagaaagtacatcccagattgaaagaccactttcgcaagaacctgccaaaaaagtgaaagcgaagaagaaacacactaacgcagaaaaaaagttggcagacagggaaagcgctctagcgagtgctgatttagaagaagaaattcaccagaaacaagggcagaaaaggaaaaattctcaacctggtgttaaagtagcagatagaaaaatacttgatgacacagaagacacagttgtcagtcaaagaaagaaaattcaaatcaaccaagaagaagagagattaaagaatgagagaactgtgtttgttgggaatttgcctgttacatgtaataagaagaagctgaagtcgttttttaaagagtatggacaaatagaatctgtacgatttcgttctctgattccagcagagggaacgctatccaaaaagttggcagcaataaaacgtaaaattcatcctgatcagaaaaatattaatgcctatgttgtgtttaaggaggagagtgctgccacgcaagcattgaaaagaaatggggcccagattgcagatggatttcgtattagagttgatctcgcatctgagacctcatctagagacaagagatcggtttttgtggggaatctcccttataaagttgaagaatctgccattgagaagcactttctggactgtggaagtatcatggccgtgaggattgtgagagacaaaatgacaggcatcggcaaagggtttggctatgtgctctttgagaatacagattctgttcatcttgctctgaaattaaataattctgaactcatggggagaaaactcagagtcatgcgttctgttaataaagaaaaatttaaacaacaaaattcaaatccacgattgaagaatgtcagtaaacctaagcagggacttaattttacttccaaaactgcagaaggacatcctaaaagcttatttattggagaaaaagctgttctccttaaaacgaagaagaaaggacagaagaaaagtggacgccctaagaaacagagaaaacagaaataacaaccaggaactgctttttcttttcctgctgagtactgctaataaaagtgctattatctgctgatagcatcgtctgctattcatgtgttgagttttatacttctttatggatggtgtatgtgaaatgtggagacttccacattctcagtttattcacattgtgatactacctttgaaggtttttttgtttttgttttgttttttgagatggagtttggctgttgtctcccaggctggagtgcagtggcgtgatcttggctcactgcaacctctgccttctgggttcaagcgcttctcctgcctcagcctcccaagtagctgggattacaggcgcctgccaccacgcctggctaattttttgtatttttagtagagacggggtttcaccatgttggccaggctggtctcgaactcctgacctcaggtgatccacctgccttggcctctcaaagtgctgggattacaggcgtgagtcactgcacccaagcctcctttctcttttgcctattaaacctctgctcttaaccttaaaaaaaaaaaaaaaaaa

SEQ ID NO: 3900 - DNA, 7962 bp, Homo Sapiens
  NM_015018
cgagcacggtgcactctgggagctgtcactaggcccttcggctcccggtctcggtgtagctgccgtggttgccaggagagctgcgccggcgagaagcggccgagccagcagcaggaaggaacacacaagtagttatctttcaggctgtctttgaatacttccatgaccctgaacactagctgaggagagtttcaaccactgctaacagtaatgactttacatgagtttggaactggtctctagtgggaagttgtgggaggatgaacacagaagagctggagttattgagtgactccaaatacagaaactatgtagcagcaattgacaaagcactaaagaattttgaatactccagtgaatgggcagatttgatatcagcacttggaaaacttaataaggttttacaaaataatgcaaagtaccaagtagtacccaaaaagctgaccataggcaaacgcctagctcaatgtctacatccagcattaccaggtggagttcatcggaaggcgcttgaaacatatgaaattatcttcaaaataattggacctaagcgacttgccaaagatctttttttatatagttctggattatttcctcttcttgcaaatgctgccatgtctgtgaaaccaacattgctcagtttgtatgagatatattatctgcctttgggtaaaacactgaaacctggtctacagggattgcttactggtattcttcctggcttagaagaaggatcagagtactatgagagaacaaatatgttgttggaaaaggttgctgctgctgtggaccagtcagcattctacagtgccctgtggggtagtcttctcaccagtcctgctgtgcgtttacctggaatcacgtatgttcttgcccatttaaacaggaagctttctatggaagatcaactttatataattggcagtgatattgagctaatggtagaagcagtaagtacttcagtgcaggactcaagtgtacttgtacagagaagcacactggacctcatactcttctgttttccattccacatgagtcaggccactcgaccggatatgatcaggatcttgtcagcagcccttcatgtagtgctaaggagggatatgtctctgaatcgaagactttatgcatggcttcttggttttgataacaacggtgctatcataggacccagaagcacaagacacagtaatcctgaagaacatgccacttactatttcactaccttttcaaaagaattattagtccaggcaatggtgggaatcttacaagtgaatggatttggagaagagaacactctaatgcaggatctaaagccttttcgcattttaatcagtttactggacaaacctgagctaggacctgtaattctagaagatgtcctgattgaagtgtttagaacattatattctcaatgcaaagcagagttggatcttcaaactgaaccacccttcagcaaggatcatgctcagttaagcagtaaattaagagaaaataagaaaacagcagagctgattaaaactgctaaccttctctttaattccttcgaaccttattatatgtgggattatgttgcacgctggtttgaagaatgttgtaggaggacactgcatgtgagacttcagattggacctggagatagtaatgactcatctgaattacagctgaccaatttctgcttactggtggattttttgttggacatagtttctttgcctactagaagtatgagggtgctgtgtcaggagacttacattgaaatccagacagaacacttgccccagttgctgctcagaatgatttctgccttgacaagccatctccagacattgcacttatctgaactcacagattctctcagactctgctcaaagatccttagcaaggttcagcctccactgttatctgctagcactggaggtgttttgcagtttccaagtgggcagaacaattcagtcaaagagtgggaagacaaaaaggtatcatcagtttctcatgaaaatcctactgaagtgtttgaagatggagaaaatccaccaagtagtcgatcatcagagagtggattcactgagtttatacaatatcaagcagaccgaactgatgatattgacagagaactgagtgagggccagggggcagctgccatcccaattggtagcacatcctctgagacagaaacagcatccactgtgggatctgaagaaaccatcatccagaccccttccgtagtcactcaggggacagcaacccgaagtaggaagacagcccaaaagactgcaatgcagtgctgcttggagtatgtccaacagtttcttaccagacttatcaacctctacatcattcagaataactctttttctcagtctttggctacagaacatcaaggggatcttggtcgagaacaaggagagacttcaaaatgggacagaaattcacaaggagatgtaaaagagaaaaacataagtaaacaaaaaacttctaaagaatacctgtctgccttccttgctgcctgtcagctcttcctagagtgctcaagtttcccagtttacattgctgaggggaaccatacatcagagttacgttctgaaaaattggagactgactgtgagcatgtgcagcctccacagtggctccagactctgatgaatgcttgcagccaagcaagtgatttcagtgttcagagtgttgctatttcactagttatggacctggtgggactgacacagtctgtggccatggtcactggggaaaacatcaacagtgtagagcctgcacaacccttaagtccaaaccagggaagagtagctgtggttattagacctcccctcactcagggcaatctgaggtacatagctgagaagactgaatttttcaagcatgtagctttaacattgtgggaccagttgggagatgggacacctcagcatcaccagaagagtgtggaactattttatcaattacataacttagttccttcttctagcatctgtgaggatgttataagtcagcagttaacccataaagataagaaaataaggatggaagcacatgccaagtttgcagttctttggcatctaacgagagatctccatataaataaatcttcatcttttgtacgttcttttgacaggtcactgttcatcatgttagatagccttaacagtctcgatggttctactagctctgtgggacaagcctggctgaaccaagtcctacaaagacatgatattgcacgagttttggaaccattgctattgctcctgcttcatccaaaaactcagagggtttcagtacagcgtgtacaagcagaacgttattggaataagtctccctgttatccaggagaggagagtgacaagcatttcatgcaaaattttgcctgcagcaatgtgagccaagtacaactcatcacatcaaaaggaaatggtgaaaagccacttaccatggatgaaatagagaactttagtctcactgtgaatccattaagtgacagactttccctcctaagtaccagcagtgagacaattccaatggttgtgtctgattttgatcttccagaccaacagatagaaatacttcagagttctgactcgggatgttcacagtcctctgctggggacaacttgagttacgaagttgatcctgaaaccgtgaatgcccaagaggattctcaaatgcccaaggaaagctccccagatgatgatgttcaacaggtagtatttgacctgatatgtaaagttgtaagtggcctcgaagtggaatctgcatcagttacatctcaattagaaattgaagctatgcccccaaagtgcagtgatatagatccagatgaagagacgattaaaattgaagatgactccattcaacagagtcagaatgctttgctgagtaatgaaagttctcagtttctgtctgtgtctgcagagggaggccatgagtgtgtggcaaatggaatctccaggaatagctcctcaccttgtatttcaggaaccacacacactcttcatgactcttctgttgcttccatagaaaccaaatctagacaaaggagtcacagtagtattcaattcagcttcaaagaaaaattatcagaaaaagtttcggagaaggaaacaatagttaaggagtcaggtaaacaaccaggagcaaaacctaaagtaaaacttgccagaaaaaaggatgatgacaagaaaaaatcttcaaatgaaaaactcaaacaaaccagtgtattcttcagtgatggtctggatttagagaactggtatagctgtggagagggagacatttctgaaattgagagtgacatgggttctccaggatctcgaaaatctcccaatttcaacattcatcctctctatcaacatgtgctcctgtatctccagttgtatgattcatccaggactttgtatgctttctctgccatcaaagccatcttgaaaactaaccctatagcttttgtaaatgccatttcaactactagtgtaaataatgcatatactcctcagttgtctctccttcagaatctattggccagacaccggatttctgttatgggcaaagatttttatagtcacattccagtggactcaaatcataacttccggagttctatgtacatagaaattcttatttctctctgcttatattacatgcgtagccattacccaactcatgtcaaggttactgcacaagatttaataggcaatcgaaacatgcaaatgatgagcatagaaattctgacactactcttcactgagctggcaaaagtaatagaaagctcagcgaagggtttccctagttttatttctgatatgttatctaagtgcaaagttcagaaagtgattcttcattgtttgctgtcatctatctttagtgctcagaaatggcatagtgaaaaaatggcaggtaagaacctggttgctgtggaagaaggtttctcagaggacagccttattaatttctcagaggatgaatttgacaatggcagcacgttgcagtcacaacttcttaaggtgcttcagaggctgattgttctagaacacagagtaatgactattcctgaagagaatgaaacaggttttgattttgttgtatctgacttagaacacatcagtccccatcaacccatgacttctcttcagtatttgcatgctcagccaatcacatgtcaaggcatgttcctctgtgcagtgatacgagctttgcatcagcactgtgcatgtaagatgcacccacaatggattggtttaatcacatctactctgccttacatgggaaaagttctgcagagagtggttgtttctgtgacactacaactgtgcagaaatttagataatctaattcagcagtacaaatacgaaacaggattatctgatagtaggcctctgtggatggcatcaattattccaccagatatgattcttactcttttggaagggattacagccattatccattactgtttgttggatccaactacacagtatcaccaacttttggtcagtgtagaccagaaacacttgtttgaagcacgcagtggaatcctctcaatccttcatatgatcatgtcctctgtgacactgctttggagcatactgcatcaagctgattcttcagaaaagatgactattgccgcatccgcatctcttaccactattaatcttggagctacaaagaacttgagacaacagattcttgaattgttgggccccatttcaatgaatcatggtgttcactttatggctgccattgcatttgtgtggaatgaaagaagacagaataaaacaaccaccaggaccaaggtcattcctgcagccagtgaagaacagcttttattagtggaattggttcgttcaatcagtgtcatgagagcagaaactgttatccagactgtaaaagaagttttaaagcagccaccagccatagccaaggacaagaaacatctttctttggaagtctgcatgcttcagtttttctatgcttatattcaaagaattccagtgcccaatttagtggatagctgggcgtcactgttgatacttctgaaagactctatacaactgagtcttccagctccagggcagtttcttatacttggggttctgaatgagtttattatgaaaaaccctagtttggaaaataaaaaagaccaaagagaccttcaggatgtaactcacaaaatagtggatgcaattggtgcaattgctggttcttctctggaacagacaacatggctgcgacgaaatcttgaagttaagccttctcccaaaataatggtagatggaaccaatttggaatctgatgttgaagatatgttatcacctgcaatggaaaccgcaaacataactccttctgtatatagtgtccatgcattgacattactctctgaggttttggctcatcttttggatatggttttctatagtgatgaaaaggagcgggttattcctttacttgtaaatattatgcattatgttgtgccctacctcagaaatcacagtgcacataatgcccctagttatcgagcttgtgtccagctgctcagcagtcttagtgggtatcagtacacacggagagcttggaaaaaagaagcttttgacctctttatggatcccagtttctttcagatggatgcctcttgtgttaatcattggagagcaattatggacaatctgatgacacatgataaaacaacatttagagatttgatgactcgtgtagcagtggctcaaagcagttcacttaatctctttgcaaaccgtgatgtggagctagaacagagagctatgcttcttaaaagattagcatttgctatttttagcagtgaaattgaccagtaccagaaatatcttccagatatacaagagagattggttgagagtctccgtttgccacaggtgccaactctccattctcaagtgttcctgtttttcagagtgttacttttaagaatgtctccccaacatcttacctcactctggcctaccatgattacagaacttgtacaagtatttttactgatggagcaggaactcactgctgatgaagatatttcacggacttcagggccctctgtggctggtctggagacaacgtacacaggaggtaatggcttctctacttcatataacagccagcggtggttaaacctctatctctctgcttgcaaatttttggatttggctctcgcattgccctctgaaaaccttcctcagtttcagatgtaccgatgggcctttattccagaagcctcagatgattcaggtttggaagtcagaaggcagggtatacatcaacgagaatttaaaccttacgtggtacgactagcaaaacttcttcggaaaagagcaaagaaaaatccagaggaagacaactcagggagaacattgggttgggagccagggcacttgctgctcaccatctgcaccgtgcgcagtatggagcagctcctgccgttcttcaatgtgctcagtcaagtcttcaacagcaaagtcacaagccgatgtggaggacactcagggagtcctatcctctactcaaatgccttccctaataaggacatgaaactggagaaccacaaaccatgttccagcaaagccaggcaaaaaatagaagagatggtagaaaaagattttctggaagggatgataaaaacttgagcaccattgctggttccatttagcttacatgtaaatgtaattatttaaaacacacacactgctctgcgttgtatagtttttccttttttgtatgtaacagaacacatttcagattgtatttaatttaaatatttgtatataagagcaaatgtctgaatgtggcctgaatcaagtttaaatattgttggctcatactgattatggtgcctaagagagctatatatatacacatgtaaagtccattgtttttattgtcctgagttgtcttaaacctgcaaaatatacactacccattttttttttc

SEQ ID NO: 3901 - DNA, 7919 bp, Homo Sapiens
  NM_015020
agaaatatgaaacgcaatgggagcagaaattgtttgaataggagaagtaggtttggttctcgagaaagagactggctaagagaagatgtaaagagaggctgtgtttacctttatggagcagacactaccactgccactacaaccaccaccacctcctcttcctcttcctcctcctcctcttcctctgacttacatctcgtcctttgcactgtagagacaccagcatcagaaatatgtgctggagagggaagagaaagtctttatttacagcttcatggagacctggtcaggagactggaacctactgaacgacctcttcagatcgtttatgattacttatccaggctgggatttgatgatcctgtgcgcatacaggaggaggctacaaatcctgacctcggctgtatgattcgattttatggtgaaaaaccatgccacatggatcgtttggatcgaatcctattgtctggcatctataatgtacgcaagggaaagacccagctgcataagtgggctgagcgcctagttgtcctctgtggtacctgccttatcgtttcctcagtgaaggattgtcaaactggaaagatgcacattttgcctctggttggtggaaagatagaagaagtgaagcgacggcaatactcccttgctttcagctcagcaggagcccaagctcagacctatcatgtcagcttcgagactttggccgagtaccagcgatggcaacggcaagcatccaaggtggtgtcccagcgaatcagtaccgtggatctctcgtgttacagcctcgaggaggttcctgagcatctcttctatagtcaagatattacctacctcaacttgcgacacaacttcatgcagttagaaagacccggaggcctcgatacactctacaaattttctcaactgaagggcctgaacttgtcccataataaacttgggttgtttcctatattgttatgcgagatctctaccctgactgagctcaacctttcctgtaatggatttcatgacctaccaagtcaaattggcaatctgctaaatcttcaaaccctctgtcttgatggcaactttctgactactttacctgaagaattgggaaatctacaacagctttcctccttgggaatttccttcaacaactttagtcaaattcctgaggtttatgagaaactcactatgttagatagagtggttatggcaggaaattgcctggaagtcctgaacttaggggtgctgaataggatgaaccatatcaagcatgtggatttaaggatgaaccatttgaaaaccatggttattgaaaatctggagggaaataaacacatcacccacgtggatctgcgggacaaccgactgactgacttggatcttagctccttatgcagcttggaacagctgcactgtgggcggaatcagctgagggagctaacactcagtggcttttcccttcggaccctctatgccagttccaacaggctgacagcagtgaacgtctatccagtacccagcctgctcactttcttggatctctcccgaaacctgctagagtgtgtccctgactgggcctgtgaagcaaagaagatagaagtattagatgtgagctataatcttctcacagaggttcccgtgagaattctgagtagcttgagtcttagaaaactgatgctgggacacaatcatgtgcaaaaccttccaacactggtagagcacatccccctcgaggtgctggatcttcagcataatgcactcacgaggctgccagacaccctcttctccaaggccttaaatctcagatacttgaatgcatctgcaaatagtctggagtctttaccatccgcctgcactggagaggagagtttgagtatgctgcagctgctttatctgaccaacaatctcctgacggatcagtgcatacctgtcctggtagggcacctgcacctgcgaatcttgcaccttgcaaacaatcagttacagacctttcctgcaagcaaactaaataaattggagcaattggaggaactgaacctaagtggcaacaagcttaaaaccattcccacaaccatagcaaactgtaaaaggctgcacacccttgttgcacactccaacaacatcagcattttcccagaaatactgcagttgcctcagatccagtttgtagacctaagttgcaacgacttgacagaaatcctgattccagaggctttgcctgctacattacaagaccttgacctgactggaaatacaaatctggttctggaacacaagacactggacatatttagccatatcacaaccctgaaaattgatcagaaacctttgccaaccacagattctacagttacgtcaaccttctggagccatggactggctgagatggcagggcagagaaataagctgtgtgtctcagcacttgctatggatagctttgcagagggggtgggagctgtgtatggcatgtttgatggagaccgaaatgaggagctcccgcgcctgctgcagtgtacgatggcagatgtgcttttagaagaggtacagcagtcaactaatgacacagttttcatggctaacaccttcttggtatctcacaggaaattaggaatggctggccagaagttgggctcctccgctctcctgtgctacatccgccctgacactgccgatccagcaagtagctttagcttgactgtagccaatgttggcacgtgccaagcagtcctgtgccgaggtgggaagccagtgcccctctctaaagtcttcagcctggagcaggacccagaggaggctcaaagggtgaaggaccaaaaagccatcatcacagaggacaacaaagtgaatggggtaacctgctgtacccggatgctgggctgtacatacctctacccttggatcctccccaagccccacatatcttccactccgctgaccattcaagatgagttgctgattctgggaaacaaagcattgtgggaacacttgtcctacacagaagctgtcaatgctgtacgtcacgtacaagacccattagcagctgctaagaagctgtgcacattagcgcagagctatggctgtcaggacaatgtaggggcgatggtagtttatttgaatattggtgaggaaggctgcacttgtgaaatgaatgggctcaccctcccaggtcctgtgggatttgcttcaaccaccactatcaaggatgcccctaagccagccactccatcctctagcagtgggattgcctctgagttcagcagtgagatgtccacctcagaggtgagcagtgaagtggggtccactgcttctgatgagcataatgctgggggcctggacactgccttgcttccgaggccagagcggcgctgcagcctccacccaacacccacctctgggctgtttcagcgccagccttcttctgctaccttctccagtaaccagtctgacaacggcctggacagtgatgatgaccagcccgttgagggggtcataaccaatggcagcaaggtagaggtggaagtagacatccactgctgcagggggagggatctggagaactcaccccctctcatagagagttctcctaccctgtgttctgaggaacatgctagagggtcgtgttttgggatccgaagacagaacagtgtgaatagtggcatgctcctgccaatgagcaaggacaggatggagttacagaagtctccctccacctcctgcctctatgggaagaaactctccaatggctctattgtgcccctagaggacagcctgaacctcattgaagtggccacagaagtgcccaagaggaaaactggctattttgctgcccccactcagatggaaccagaggaccagtttgttgtgcctcatgacctggaagaagaagtgaaggaacaaatgaaacagcaccaggacagccggctcgagcctgagccccatgaagaggatcggaccgagcccccggaggagttcgacacagcactatgactgccccactgggcacagtgtgggaggaggctgtgcagggttggggtagggacttgctagaggcattctgcctctacatttctttttgtttgttcgttttttttttgtttgtttgttttgagacggagtcttgctcagtcgctcaggctggagtgcaatggtggggtctcgggtcactgcagcctctgtccctgggttcaagccattctcctgtctcagcctcccgagtagctgggattacaggcacctgccattatgcccggctaagttttattttttttttttagagacggggtttcaccatgttggccaggctggtgttgaactcttgacctcaggtgatccaccctcctctgcctcccaaagtgctgtgattacaggcctcagccaccatgcccagccctgcgtctacatttctaaaccatagctgtgtggggttgaactcggagccaaaaagtgtgagagccatcaggggctggctctggataaactggtagccactatcagtgttaagtttcacatttaacctgcattggaattcccaggggtactgggaagaaagcagctgttctgtatcagtcctaccacctgccattaaccctttctctcctaggatcattttgagaatttgcctgcctgggcaggaaagggactatttctgtggaggaaaaaagtgaagattgattctctttactagttgctgctgatggatctctgtgacagagaaatcaccttatctcagactaatggggtgtgatgtgactagtcacatggcttttcattcttctctacgagaatacagcctatcaaaatgatgtctgttggaaatgtagaaccaatcaaacagataatttatgtatgtaatgtaatgagagcacttttcattgactgtgaactttttatttttgaatctgcactcgagccaatcttcttagaggcagcccggcaccttcatccataggcagagagagaactgggtgttggagacttattcgagggtataggaagggccctgtgaagttgatttaacttttggatgtcagactgtgaaagctcctgagaaacttggggtaataggatcttcttttggggatgaaaatggggaaggcgtgaggacctagactacttctccctagatcagaaaaagagaattaccccttgacaaatatgatacctgctaggtatttcccagggaaatttagggattggcgtctttccctagcatgtggaggaattggcagacagcttcctaagggcggggagcgggggcccaaggctgacactgcttgcatccacgtgaccttaagttatggcagatgactctgaaacggactgaggccaatgagaacagatggatggagcactcaggttagacttgttccttctcctatgctggaggagagggatggttctctagaatgttggaggtgagttgagagctcgcctcttgaatgttgaacagtgtactcttctgaaaactgcatattcactttatgtggtttcagaatactgggctcaatactaacataagaaagacacttcattgagaaattcttaagcttacagaaaacctatactctttgcacattccacataaccctagcaaaatgcagtttcttcatacttctgtcactttttccattggaagatttgcttaggaaaattaattcctatttattcccacaaaatgttggcattgcttgattttacccaatggggaatgtgctttgaatttttggaacacttttacaattaaaaataaagtagggccatttttaatttgtttcatcagaaactatgttaaagagagggttaaatataaatatattttcgtgtgtatttttgggaagatttttgttcaaagcaatagtcaaaatcagatgacctgtccataataattatgtgtcttcatcttctcagaggccccatgctcatatgcacgtgtcattgggatacactcttgggggatttggtacactctaatggatgtctaatgttcaacccctcgagaatctgaacttgagtccccagattgtcaaactactggtcagctattgagaattttagaactcaggtctttgatttgaagtagggaacatagtggctcacacagagtttaggtgctgttagaaagatgggaacaagagtgttttgccaccttatttttatatgggaaattttttttaatgaagaaaaaatgaaaatgaaataacaggatgatagtgatgagtgatgtaaaacatcttacttagatggcagaaccttcgggttgtagaatagtgatgtctaaaaattaaagttattttgggaatacaccactttaatagtatagtcttataaaaattattcattatggtgaacccttcttgtctgctattcgtttcccaacctacttattggaaccacctcaaaacccagttctgaaatgaccttaccaaaagtaaatgtatttattttttagtcagcagaactctgtaattccaaatgttgttctgtgtggtagaattttttttcaggaaccattaggttgtattgaaaatctttgttataggcgataccaaaactgattattcttttttgcagtctgctttaattcatgtccttctgcagttgctctgtattaaaacagggtaaaaaggccatagcccattatgaaaaatataatacaaaactctttgacctatgaggtaacttacagacattgtgttttctaaacaggctgtcagtgaaagcccgtatctgtctccaggtgaatgtaatttacttccgagtactttacccagaggatgtgttccccaggtgggcagagtacagttgatctctagcacagacagagattctggcctctgcatattctcaggtctctgtgtgtacctcccattgagtagagaagcttaagataatttctgagagaagaacactgctgattgtgggagcagtttaggagtccatggaagaaagaaaaatacatgtgtcttggcagccatggtgtatttttgtccaaatggattggaaggatatttgaatatttgaatgttggtatgacataaagctgcagtgcactatagagtcaagtcattgaattaccactcctgatacagggctttattgtactactgtgaagtgtatgtgtgcaatacattggtgagttcatttactggtgtacggaagagccagcaggagcagcgtggtcattgctgggtgctattacagttgcttgtagtgagtgctgttttccaggagatggagccagttgggtgtggcagatctactgaatatcaaatgatgctcttcttcccatgtagaccttcagcaaaagccggtacttggaagccacaggctcaccttctctatctatccaataattattaatgaagagacctccataagggagcagctggctgttatcgataaatgtaccaattattaaataattagtctccaagccattcagtgatgtcttcagcatcactataggactgtctagtgtcactttttacttccttctgggtggaggctttccgactcccaatcatgaaggcaagttaatctttccagttagtgacttttgccccatagttggggtaagcacttcctagattgagaaaaagcagctacagtcaatcctgctctgtttgcctcatttggtgatcagtcagtcacacataagttccttgtattctaaatttcatgcacttctcccagatgctatagggttttctctcactgttgccagtggatgtcatccagacagtgggctcatatcttacggttttgtgcaatcattgtcgtattgtagtcttaagactcattatagtgtatttttgatatttttgaaatgtgttaaattttttaattcaataatatgagccagagcatgttgcagcaaatctattgtttgtaaaaataacaataacaataataaataaaataaagtggaa

SEQ ID NO: 3902 - DNA, 10379 bp, Homo Sapiens
  NM_015026
attgtgggcgactcggctaatggcgtcggcgagtcttaggggcctggggagctggcgctgaagcttcttgccaggttggctggtgacacccggtgtggctgggccccgcggcagcggagggacctgcccgccttgtgggtttctcggccagagtcggcggagcctagcgggacggtgcgactgcggggggcgcctccgagaaaagccagaggtgttgcggggaagctgctgggggacgctcgagcaggctccgggttcgcagcccagggcccaagaagcgggctgctgaaggaccagagacaccgggagggagctgcctgtggccctaaggagctgaccgtgccagagcttgtttgtacctctcggaaattggctgggaccttggaggatcatgtccggcaccagcagccccgaggcggtgaagaagctgctggagaatatgcagagcgacttgcgcgccttgtcactggagtgcaagaagaaattcccacctgtcaaagaggctgctgaatcaggaataataaaagttaaaacaattgctgcacgaaacactgaaattttggcagcactgaaagagaacagctcagaggttgtacagccttttttaatgggttgtggaaccaaggaaccgaagatcactcagctatgtttggctgctattcagagactcatgtcacatgaagtcgtgtctgagactgcagctggaaatataattaacatgctttggcagctaatggagaatagtcttgaagaacttaagctacttcaaacagttcttgttcttttaacaaccaatacagtagttcatgatgaggcactttctaaggcaatcgttctttgttttcgactacacttcacaaaagataatattacaaataatacagctgctgctacagtgcgacaagttgttactgttgtttttgagaggatggttgctgaagatgaacgacacagagatattatagaacaaccagtactggtacaaggaaatagtaacagaagatctgtcagtaccctcaaaccttgtgctaaagatgcatatatgcttttccaggatctttgtcagttggttaatgctgatgctccttattggctagtgggcatgacagaaatgactcggacgtttggcctcgaattacttgagtcagtcctcaatgattttccgcaggtctttttacaacaccaagaatttagtttcctcctcaaagaaagggtatgtcctcttgtgataaagctcttttctccaaatataaagttcagacaaggttccagcacctcatcttctccagcaccagttgaaaaaccatattttcctatctgcatgcgtttgctgagagtagtatctgttctgattaagcagttttacagtcttttggtaactgaatgtgagatatttctgtcacttctggtgaaatttctggatgcagataaaccacagtggctacgagctgttgcggtggaatcaatacacagattctgtgtgcagcctcaactattaaggtcattttgtcagtcctatgatatgaaacagcattctaccaaggtttttcgtgatattgtaaatgcactgggatcttttatacagtccttgtttcttgtcccccctactggaaatcctgcaacaagcaaccaagctggaaacaataatttaggtggctcagtctcagcaccagctaactcaggaatggtggggattggtggaggtgttactttgctaccagcatttgaatataggggaacctggatacctattctgacaatcacagttcaaggcagtgctaaagccacctacttagaaatgttggacaaagttgagcctccaactatacctgaaggttacgccatgtctgtggcattccattgtttgctagaccttgttcgtggaatcacaagtatgattgaaggagagctaggagagcttgaaacagaatgtcaaaccaccactgaagaaggttcttcaccaacacagtcgacagaacagcaggatttacagtcaacatcagaccaaatggataaggaaattgttagtagggctgtttgggaagaaatggtgaatgcctgctggtgtggtcttcttgctgcactctcactccttcttgatgccagcacagatgaagctgccactgagaatattttaaaagctgaactgactatggctgctctttgtggaagactgggccttgtaacttcaagagatgcctttataactgcaatatgcaaaggttccctgcctccccattatgctcttactgtattgaataccaccactgcagctacactttccaacaaatcatattccgttcagggccaaagtgttatgatgataagtccatcaagtgaatctcaccaacaagttgtggcagtgggtcaacctttagcagtccagcctcaagggacagtaatgctgacttccaaaaatatccagtgtatgaggactttacttaacttggcgcattgccatggggctgttcttggaacatcatggcaacttgtcttggcaactcttcagcatcttgtgtggattctgggattaaagcctagtagtggcggtgccttgaaacctgggagagctgtagaaggacccagtacagttctaacaacagcagtgatgacagatttaccagtgatttccaatatactttcaagattgtttgaaagctcacagtatcttgatgatgtatcactgcatcatttaataaatgcactttgctccttgtctctagaagcaatggatatggcctatggaaataataaggaaccatctctttttgctgttgccaaattgttagaaactggtttagttaatatgcaccgaatagaaattctgtggagacctctgactggccatctacttgaggtctgccagcatccaaactctcgaatgagagaatggggagcagaagctttaacttctcttattaaagcaggattaacatttaaccatgatcctccactctcacaaaaccagaggctgcagttgcttttattgaacccgttaaaggagatgtccaatattaatcatccagatattcgactcaagcagttagaatgcgtgttgcagattctgcagagtcagggagacagtcttgggcctggatggccattagtgcttggagtcatgggagcaatcagaaatgatcaaggagaatccttgatacgaactgcattccagtgtcttcagttggttgtgacagattttctaccaacaatgccttgtacttgcctgcaaatagttgtagatgttgcaggtagctttggcctccataaccaagaactcaatattagtttaacttcaataggtttattgtggaatatttcagattattttttccaaagaggggaaactattgaaaaagaactaaataaggaagaggcagcacagcaaaagcaggcagaagagaaaggagttgttttaaatcggccattccaccctgcaccgccatttgattgcttgtggttatgtctttatgcaaaattgggtgaactatgtgtggatccccgtcctgctgtcaggaagagtgcagggcaaactctgttttctacaattggtgcgcatggaactttattacagcattcaacctggcacactgttatctggaaggtactctttcatctactggacagagttcgagagtcctctaccactgcagacaaagaaaagattgagtctggaggtggcaatattctcattcatcattcaagggacaccgccgagaagcaatgggctgagacgtgggtattaacattggctggagtagcaaggatcttcaacactagaagatatttgctgcagcctttaggagatttttcaagagcttgggatgttcttcttgaccatatacagtcagcagcactcagcaaaaacaatgaagtatctctggctgctctgaaaagcttccaggaaattttacagattgtgtcccctgtcagagactcagataagcctgagacaccacctgtagttaatgtacctgtgcctgttcttatagggcccatatcaggcatgagcaggccatttgtaagaacagattccattggagaaaaactaggaagatatagtagctctgagccacccattgttactgatgagcttgaagatttgaatctatggtgggctgcgtggaatacctggtatagaattggatctgaaagtactaagcctcctattacttttgataaactaacttttattcctagccagccttttcttacagctttaattcagatatttccagctctctaccaacacataaaaactggtttcaatatggatgacttgcaaaagttgggagtcatattgcacagtgctatttcagtcccaataagttcagatgcatccccttttattcttccatcttataccgaagcagttttgacaagtttacaggaagctgtacttacagctttagatgttctccaaaaggccatttgtgtaggaccagaaaacatgcagataatgtatccagctatatttgaccagttgttggcatttgtagaattttcctgtaaacctccacagtatggacagctggaaacaaagcacattgcaaatgcaaaatataatcagatccaactatttgcaccggcggaatgggtagccttgaattatgtgccgtttgctgaaaggtctttagaagtagttgtggatttataccaaaaaacagcgtgtcacaaagcagtggtgaatgagaaagtgctccagaatattattaagactcttagggttcctctcagtttgaagtattcctgcccttctgaaagcacatggaaactagcagtatcctctctcctcagagttctttctattgggctacctgttgcccggcagcatgcttcttctggaaaatttgacagtatgtggccagaactagccaatacttttgaagattttctctttactaaaagcatacctccagataatctctctattcaagagtttcaaagaaatgaaaatattgatgtcgaggtagttcaacttatcagcaatgagatactaccttatgccaattttattcctaaggaatttgttggtcaaataatgacaatgcttaacaagggctcaatacattctcagtcatcttcatttacagaagcagagattgatattcgtttgagagaggaattttctaaaatgtgttttgaaacattactccagttttccttcagtaataaagtcacaacacctcaagaaggctacatctcacgaatggcactctcagtgcttttaaagaggtcccaagatgtactacatcgctatatagaggatgaaagattaagtggtaaatgccctcttccaaggcaacaagtaacagaaattatatttgttttaaaagcagtcagtactcttattgattcacttaagaaaactcagcctgagaatgttgatggaaatacctgggcacaagtaattgccttatacccaactttagtagaatgcatcacctgttcttcttcagaagtctgttctgcacttaaagaggcactagttccttttaaggatttcatgcagccaccagcatccagagttcaaaatggagaatcttgaccggctacaatatatttgaaagcaggaagatagtctaaaaaatgtttgctcctaattgagtcttctgtgagaaggacatttcttactgcagataattcttggcagctgttgttggcctcctttaaattctacttacctgagttcagtaattcatattacaggcttgcacatcaacaaaggctcctgaatgaacagcagtgtaaggctttaataaattaaactgatgggagggataattaacactacagtatacatgctaccatatctccagttggtgatttaaagtgagcttatgtacagtttgtggtgtatgtgttaatgatgtactttttaaaaagaaagaagagatatttcaattcagtcagatttattagtctggtgtttttgcaccctttttcaagtacaaaatcgtactagaattttatgcaagatggtactgtaacattccatattatctataaccagcctttgttaacaaagggaactgatatacttgtgtgtataataaatggtacagttctgtataaaatagtgcatttatttaaattttaaaagtattgataatgttaaatgcttaaagctctatttattattaatacaaaattgtttgcttacatttttacttataatttgccttcatatgtggcggataagctcaccatatgatcatgcagttagcttcatgcttattttaaatgtattattagtgaccattaaacatctgaccagtaaggtcatgtgaacacagcagcaaatagtttatgatttgctgattttggagctttgaaatataggttcttaatacattgatacatattgtagcactatgacttcatcatacctcatttctttaaacagctctccaagctttcactgaagtctgtctgttttttatattggctgtctggattttaaagacttttcatattttatatttctactgattttgtttcccctaacaacatttgtcactgtctttgaattatgacccaggcaagatgatttcagattttctaaaatcttgcctgtgaggttttgttcatatcagtgcttcattttgtaatgtcttctcaagaaaaatacctatgttaactcacaagtataaaatatgtgtgtattataaaacaatgaaaagtgtatttttggagatagtcaagcatttagaagtgcagtgaacttgctgtcacggagtaaaatgctaattatgtttcactttcctagcctagtgaaaaagaaaagtgctcttgagtacaataccttaattatttcttaaaatactgactttgacctagctcactgtattttttatttaatggattatggattacagtatttttcttctgagttaaattttcataatttatgtgaagacacaaagatgtttaaaacaatgattattcataagaaatcatgatggtctcagtattattttagtgtattggaaggtctttgatcttaatagaatttataaatttcagcttctccagaataatcataaaactgcaaaaagatattataattgagtcatgattgagatacagttttgaggctattataattgtataattatttaatttgcattatctgtaaaatgtagtaaggtctttgaggggatattttttatttacatgaattactgaatttctattttattatttcacctaaaattaaggtaaaatatggcatttcataagttctgctttcagcattttccttaaagttgtaaaaaatcaagctatgtacttattttctatatttgggtgtgttaaattgaggattagaaaaatccacataatcactgataaagcattgaaacagaataacccaagggtagtgtaccgattcagtaacatgttaaaaatattgctatgcatttattcaaaggaaaatggtctgttcttgagaaataaaagatcagttgcaattaggataattaaatagttaaatatgagtcaagtgtatgcaatatacatttatatgaaccaaagcttgctttatcaggaccatgccctacagttcaaaacataaacatagtgaatgtgttaatatcatataataaggtaataaatgccagtcttagtgtgaagcaagtgggtggcccccttggtagtataattggacaggattttcctccagaatatttcctgtcaccctccaagagtcactacagtaattgattgctggcatggaacacattgcccttgtcttgttagtatgaattgggttctccagtgactagaagaactggggtgtgtgaaagtattcgatgccaggagattcaaaaaggaagctctcaaagataagatcattttatggcacaattgagtctataaccagccctttaagcagtagtaaaaatgtcctttgtcatacttactagaaatactatgagttttttttttttttttcatttgagacggagtctcgctctgtcacccaggctggaatgcagtggcacgatcttggctcactgcaacctctgcttcccgggttcaagcagtttcctgcttcagacttccaagtagctgggattacagacatgccaccatgccaggctaatttttttaatatttttagtagagatggggtttcaccattttggccattctagtcttgaactcctgacctcaggtgatctgcccgccttggcctcccaaagtgctgacattacaggcctgagccactgcgcccagccaataccatgagttttaagcctcacatcgtcacttgctgtcactgccagtgcctgttttattcatattgctggacaacagacatatgccaccaattgtatgattaataaagtctttttctggccattttgtccattataaaggaaataaactaattgttaacttgcatagattacttcttagtttcctatgctaccaccactgccaagggagaaaaaaatacatcattttgtaatgtctttagtatttctttataactagtgttaaggttttgttaattttattgtatacatttgtaacatttattaggagccttttaggttccaaaacaaacaaaaggcataaaaaagtctagcttagaaccacttttcacttgctttcatttttaattttattcacttaacagctaacatctttcttgtttcttgttttttccattatatggttatcgattcaactcttgctatattccttaaatttgtatgtatcatcagaagaaagagatgaacaatttagtgtagatattttattctggagaataatattcaattaaattatttctacagcaggccagtaacaactagattatttgtcctttctcagtataattttaaagagcattttgttttattgtcacaatttggtaccactagtcccaggtaaccattgggccaaaggatcagttgagaaacagttaaggatgaattagcataagttatggaacagtgttagaaaacaactcaaaagtatattctttattaatgaggtggtcattattacatttgtgtcaatgaagggcagtgtagttattttaaaatgactaatattttctccccaaatacagaataattcagatgggcaaccaagttttcaagagactgctgtaggtgaagtctgtctagccaaggcagaacacttacaggagtccctaactgtgccacccttggaatgggttagtgtacaggctcagaatattgtggattacagtttttcagagaaaactaccacagatgtagacaaaaatgatctctgaaagcattgccagcagccaggtatgttccttagatttccacttaggtttggcattttggcagataagctaatcttgtataaagcatcacattttactatgcttagtgttcctgggttgtatttatctacattattagagggaatttttattttaaaaaaattgtcattcatgagaagaatgggagttcatgccacatagtattttaccaatttatataaagtgggaaaagtctttaatacttcatgatcacttgaattaaagtttttgtatctctggaaagtagaatagtgctttcatttgaatgaaaagtgtttatagattcagaaagagagatgatatctttgtatcttgatttatatacagaccatttcagaggaagttaaatgtcttacaaatccaatactttctaatgctctaacagtgttggctatttaaaagaacatgtggcaagttctatatgaatattcttggtcatctcgactaattctgaggcaatgatggacagagatgctacttcttatttaactctaggcatgttgacttttcaaagcggtttccttatttctaaacagagatgatgatcaatgagttactaattctttagaggaaaaaatgcataatttgagtgtggagttgattttaatgacagggtaattcaagttgtttgataaatttattactatattgtaagagagatctttgaccatttttcttcctttttcttggacatcactttcttccctccccttctctcttttatgtttttatccttgttaaattttatgtttacgttaccatctttcttatactttcccctgatttttctcttttaattcctctttcattctctgcctcttctctttcagctctttctctaattgtgcctattccttgttcataagaagtggagctgttagtggtagaaccactgctcatggttctaccactacaaagtggaaagtagaaatactttgcactttggccactgttgcgtttttgccaaggtaaagttcccctgccattttgaaatagctgaacaagttaaagtaatatgttccaaaaactggaagtgccataaaaaactaaaaataaaaaaaaattgtgacta

SEQ ID NO: 3903 - DNA, 5816 bp, Homo Sapiens
  NM_015028
attataacagccaatgcagccgccatccacgcacaagcaaagaagcatgtcccatttaaatacacccacgcagccccagcgcccttagccgatcggggcgctcagcccacacgcaccgctgctcggggcttggagatccgcgcaggctgggctcccggacccggcggaccgacgcgcggaggatcgggatccggcgctgtggggctggggtgggcgggggaggctgggcccggggcctctggcgcgacacccgcatgaggacgcgagtgaaatagaccaaggtggaatttccaagggaaaagcttcggggtggttttggtccatttctccagcgaagaagtagacatggcgagcgactccccggctcgaagcctggatgaaatagatctctcggctctgagggaccccgcagggatctttgaattggtggaacttgttggaaatggaacatacgggcaagtttataagggtcgtcatgtcaaaacgggccagcttgcagccatcaaggttatggatgtcacaggggatgaagaggaagaaatcaaacaagaaattaacatgttgaagaaatattctcatcaccggaatattgctacatactatggtgcttttatcaaaaagaacccaccaggcatggatgaccaactttggttggtgatggagttttgtggtgctggctctgtcaccgacctgatcaagaacacaaaaggtaacacgttgaaagaggagtggattgcatacatctgcagggaaatcttacgggggctgagtcacctgcaccagcataaagtgattcatcgagatattaaagggcaaaatgtcttgctgactgaaaatgcagaagttaaactagtggactttggagtcagtgctcagcttgatcgaacagtgggcaggaggaatactttcattggaactccctactggatggcaccagaagttattgcctgtgatgaaaacccagatgccacatatgatttcaagagtgacttgtggtctttgggtatcaccgccattgaaatggcagaaggtgctccccctctctgtgacatgcaccccatgagagctctcttcctcatcccccggaacccagcgcctcggctgaagtctaagaagtggtcaaaaaaattccagtcatttattgagagctgcttggtaaagaatcacagccagcgaccagcaacagaacaattgatgaagcatccatttatacgagaccaacctaatgagcgacaggtccgcattcaactcaaggaccatattgatagaacaaagaagaagcgaggagaaaaagatgagacagagtatgagtacagtggaagtgaggaagaagaggaggagaatgactcaggagagcccagctccatcctgaatctgccaggggagtcgacgctgcggagggactttctgaggctgcagctggccaacaaggagcgttctgaggccctacggaggcagcagctggagcagcagcagcgggagaatgaggagcacaagcggcagctgctggccgagcgtcagaagcgcatcgaggagcagaaagagcagaggcggcggctggaggagcaacaaaggcgagagaaggagctgcggaagcagcaggagagggagcagcgccggcactatgaggagcagatgcgccgggaggaggagaggaggcgtgcggagcatgaacaggaatacatcaggcgacagttagaggaggagcagagacagttagagatcttgcagcagcagctactgcatgaacaagctctacttctggaatataagcgcaaacaattggaagaacagagacaagcagaaagactgcagaggcagctaaagcaagaaagagactacttagtttcccttcagcatcagcggcaggagcagaggcctgtggagaagaagccactgtaccattacaaagaaggaatgagtcctagtgagaagccagcatgggccaaggaggtagaagaacggtcaaggctcaaccggcaaagttcccctgccatgcctcacaaggttgccaacaggatatctgaccccaacctgcccccaaggtcggagtccttcagcattagtggagttcagcctgctcgaacaccccccatgctcagaccagtcgatccccagatcccacatctggtagctgtaaaatcccagggacctgccttgaccgcctcccagtcagtgcacgagcagcccacaaagggcctctctgggtttcaggaggctctgaacgtgacctcccaccgcgtggagatgccacgccagaactcagatcccacctcggaaaatcctcctctccccactcgcattgaaaagtttgaccgaagctcttggttacgacaggaagaagacattccaccaaaggtgcctcaaagaacaacttctatatccccagcattagccagaaagaattctcctgggaatggtagtgctctgggacccagactaggatctcaacccatcagagcaagcaaccctgatctccggagaactgagcccatcttggagagccccttgcagaggaccagcagtggcagttcctccagctccagcacccctagctcccagcccagctcccaaggaggctcccagcctggatcacaagcaggatccagtgaacgcaccagagttcgagccaacagtaagtcagaaggatcacctgtgctcccccatgagcctgccaaggtgaaaccagaagaatccagggacattacccggcccagtcgaccagctagctacaaaaaagctatagatgaggatctgacggcattagccaaagaactaagagaactccggattgaagaaacaaaccgcccaatgaagaaggtgactgattactcctcctccagtgaggagtcagaaagtagcgaggaagaggaggaagatggagagagcgagacccatgatgggacagtggctgtcagcgacatacccagactgataccaacaggagctccaggcagcaacgagcagtacaatgtgggaatggtggggacgcatgggctggagacctctcatgcggacagtttcagcggcagtatttcaagagaaggaaccttgatgattagagagacgtctggagagaagaagcgatctggccacagtgacagcaatggctttgctggccacatcaacctccctgacctggtgcagcagagccattctccagctggaaccccgactgagggactggggcgcgtctcaacccattcccaggagatggactctgggactgaatatggcatggggagcagcaccaaagcctccttcaccccctttgtggaccccagagtataccagacgtctcccactgatgaagatgaagaggatgaggaatcatcagccgcagctctgtttactagcgaacttcttaggcaagaacaggccaaactcaatgaagcaagaaagatttcggtggtaaatgtaaacccaaccaacattcggcctcatagcgacacaccagaaatcagaaaatacaagaaacgattcaactcagaaatactttgtgcagctctgtggggtgtaaaccttctggtggggactgaaaatggcctgatgcttttggaccgaagtgggcaaggcaaagtctataatctgatcaaccggaggcgatttcagcagatggatgtgctagagggactgaatgtccttgtgacaatttcaggaaagaagaataagctacgagtttactatctttcatggttaagaaacagaatactacataatgacccagaagtagaaaagaaacaaggctggatcactgttggggacttggaaggctgtatacattataaagttgttaaatatgaaaggatcaaatttttggtgattgccttaaagaatgctgtggaaatatatgcttgggctcctaaaccgtatcataaattcatggcatttaagtcttttgcagatctccagcacaagcctctgctagttgatctcacggtagaagaaggtcaaagattaaaggttatttttggttcacacactggtttccatgtaattgatgttgattcaggaaactcttatgatatctacataccatctcatattcagggcaatatcactcctcatgctattgtcatcttgcctaaaacagatggaatggaaatgcttgtttgctatgaggatgagggggtgtatgtaaacacctatggccggataactaaggatgtggtgctccaatggggagaaatgcccacgtctgtggcctacattcattccaatcagataatgggctggggcgagaaagctattgagatccggtcagtggaaacaggacatttggatggagtatttatgcataagcgagctcaaaggttaaagtttctatgtgaaagaaatgataaggtattttttgcatccgtgcgatctggaggaagtagccaagtgtttttcatgaccctcaacagaaattccatgatgaactggtaacagaagagcacttggcacttatcttcatggcgttatttctaatttaaaagaacataactcatgtggacttatgccagtctagaggcagaatcagaaggcttggttgaacatatcgctttccctttttcctctccctccgcccctcccagtacagtccatctttcaatgttgcagcctggttgagaaggagagaaaaaggtggcaggaatttccaggagatccccaagaatgctgccttgtctgtggacaaagatggaccatgtgcccttcggaattagggatagaaacaaatattgtgtgctcttaacgattaagctgtgttatggtgggttttcaggtttttaccttttttctttacccctttactctgcaagaatggggaaagaatgcatactgcgaaaatgagtcttttaaattctgtctgcctactagttttaagtatatggtatgttgtaaaatttccaatgatgagagacagcacaataaatgtaccttatctccttaggctgaaggccataactacatagtggagtaatttaagaactctcttgccttcaccaacccaaaaggttgctttttgatagcaactggctaatgaatttttaaaaagagaagaaaaatactagttttcccctcttttgggaaatagattttaaatggctaaactactagccttaaaactactagtctaataaaatcaactaccacttttgtgaatctgacaggccacatttttatatggccctttacagaatggagtgtgttgaacaggatactaacgccattgagttgagctggcctagcgatggagggacactctaacacaactttccctcagctattatgcaacagatcagggaaaaagatgggatgacagatggggtcagacagaaagagcttctgggaaacaagcttacatagtcttttttaaaatgcacaaagcctcccagctaagaggtcacttggtttgggcttcattaggactgagactttgttgagttctttctgggacttggagagtggatgatattcaggctctgaacattcccagcgctctcccgagggtgccactttctcaagatgaaaactgtgactgaaaaaattaataataaatgtttctgagctgcctgtgttctccctgtgtgggtgagagaagggactagactcctaagcctgcctcagatacaagaggcatcattggctccaattttagagaacttgaaagcaaggctttggacaaaattttgagaccctaatcactttaccttcctccaaattacccaacatacggtaaacaacatttgtgcagaagtatgtatgtatttagttcaggttgacttgtgtccttataaactcttactcaaatgatttgaactttaaaaaaaaaa
